United States Patent Application Publication US 2013/0031665 A1 - sequence listing, part 2

SEQ ID NO: 6666 - DNA, 1041 bp, Zea mays
  Zm_smallRNAprecursor_2155
caggggtaaaaaaacaactctaggtctctctgcagaaacaaacaccacgtaggtttttccaccaattgacgatatggtcgtcttttttttcttgaaaaaaggaagaaagaacaacatgaaggaaggaatgaagtgccatcacatgagacggcagagaatcggtgaaataaagtgaaacaggccgtgtggtggggtggaccgaattttttgtattttagccatttttcgaaaaaacccaagaaaaaaaatatacctaatgagttatttaaaaaatgagtagtgacaaagataaaaaaatctaggcgagaaataaattttagcggacacaccagcgacataaacaaaagaaaaacaaataaaaatgcaaactatggggcttgaacccatgaccataaggttagaagctttgtgctctaccaagtgggctagctgggctttatgctcatgtttgcaacaaatattttaataacacaaccgagctcggcgccaagatctgtggcgccgagctcggttccacgtcgacgccacgcgtccgtgttgtgccaacgcaacacgacctcggcgccatagcctatggcgccgagctgtgttactacggcgccatagcctatggcgccgagcaaagggtccaaaaataacattaaaattttttaagatctaaacgtgaatttttttttcgaaaaatggctaaaatacaaaaaattcggtcacatgtaggggtgtaaatggtatggatattgtccgtccgtatttgaaattgacccgtctaagagggatgaaatccgatccgtatcagaatctaggtactcagtatccgatctatatctgatctttatccgtatccgtatttttaaagttggatatttaagttgtcaatatttattcaaatcttattcgatacaacttgataatatccatatccgtttcaaatccgaagagaagatatgaaaacaaatatggaatgagtaatattcgtctgtatccgatccaattacacccctagtcacatgtgctagcaagatagagtaaaggtctacgaag

SEQ ID NO: 6667 - DNA, 1042 bp, Zea mays
  Zm_smallRNAprecursor_2156
caggggtaaaaaaacaactctaggtctctctgcagaaacaaacaccacgtaggtttttccaccaattgacgatatggtcgtcttttttttcttgaaaaaaggaagaaagaacaacatgaaggaaggaatgaagtgccatcacatgagacggcagagaatcggtgaaataaagtgaaacaggccgtgtggtggggtggaccgaattttttgtattttagccatttttcgaaaaaacccaagaaaaaaaatatacctaatgagttatttaaaaaatgagtagtgacaaagataaaaaaatctaggcgagaaataaattttagcggacacaccagcgacataaacaaaagaaaaacaaataaaaatgcaaactatggggcttgaacccatgaccataaggttagaagctttgtgctctaccaagtgggctagctgggctttatgctcatgtttgcaacaaatattttaataacacaaccgagctcggcgccaagatctgtggcgccgagctcggttccacgtcgacgccacgcgtccgtgttgtgccaacgcaacacgacctcggcgccatagcctatggcgccgagctgtgttactacggcgccatagcctatggcgccgagcaaagggtccaaaaataacattaaaattttttaagatctaaacgtgaatttttttttcgaaaaatggctaaaatacaaaaaattcggtcacatgtaggggtgtaaatggtatggatattgtccgtccgtatttgaaattgacccgtctaagagggatgaaatccgatccgtatcagaatctaggtactcagtatccgatctatatctgatctttatccgtatccgtatttttaaagttggatatttaagttgtcaatatttattcaaatcttattcgatacaacttgataatatccatatccgtttcaaatccgaagagaagatatgaaaacaaatatggaatgagtaatattcgtctgtatccgatccaattacacccctagtcacatgtgctagcaagatagagtaaaggtctacgaagg

SEQ ID NO: 6668 - DNA, 1101 bp, Zea mays
  Zm_smallRNAprecursor_2157
aggggtaaaaaaacaactctaggtctctctgcagaaacaaacaccacgtaggtttttccaccaattgacgatatggtcgtcttttttttcttgaaaaaaggaagaaagaacaacatgaaggaaggaatgaagtgccatcacatgagacggcagagaatcggtgaaataaagtgaaacaggccgtgtggtggggtggaccgaattttttgtattttagccatttttcgaaaaaacccaagaaaaaaaatatacctaatgagttatttaaaaaatgagtagtgacaaagataaaaaaatctaggcgagaaataaattttagcggacacaccagcgacataaacaaaagaaaaacaaataaaaatgcaaactatggggcttgaacccatgaccataaggttagaagctttgtgctctaccaagtgggctagctgggctttatgctcatgtttgcaacaaatattttaataacacaaccgagctcggcgccaagatctgtggcgccgagctcggttccacgtcgacgccacgcgtccgtgttgtgccaacgcaacacgacctcggcgccatagcctatggcgccgagctgtgttactacggcgccatagcctatggcgccgagcaaagggtccaaaaataacattaaaattttttaagatctaaacgtgaatttttttttcgaaaaatggctaaaatacaaaaaattcggtcacatgtaggggtgtaaatggtatggatattgtccgtccgtatttgaaattgacccgtctaagagggatgaaatccgatccgtatcagaatctaggtactcagtatccgatctatatctgatctttatccgtatccgtatttttaaagttggatatttaagttgtcaatatttattcaaatcttattcgatacaacttgataatatccatatccgtttcaaatccgaagagaagatatgaaaacaaatatggaatgagtaatattcgtctgtatccgatccaattacacccctagtcacatgtgctagcaagatagagtaaaggtctacgaaggtggccagagaagatatagggagtgcttcagcttcgtcacttggaggtactcaaattttag

SEQ ID NO: 6669 - DNA, 1058 bp, Zea mays
  Zm_smallRNAprecursor_2158
tagtgcgtgacaattttcacgaaacagtgtcaaatttttatcatagcctctacatatgatatcatgacatgtcgacaattttcatgattttctgactttgtttgtattttatacaattttaaaacaactggatcgcaagttcgcggtcatgtttcgtgagcatggtgttcaaaatttccagtctgttcctgaaataggccgtaacttgtgctaaataacatgaatatcatttttgcattcactgttttccatttctcgagggacttgcagttcaaatctgaattttccgaagaaattcaaataaacaaactaaatgtactagctatagaaaacactgttataatcgtcccacaatggtacatgtaggtctacatagtgtaggaacataccacaaaaagtttggtgaccaaaataaaaaaaataaaaatatgctttgccgagtgtctacataggacactcggcaaagactctctttgccgagtgccagatatttgacactcggcaaaggctgacggccgtcagttgtagacggccgctaacggccctttgccgagagccatgtttgccgagtgcttgacgctcggcaaaacagtctttgccgagtgcttggctgtgccgagtgccctgcactcggtaaacaagatctttaccgagcgcaggactctgccgagagcggccctcggcaaagtcgactttgccgagtgcccgataaaaagcactcggcaaagccgccggcactcggcaaagagccgaattccggtagtgttggtctatattcagttcaataacaggctgatgaataacagagaaaagattaagtcaaagaaaatcactgatgttctcttgtctagtgatacaactgaagctcaaggttttctccaagagggtggagatgattgtgcacaagttgtctttagagatgaggaggaagatgagatggaaggtacagggataccttggtctgttattggagaggcagtgggaacagaagaacagcttgagcctcgtagaagtgcaagagtgagagagctctatgaaggagaagagtttgagtctga

SEQ ID NO: 6670 - DNA, 1043 bp, Zea mays
  Zm_smallRNAprecursor_2159
atacatagaactgcatcttgatcgacggacagtacagccactacttgataatgtatgaagaactattttaactgatgatacgaatggtttattaaagacattcatccacttgtcatatcttgcagaaacatcgcttaggacatgaaaatttgaccccacttaccagtccaaaccttcgaagagcccctctccctttattgcagatgttttgaaaatcgcccattggcggctcttaattttgtgtagttctaatgactctgtaatggcagcatcatcgagtgcacctggaagataaacaaaaatctaggcgagaaataaatttaagcggacacaccaacgacataaacaaaaaaaacaaaaaaaatgcaaactatggggcttgaacacacgaccacatggttagaagccttgtgctctaccaagtgggctagatgggctttgtgctcatgtccgcaacaaatattttaataacacaaccgagctcggcgccaagatttgtggcgccgagctcggttccacgtcgacgccacgcgtctggggtgtgccaacgcaacacgacctcgacgccatagcctatggcgccgagctgtgttagctcggcgccataggctatggcaccgagcaaagggtccaaaactgcatttaaaatttttttaggtctaaacgtgattttacttctgtttaagggctaaaatacaaaaaattcggtcggcaggcctgggtccgccagtggcaacatgccatcgtaagacacaagtcatgagattttttggcgcaaaatatacgtgtgtaggggttcaaatattaagtctcacgcataagctatcctaacgacacaacaaaatcacttgtgactagatggcaacatgtatatacatgttaggtaataccacctcatattcgcatctattagataaaattctatctagtaaaatacatacacccacatgaataaatgcctagataactcagacccgaatacacctattgcagaccaaaaatcatgagtatatcgactattaaaattataaaactttaaatat

SEQ ID NO: 6671 - DNA, 1044 bp, Zea mays
  Zm_smallRNAprecursor_2160
atacatagaactgcatcttgatcgacggacagtacagccactacttgataatgtatgaagaactattttaactgatgatacgaatggtttattaaagacattcatccacttgtcatatcttgcagaaacatcgcttaggacatgaaaatttgaccccacttaccagtccaaaccttcgaagagcccctctccctttattgcagatgttttgaaaatcgcccattggcggctcttaattttgtgtagttctaatgactctgtaatggcagcatcatcgagtgcacctggaagataaacaaaaatctaggcgagaaataaatttaagcggacacaccaacgacataaacaaaaaaaacaaaaaaaatgcaaactatggggcttgaacacacgaccacatggttagaagccttgtgctctaccaagtgggctagatgggctttgtgctcatgtccgcaacaaatattttaataacacaaccgagctcggcgccaagatttgtggcgccgagctcggttccacgtcgacgccacgcgtctggggtgtgccaacgcaacacgacctcgacgccatagcctatggcgccgagctgtgttagctcggcgccataggctatggcaccgagcaaagggtccaaaactgcatttaaaatttttttaggtctaaacgtgattttacttctgtttaagggctaaaatacaaaaaattcggtcggcaggcctgggtccgccagtggcaacatgccatcgtaagacacaagtcatgagattttttggcgcaaaatatacgtgtgtaggggttcaaatattaagtctcacgcataagctatcctaacgacacaacaaaatcacttgtgactagatggcaacatgtatatacatgttaggtaataccacctcatattcgcatctattagataaaattctatctagtaaaatacatacacccacatgaataaatgcctagataactcagacccgaatacacctattgcagaccaaaaatcatgagtatatcgactattaaaattataaaactttaaatatt

SEQ ID NO: 6672 - DNA, 1041 bp, Zea mays
  Zm_smallRNAprecursor_2161
acatagaactgcatcttgatcgacggacagtacagccactacttgataatgtatgaagaactattttaactgatgatacgaatggtttattaaagacattcatccacttgtcatatcttgcagaaacatcgcttaggacatgaaaatttgaccccacttaccagtccaaaccttcgaagagcccctctccctttattgcagatgttttgaaaatcgcccattggcggctcttaattttgtgtagttctaatgactctgtaatggcagcatcatcgagtgcacctggaagataaacaaaaatctaggcgagaaataaatttaagcggacacaccaacgacataaacaaaaaaaacaaaaaaaatgcaaactatggggcttgaacacacgaccacatggttagaagccttgtgctctaccaagtgggctagatgggctttgtgctcatgtccgcaacaaatattttaataacacaaccgagctcggcgccaagatttgtggcgccgagctcggttccacgtcgacgccacgcgtctggggtgtgccaacgcaacacgacctcgacgccatagcctatggcgccgagctgtgttagctcggcgccataggctatggcaccgagcaaagggtccaaaactgcatttaaaatttttttaggtctaaacgtgattttacttctgtttaagggctaaaatacaaaaaattcggtcggcaggcctgggtccgccagtggcaacatgccatcgtaagacacaagtcatgagattttttggcgcaaaatatacgtgtgtaggggttcaaatattaagtctcacgcataagctatcctaacgacacaacaaaatcacttgtgactagatggcaacatgtatatacatgttaggtaataccacctcatattcgcatctattagataaaattctatctagtaaaatacatacacccacatgaataaatgcctagataactcagacccgaatacacctattgcagaccaaaaatcatgagtatatcgactattaaaattataaaactttaaatat

SEQ ID NO: 6673 - DNA, 1042 bp, Zea mays
  Zm_smallRNAprecursor_2162
acatagaactgcatcttgatcgacggacagtacagccactacttgataatgtatgaagaactattttaactgatgatacgaatggtttattaaagacattcatccacttgtcatatcttgcagaaacatcgcttaggacatgaaaatttgaccccacttaccagtccaaaccttcgaagagcccctctccctttattgcagatgttttgaaaatcgcccattggcggctcttaattttgtgtagttctaatgactctgtaatggcagcatcatcgagtgcacctggaagataaacaaaaatctaggcgagaaataaatttaagcggacacaccaacgacataaacaaaaaaaacaaaaaaaatgcaaactatggggcttgaacacacgaccacatggttagaagccttgtgctctaccaagtgggctagatgggctttgtgctcatgtccgcaacaaatattttaataacacaaccgagctcggcgccaagatttgtggcgccgagctcggttccacgtcgacgccacgcgtctggggtgtgccaacgcaacacgacctcgacgccatagcctatggcgccgagctgtgttagctcggcgccataggctatggcaccgagcaaagggtccaaaactgcatttaaaatttttttaggtctaaacgtgattttacttctgtttaagggctaaaatacaaaaaattcggtcggcaggcctgggtccgccagtggcaacatgccatcgtaagacacaagtcatgagattttttggcgcaaaatatacgtgtgtaggggttcaaatattaagtctcacgcataagctatcctaacgacacaacaaaatcacttgtgactagatggcaacatgtatatacatgttaggtaataccacctcatattcgcatctattagataaaattctatctagtaaaatacatacacccacatgaataaatgcctagataactcagacccgaatacacctattgcagaccaaaaatcatgagtatatcgactattaaaattataaaactttaaatatt

SEQ ID NO: 6674 - DNA, 1076 bp, Zea mays
  Zm_smallRNAprecursor_2163
ctgcctgcgcctgctgccactcaggcagctgatctagctagttgggtttctcctttattccgccgcgctaccccgccttcttggtatggtatggctgggctccgtctttacctcccttgtttggagacgtacagcaccctcctgctgttgctgtgttgcaggccactgtcgcgttgcaatgccctcgggattaagtactgatccgtgtgttggctaatccgtcccgtacgtggcgtcaaatcaaagcttgctcgtgttacaggaaggaaggcaccggccggctgtcagaactcgacagaaataaagccagtcaaagcagacagtgtggctgccacttttattacagctctacctggctccatgtatgaaacccaactctttttttttctagattgtgaagcttcgtgactgttatcagcagcatcggcgtggaaaggccgttgccctggcctactcactacagtaaactaacaaaaatccgacggtcaatttatctccgacggctgtctacgatgccgtcggacatagcgttatgtccgacggccaccaaggactctcggaaataccgccttatctccgacggctaccctgacagccgtcggacataagcttatgtccgacggcctcgtacgtagccgtcggaggtaatgttttttaacacggcaagcccggcgcgcggttcattttcatgcgcgctcgctctctcctctccttctctctgcccgtagccgccgccgccgtgctgtcaccgccggtcgccgccgccgccgccgccgccccgcccacccgccgtcgacacccgccgcccgccccgtcaccgcccggcgccgtcaccgcccggcgccgtcaccgcccggcgccgccgccgccccgtcgccgccgccgccccgctcgcccgccgtccacacccgccgcccgccccccgtcgacacccgctgccggccgccactgccctgcccactgctaagtaagtatttttatttttattttgtagttttcactgtttttattaaattattagtatgttaaataatgtttatcttattatatccgagggcctaaatttgattatatgg

SEQ ID NO: 6675 - DNA, 1048 bp, Zea mays
  Zm_smallRNAprecursor_2164
cgtggttacaagaaacaaagcacggttggttgcccaaggctacactcaagtggaaggacttgattttggtgaaacttatgtgccggtagcaaggttagagtcaattagaatattaattgcctatgctactaaccatgatttcaagctatatcaaatggatgtcaagagcgcatttctaaatggaccactacaagagagggtctatgtggagcaaccaccgggctttgaagatcaaagaagccaaaccatgtttacctacttcacaaggcactctacgggcttaaacaagcccctagagcttggtatgattgccttaaagatttcttgcttaaaaatggttttgaaataggaaaagtagactctactttattcactcgcaaagttgacaatcaattatttgtttgtcaaatatatgtcgatgacattatatttggcagtactgatgaaactttttgtgaggaatttagtagggttatgacaaataggtttgagatgtccatgatgggtgagctcaagtacttcctgggttttcaagttaaacaactcaaggaaggaacctttctgtgccaaaccaagtacacacaagacatgctcaaaaagtttggcatggaaaaggcaaagcacgccaagacaccaatggcttcaagtggtcatctcgacttaaatgaagaaggtaaatctgtagatcaaaagctttatagatcaatgataggatctctactatatttgtgtgcatctaggccagatatcatgcttagtgtgtgcatgtgtgcccgttttcaagctaacccaaaagagtgtcacttagtggtcgttaagagaattttgagatatctagttcacacccaaaatctaggtctctggtatcctaagggctcctttttcgatttatttggatactctgattcagactatgccggttgtaaagtagatcgaaaaagcacctcggggacttgccaattccttgggcggtccatggtgtcctggagctctaagaagcaaaattgtgttgcactttccactgccgaggccgaatacatagctgttg

SEQ ID NO: 6676 - DNA, 1040 bp, Zea mays
  Zm_smallRNAprecursor_2165
ttgcagcatttttctctatgtgccggaacatttctactgatgtacatgagctggcaaggcgtcagcgggagactgacgacaatcttcgtcgtcaagcttccactatgggtatgccctttgctcctcgctcgcctgacgtgcctctccatcctcctcccccggagatcaatgagtggcaccggcaggcctacgaggtgccatttatgtcagcagacaaagaagaagaagaagaagcctacattgatgatcgcgagccgtttgccccgcctccctaccattgggatccgggtcaatcatcctctcaccctccgcctccctactcgggttagggacccactcccggtgaccctaggccatccgactttggttaccatcaccaccctccacctccttctcaccatcatacatcttcggcatctgtttttactgcgggtgatgagccccctagggactcctcactcgaggaagacatgatgaggaccttcttccctgactacacatcataccctccatcatatcctccatcctatcctcctcctggaggatattgattcatgtatccttgtctctctctcttcgtttttggtacttgttgccaaaaagggggagaaaatccaaaatttctcatcattctgtttgtggttctttcggttatgtatttcttttggattatttttttgttttggccactgttgtggcttgtatcctcttatcattgtatgaaataaaactgctgggtttttattcaaagtgatatgatggtcttctggccatcatcttttgtcccatcagtttgtaatgattgctttgctatgaagtaaaaatgatgtgtatttagagatagtcatatgcatcacaactcctgttatgacactcttgcacccctcggatggttgtattcagtatggtttttgtcactatctctaaatgtgttgctcacatgacatattatgtcaaaacattggattcacaatcgtgcacacatttagggggagccatctacatacaatcattcaaaagaaattttctattgcaaatgt

SEQ ID NO: 6677 - DNA, 1165 bp, Zea mays
  Zm_smallRNAprecursor_2166
agatttaatttgtgtttgattgtatgtacaagtgatacaaataaataaataagtaaaattaatctttaaaaatttatatagcaaatgtgatctagttttgttggtaataatgttagaaacataaaaatgaaatcgttcgataattagatattttaattaaaatttatataaaaacgtgtttaaaagctaccttgcttttcgtcctgaagctggaagccgctcgccaagagtagggatggtaatagattatgatctaaatacttcttaataaaatgttaggcccctaaataaaacatagtttaaaaatgaatagaaatagggactgatcctaaccctttgatccttaaatcttatagtgtaaaatttagagcccattatcagtcctagccaagagctttcacgcgcggagaaggtcggcagcttgcgcgacctagatggaggatctcactagcatccgacaagccagaccaagaataagggggtgtttggttaccccaaactaaaatttagcccctgtcatatcgaatgtttgaacctccgttccgggtattaaatgtagtctgattataaaactaatttctcagccgaagattaaaagacgagacgaatctagtccagttggttgggtctatatttcatactcctatttaaaagtcaaatgcttgatgtgacccggactaaactttagtccctacaaccaaacaccccctaacgcacaggtaaccaaacacgtaagaaaggttaagattagggatgacaacggatatgtaccatttcgatattagcatttaatatatgttcccatcaaataaaattctatctacgctcgtgggtatatgatcttacccgtacccgtataaatagttttacccatcaggtaatctatgccagatagaaaagacttaaattctaatattccaatcactccaaatgttttatatatatatatataataagttcaatttaaaatataacaactcatgtgattacataatttgaaagttaaaaacaaacaatagtcgaacaaggatttttatttagctaatatgagctttattatatgataatagtagtattgtcggcgtttcagactcgggggtctctggaccgaagagtaaatttgtcgctgcgtgcccctgcccagatgggttggtgcgagatggaa

SEQ ID NO: 6678 - DNA, 1041 bp, Zea mays
  Zm_smallRNAprecursor_2167
tgagctaataggccttgttgaaagacacttgttatccctttagaggtgctatagagaaatctaatccaacaaaatttcacaaggaaatgccaatcatatgcgagataaactacccttttaaaagatatatatatatatatttgtgcagaagagataatgtacatcttgatccacgttcttatgcgaaacatatcatggagaagtaacccgatcgatttcgttcaccacaaagcacgagagcattttttttatataaacttttgcacctatcaagtcgaacaatatgcaatggccgcgaatattcccataccttaacatcaaaagaaaaatattctcataccttgtttgtcgctgactctctctggacgacgtacgtgtattagcttcttctcccagcgaaaaagcactcgaggatcaacacactcacacacctccaatccagaagaagaattccagatgacatcttgaaccgctctggcataggaggaggaggcaaacgcgtagccccagatgacttgccggcgggccaagaaatataatgccggcaagtcatccttggctacgcgatgcatcatcgttgcatatatatataccactcagctagcctccttcccacatgcaagagctaatcaaaagatgcatgcatggcgaacacatacacgacgacgacgtatacaagctagctagctgcccagcttgagctctttcaggttcaggtttcttcagagcatgacgcggcgctgcttcttatagcgggtatgcagaccggtacccggccgggcggccagccggcgttctggcggcttctgacaatgcatgtgacgtgaacaaaacccctggtctcgttaacaggagtacaggacgacacacatgacgtgggggagcaggcgcctagacggccgggggcgccagtccagtggtaggaggctaggagcatgcaacgccatcacctacggtgcatgtaggccctgcatgctctgtgtctgtgctctcctgtttgctcgtttagtaggagctataaattctcctctggcggttccc

SEQ ID NO: 6679 - DNA, 1063 bp, Zea mays
  Zm_smallRNAprecursor_2168
gtcgtcactagaactatcctccccgctcccttcactggagctgctcgttgtctgccattcaagttttggtcgcgtcttcatcaactttgttagacgcaccggtgcaggaccacatccatactaggctgctcgttgtctgccattcaagctggttccatcgataaagggatatactgttagtctgatatactggttccatcaataagggaacttggagaaaaggcactttccaatgcagttagacagagaaggcatggctgtgatgttataatgctgaaggaccccaagaagagattaagccctgtaggtccccaagaagatattaagccctgtggactaccacctcccgttatttgtgggcttcaccaagggcgggaaacatttggtgacatcaaacgaccttcgggctggggacgtctgcgagcttgttaaggggccagacgatggtgagccggtgtactctgtccggatgtgtggtcacaaaatttaaagccgccccgacttcatctgtgcgcttctcttctcttatgtcggatactaagatcaaattcaccccacctagagaagagaagcacacacatgcacctggggcagacgtcttcaacccgaaggtcgtttgctatcaccaaatgtttccagccatcggtgaagcccacaaataacgggaggtggtagactacaggacttaatctcttcttggggtctacacacttaagattgtaggagctagtgctcaactactagcatctatagatatggacacaagtccaaatttggtgctactcggcaccatcgatatcattagaaaaaaaaattaagtccaaatttggtgctactcggcaccatagataaggcagggatcagagggaaaacaaggatgtggcttatagggcaaaaagaggggtccaaataacattgtcatggctatgaacaagtcaaagatgggagataagaacaagtcttataacatagggttgggaagcaaagataggtagtcaaaaaactaagaagggagataagaacaagtcttataacatagggagataataacattgccatggct

SEQ ID NO: 6680 - DNA, 1103 bp, Zea mays
  Zm_smallRNAprecursor_2169
agcctaggatagacattatgctacatgggggtgccaaagagagacttggtaaaacttgggtgaaatggttccatgccaatgatattcctggaagggaagcagactgcccatattttgtagcagcagtaaaactatctcaacagcttggggaaggagtggctgttccaaagcgaagagatatagatggaccattactaaatatgaattatgtggacttacaaactcgcatggaccaatacaaggaagattgggttcgctttggggtcactattatgtgtgattcatggacagggccaaccatgatgtgcattattaattttatgatttgttgaatggtcgcatgttctttcataaaaccgtggatgcaattggtcaaatacaaaatgcagaatttatttatgattgcattaaggaagttgttgttaaagatgttggagaaagttgtgttgttcaaattgtgactgataatggttccaattacaagaaagcatgcaagcaacttatagccgagtatccacatattacttggcagccatgtgccgctcacactattaatttaatgttgaaggacatagcacactgtgatgaggttgatggactattgtatagtgctaagcggatatgcagattcttgtacaagcataataggtaatatttatattgtgaaattcctgtacaagcataatacttaatatttctatagttaatctgatgttattctaatattaatatgatgatattctattttttcaggcttcatgctatgatgaaagagaagataggtggagagcttgttagatggaattccacgaggttttggacacttttttggttcctacagagttttgggacacacaagacaagttccaagcttggatgatgtctagcgattggaaaaataatgattggagagatgaggaagaccacaaattcacctacgattgtttgatagataggatatggtgggagaaggttgaaatggtgctaaaaactgtgacaccactctattctatgcttcgatttgctgaccaacagaaaaatggaaccatttctggctttcttccaaaaatgctatctgctcaagctgagatctttgctaagtt

SEQ ID NO: 6681 - DNA, 1099 bp, Zea mays
  Zm_smallRNAprecursor_2170
cgggcatcttgatcttttccgttcgttccagtgcgccttccaaaacaccaaaaggacagccgcgaacactctggacgcatcgttgcgtgacacgagactatttctcacacccccgcccttaatttgaccgcggtttccatgtagttaacttaagtgtgtcttgactgatcgaccattcataaccgctgctgtgcggctagctagtgtttgactgatcgaccattcatcccctgttaaaatgtgtttcaaaggcagtgagggaagtgacggctccgatcccaacttcattactccaccaaccgtccaacacgctatgtgtatgtatcttcccatatggccgcgcgtgtacacgacaaatcgtaaatttgtgcagccaacctcattcagaaaatgtggtgataggcacgctgaggtacaaggaccaccaagttaattaagccatgttcgggtcagcgtgcggttgatggatggtgcgttagcgtagcttggacacgttaaggccttgttcgtttgtgccgaattggtggatcggaacgattcctaaccggattacttctctaatttatataaactttgattagatagaacgattccgggtgcaatccgacagaaacgaacaaggcctaaagagattggcgtggtcaaaccgtttagtttcgaaaataaattttctacggctggtttagaaacagtataaaaaataattaaaatgaaaaaaaaaactcaattgaagctgcaagaatcttgttcctctgcccactctcagttggatccgccatcgccggttggatcagccactatgcgtttactttgtgccttttgtttaagcaaacaggatgattcctgtacacaacaggccacacgcttcctcgtctttgactcgtcgttatcgtaattgtactcttgtcgtttgaaaagtcagctctctgtgtcagcttttgtttggaaatgtagcgacgtgtacagtcgcagtacagtattgttgggggcgcttgcgcagcttttgtttggaaacgatcacagcgcttggttggttggttggtgcctgtgcaagccatttcaggaatcagatcaaactcattcagaacctgatttggct

SEQ ID NO: 6682 - DNA, 1065 bp, Zea mays
  Zm_smallRNAprecursor_2171
caattttgatcatctttggtcttgatcttcaacttggagtaccaagataagtgccaaaatatttctcaacaaatatccttgtaccccttcactttccatgattatagatcaattaaaaaccaaactatggtctctcaaacaacttatgtgatttatcctatatgagagccttcaaaatcaaagtgactttcaatatttccaatatttgtcactttatgacagattctatatactctaaagaaacattcataaattttgatgtacagatcctatgaccacgaaaattggtggagatgtgctttaataagtctgctaacagctgtaaaaagttgagactcatttgacttcatttgtgctgccagccataatatctcccacagtaggtacatgctgaaaactgctgtgtttgtgctgacaagattgacttaatcaagaagtttcacttatccaatgattatgaaatttgcacagactttgctatcatatgtatagagcaagtaaactgaatttcaagccaatctaaatagatttgatcactcaaacatggttatgagcacagccttgtcagattttcaatgttggccagatttcagtaaattgagttactcttcttcaagttgaatcaaatctgaaatgaactactttcaaaaggcaaatatccattcaaaccacttactaaatgaagtctcttgaatttattcaacataaatcaatccaaacttgattatttagcaaattgtccattcaatcatcttatagcaagcaacatatgcatatatatccaattcaattaactcatatgcattcaaatgaatttgatcaacaaatattatactttatatacctcatgatcatccaatagcaagtttgaacttaacttatttgcaatccattcataatttaaccaacttgaataaagcacttgtatttggtagaatttggacttcacttattattgacttggcattgggatagaattttattagtcttcaacacttaattcaatagatgatgattaaatgaatattattgaatcaagcctccaatgcccaaggtacctgttta

SEQ ID NO: 6683 - DNA, 1065 bp, Zea mays
  Zm_smallRNAprecursor_2172
gcccgtcgcagagagaaaagcaagcaggccggccatcactcgctgacggtgcgcttacgaagaagattttattcgttattcctgcgccaccgcctttcatccggcattagaggttgtttagttttagctctgggccatccgacgttcagcgctggaactgcgggaatctgcagcgcatgcgaagaatggttcctgtcctgcgccaccgccaagtggccgtcagtgtcgtcgtcgtaggccgggggtccccagtacccccacactagaccggggctcgtgtttgccggcctgctgcccggtgatcacctttgtaggggcagggcatcggcagacgagacgtagcaatcatctcacgtctcaggcaaagccgtgaatccatccaagacgacagtcactcacactgccgttccggccgcgaatatgaaaagacaccgtatcttatgagcaaggagccctgctgctcccatgagcaaaatcaatccagatcacactctccacatccaacggtgctgtgtcaggggggtttttgtaaaatgtacagagtttcaaagaatattttataaaaccccctgacgcagcaccgttggatgtggagggtgtggtctggattgattttgctcatgggagcaccagcgctccttgcgcacaagatacggtctcatatgaaaactatcagtttccattcattttcttggattattattattcctgcaaaaaaacctatggaaatcccgtgtgctacggatcgaacccgttttcgatctattttcgctttaaatcgaaacttcttatacacgtttggatttttttcccgttccaccaatggtgcaagtgaagggctacacttacgactacggcagtagttgtctcatagtctgctttgggtgcgttgtggcccctttgggtactgatggattcagattagacacacatgaaacgaattgagatgtcactatttaatatattttaatttgaatataaatatattcggatacaaatatattaggatagttcggattttgatccatatttagatacttacttgatttagaacatagcgtcata

SEQ ID NO: 6684 - DNA, 1140 bp, Zea mays
  Zm_smallRNAprecursor_2173
gagtagaataaaactgagcaatgatttcagcattccaatcatattggaatgtcatgatggtcttcatccttttttgctcacaggccttcaatgcctgtgtcatctcaggatctccaatagcttcgcatccatcccagttaataaaacgctgatggaggatagactggtgcttctttggaagcataactgaattatagaaatcaacatgaaggagagtccagaacgattaccatcaatcctgacatcacgaacacagaatgtaggattttggaagcgcatatcttgaagaagggcagaccctccgttggtagtgaaatcaatgacatgttcgttggcggaatgacgggcctgcgcttcgtgaagcactaacccctggataatgggtgcattagcaggagggagattaacatcatcatcttttcctccctcgtcatcgctggtagcctccgaggcttgtggattcatcgctggacgagaccggccggaggggttccaagccgttcgtccgcgaggtccatgagacctagaggcctcaccacctggcatgacattgccagatccgcgcccgcgcttggatctggaccgaggaggagtgtcttcacgaatttctggggcttcgtcacttgaatcggactcaacaaccgatggatttctacgacgcaccatccttaagattaaacaaagaagaacatatggtgagatattgatgtttaaggagtttaacgaacatgttttatgaaagacaagtataatattggaaatgaacttcaaccattcatatgagccatttagctacaatgaacaataccaacctacttaactcaaaacaatgttcgagacaatgataacagtttaagtgtgccatacacctaaactacacaatatccttgaagagatacttaagataatcaagaactatatggatcgagtcaaaaatagggaaaatgagacaatacctcgatttgtgaaatcatcaacgaaaatcccaaagaagagtggagagatggtggaggagctcgagggggatcaaatctccaacaatctccacgaagatttgctagtgttttggagggatttgagtggaggagatgagagagggagagagagaaggcgagggcgtcggcggctgaagaagtgaga

SEQ ID NO: 6685 - DNA, 1040 bp, Zea mays
  Zm_smallRNAprecursor_2174
ggtttgcggcattcttctccatgtgccacaacatttctgctgatgtccatgaggtggcatggcgtcagcgggagactgacgacaatcttcatcgtcaagcttccaccatgggcatgccttttgtccctcgctcgcctgacgtgcctctccatcctcctcccccggagatcaatgagtggcaccagcaggcctacggggtgccatttatgtctgtagacgatgatgaagaagaagcctatgttgatgatcgcgaggagtttgccccgcctccctaccatggggatccgggtcaatcatcctcacaccctccgcctccctacccgggtccgggacccattcatggtgaccctaggccatccggctctggttaccatcaccaccctccacctcctcctgatcatcgtacatcttcagcatctgttttttatgcagctgattagccacctcgggactccacatttgaggaggacgtgatgaggaccctcttccctgactacacttcataccctccatcatatcctctgtcatatcctcctcctggaggatattgattcatgtatccttgtctctctctccgtttttggtacttgttgccaaaaaggggggagaaaatcctacctctagtttgtggttctttcggttttcttttggattatttttgttttggccactgttgtggcttgtatccttttaccattgtatgaaataaaactgttgggttgttattcaaagtaatatgatggtcttctggccatcatcttttgtcctatcagtttgtaatgactactctgctatgaagtaaaaatgatgtgtatttagagacagtcatgtgcatcacaactcctgttatgacattcttgcacccctcggatgattgtatttagtatggtttttgtcactatctctaaatgtgttgctcacatgacatattatgtcaaaacgttggattcacaatcgtgcacacatttagggggagccatctacatacaatcattcaaaagaaattttatattgcaaatgtatatcttcttgaccttaat

SEQ ID NO: 6686 - DNA, 1062 bp, Zea mays
  Zm_smallRNAprecursor_2175
tcttccccgccatcgtccaatctgggagaaacagaatcccacctcggcgacggaggggccggcagctttgctattcgcggcgccagtggtcagtgggccgtggcagcagcacccgaggccgaggagcaccatacgagctgtccgcgctaaacgccgaagcctagaaccactctcgtctctcgccgcggcacgtggacgggggtccgctcgcctttcgtgcgcgcggcgggtcgagcctggcctttcccggctgggttggacgtttggtgcccgtgcgccatgcggtggccctctgttccccgggcaaatgcatatactacgcatctgtctggtctggccgtctgggtctctggcgctctccctctctgtgtagtctgcatatggcccatgagggaggcaggtggtgtgaggtgcacgcgacgcgagccgagccgggtgggtaggcgcgtgatgcccagccctgcaggtgcacagctaagggcttgttcggttagaccaatccagagggggattgaaggggtttaaatccctgcctagtcatttttgactagacggggatttaaacctctccaatccccctctggattggtctaaacgaacatgccctaactgggatgtgcaccgtgcatgcatcgccatgtcgtcaatggtaaggtgccatggtcagtggtaggcaaaatgatcgtgatcctgcctgccaacttgtacatcaaatgcctttattgttctaaaatttagaaagcgtcaattgatttcccgataaaagccattagtacgaagataattgaaactacctaagcatttccccccccccccccccccaccaagcagataaaacatgtaatgtaaaacggagcgatgaatgcttggccatgctgcgcacacgcgagtgatgcggttggcattggcatggcaccaaccatattctgtacttgcggacaatcctcgaatgcccattttgtacgtgaacgtaaggttgaacgcgacgcaaggctagtggcacgaaaagcgttccgaagaacgcgacatgaagctagaggtgccaggtccttgcccggcaca

SEQ ID NO: 6687 - DNA, 1068 bp, Zea mays
  Zm_smallRNAprecursor_2176
agttaattatgtccgcgtggtgttcgtgcggcctgggctagccggctgggactgaggaacgcagcacgcagaatatctggtgtcggttgcaaaacgaacatgagacctatagtgacggttgagtccaggtcgcggcgcgtgccgtaggcatagtcggcggccgcattgtggcgagcgggtcgacgacgacgaagcctttgaggatggcaagtcgcacgtcgctcgtcacaatgatcgccgtggagcccggcgccacggacgcctgaactggtgggagtagaggcagagacagcggtgcccctccccgtgtgccgctccttactgctggcctcgtggagcttgtcttgatccttcgccccgccggcgactgtgccacaggtccacctgcagccgcaagtatattgcacatgaaacatccgcataacccacgagaagaagctagctgcactgcatgcgttgcatggccccccgagagatcacggttcggtggcctgtgggcgatgacagtgagagcagagagcacacggccctcgcagaagcgaggcttttcctcgctggtgctgggttgtgctctctctcttctgtcatcgctcccgaggtccactcgaccgctctctccatccctgcccgggcccccccgccggcgtcggccctccccctttgccacggaccctgcaccgagaggaaaacccaataagccatccatatctgccacgccagacgccacaccatcgtgcatgcgatgggactatgggaggagcgccactgcaccagcagatggccacacgcctgaatcatcagagaagtgtgggtggacggaggagtttgcttagcttcgccagttcgccgggagggagagaaacagcgtgaccatggacgacgagactccgatgctcgcccgccgctggcttgtggtgcgtgcttgcgaggagacggtgtgtgtgtgtgtgtgtgagagagagagagagagagagagagagagagagagagagagagagagagagagagagagagagagagagagtgagcagtccgtgaggcgtggcagcgaaacgtctgggctcaagt

SEQ ID NO: 6688 - DNA, 1189 bp, Zea mays
  Zm_smallRNAprecursor_2177
ccattgtatagctagcaagaagcttcaatatgtgaagcgccctgcgaagactttaatatctttattgagataagataaggaactcaactttgatcttagggatcacttgagtgaggaaaggattgaaagagacccgttccatatggactctgaaagggaaatagggtcaaacctttttctataaataattttggtggttgaatgcccaacacaaatattggactacctagtttgctctagattatgtattctacaggtgcataaaggttcaacacaaaccaataaaaagatcaagttagggttcaaaagaaaggagcaaaagaaaccgaagagaaccctggtctggcgcaccggactgtctggtgcaccaggggccgtacagtctaaactcttcacctttaggtttttcaggagccgctccgctataattcaccggattgtccggtgcaccagcggagcaacggctatccagtgcaacagtcgtctgcaaaagcgtgaacagtgcgcgtagaagtcagagcaggcatcagaggcgcaccgaacagtgaacagtacctgtctggtgctgcaccggactgtccggtgcgacatgaagtcagcgctccaacggtcagaatcttcataaccctaacggttgggtgacgtggctggcgcaccagacagtgttcggtggtgcaccggactgtccggtgcgcccttcgacagacagcctccccaatggctatgtggtggttgagggctataaataccccccaaccaccaccactccaagcatccaagttttttagacatctcattcaatacaagagctagtgcaatcaatacaagacacaattcaaaagaatcaaagcctctccaagtcccaaattcactccaaacacctagtgactagagagagagttttgctcgtgttctttgagctcttgttcttggatcactttgttcttcctcattcttgttctctaagtgacttgtaatcaaagcaagagacactaagtttgtagtggtccttgtggggtctaagtgacccgtttgatcaaggagaaagctcactcggtctaggtgaccgtttgagagagggaaaggattgaaagagacccggtctttgtgaccacctcaacggggactaggttctcaagaaccgaacctcggtaaaacaaatcactgtgtcatctgctttatttcttgg

SEQ ID NO: 6689 - DNA, 1102 bp, Zea mays
  Zm_smallRNAprecursor_2178
ttttgatggcaaaaggattcttcgtttacagaatggaagttgggagcatgctgagaaaactaaaaatacctttgtctttaatgcatttgtcttttgccaagtaagttggtcgctctccaatttaaagtttcagctatatgattctcttcaatttgtaaggtccttcgtgtggcttcaacatacgcatgccatatatccaatttttttattgttttggatatatcacccctgtaaattataccaagaatcatatgtagtctacagctattagacaacaccattgaattgtttccccatatatacctgctgtgcatttgtgtcagatcttcaatgagttcaatgctcgcaagcctgaagagaagaatgtcttcaagggagttgcaaacaaccacctttttgtggccatagtgggtgcaaccaccgtgcttcaggtaacatgctatttgaatgtttttacatggtttgtggaacggaaattattaagtataaaattattaagggcttgtttgggagtaaaggtaatggagtggattggagggcatataatcctccactattcaattttagatagcaagggatcatagtcctatcaatacccttcattccacttgctcccaaacaagccctaagtattacactccgtcgcagattttgataatcgagttcctcgggaagttcttcgatactgctagacttgattggagactatggttgctgtcagtggctattggtgcagtgaggtatgctacttttgtgttttagtcgaaatccctacagcgcgctttcccaacaatttatagtgctaatcttgaagtattcgtgttatgaccggtctcagaggtggggtcgtcaagaggcttatggcccaagtatcattagataagagtagtactggataaggatagatatccaagtcattagataaggatagatatccaaaggagttagtcagtttagatgagagagttatcagttatctagatgagagactataaataatctgcaatactcttgattaagggataagcagaagcaattactattgcccccagggagcagggcgaaccctagccgccacccccttcttccacgtcccacggac

SEQ ID NO: 6690 - DNA, 1075 bp, Zea mays
  Zm_smallRNAprecursor_2179
cgtgttcgttccccgtttcccttcgttcctggctgtataggtcacagaacacaccaaggttgtgacgagagaacatagacggaacggaaccgtgtttccaaaagaaaatatttgtaggttatttagggtcatgtttggaagcaatctagttttttaaaaatctagtttatatctctaatttctagaaactgggttataaaaatacatagtttatgatgtttggaaccaccttatttttcataaattggttttagttaggaatggctagcttctttgtttctaattctttgtttctaagaaattgggaatctggtttttataaaatggagtttaaactattatatttagaaccaacttaattttcataaatcagtttctcagtgcttccaaacaagcccatagacaaaaaaaaactagatgttctttgattaccggcgtgaacgagtcgggttgaagaaatagaagagacgagcctggcatggtggatgagagccgctcgggctagccaaggagactgcctgcgatcgacaaccacaagcagaagaacagcgtcctctgcgactgatggaggccacaggcaagtcatccttggctaccagagcagtgctctcatcgccatgcgaggcccctcctctcctgctctgtacagaaccatgctaggagttactctgacggttctgatctaaaactttcccgattgggggctggtcgatggttgctgcgccacctcgccgcgcccccatttatagactatagtatagcggtcacggatcgggttgacgccgaaaagagtgggccggatcaaagcggcccatgccgctcgccgcacagagatatcttgatctttccctttttgggcaatgcacatggcccgaatatgttctcctccgtcggtaaccgtaatgatttgttcggtgcccatgctgattgcatgccgatcgcccccgcgtaccatgcagctcggtcgcgtgacatgacctggtgcggccggccggcatctttgcagttgcagatcacaaggagatcgatctctgctcaccttgtctgcgaacgtaaaagtgatactggcatgcag

SEQ ID NO: 6691 - DNA, 1133 bp, Zea mays
  Zm_smallRNAprecursor_2180
tcgagttttctggtgccggtcctgctgctgagctcggaggacttggaattttctcttgagatggcctttttcttcttcttttgccctttccacttgcatggctttgttggagaggtgcgagaaactgaggaagtcttggctggctaggatggtcttgagttctggtctgagccccttcaggaagcgggccatcttcttgacttcggtgctgacgtcatccggcgcatagcgggccaactccgtgaatttgtgcacgtactcactgacagatcttccgtcttgagtcagttcccggaattcatcttccttgagctgaacgatcccttggggcacatggtgctcccggaaagccgtttcaaactccgcccaggtagcatctctgatggtaacattgaaggtatcccaccaggctaaggccattccggaaagttgatgagcagccagttgaacacgctgattttccgggcatccgatggcttccagctttcttttaatcgtgcgcagccaatcgtcagcatcgaggggattgctagatctggcaaacgtgggaggcttgagcctcaggaaatctcccatcctgtcttgcggtctcccaccattcgggcgttgattttccagacttcgagtgaggacctcgatgagtcgggtttggttggctagaacttgggctaaatctaagggtagttctggaggtgcggggaggtgggtctcactttcctctctaccggcttctctttcagctctcagggggaaccctgctccaatccggaggcggtaggcgtggttttatccgaagccatctgccagggggagagagtcactattatgcacatgccaattgttttcaaccaagttattttattcattacaccaatacattacaagcatacggctactacaagtcgtactacacgtgagcgttctctgaggtacaaccgaactctttttctaaagtgtccccaaattccttgagaaggtcatcaaggctagctagggacatatccttgacgtcggacaaattctctatcctgacgagagttggtgctggaggggccttcttcctccgctcagtttggcctccttggttcttggtcttcttttggattttcttcgtgggggcgagcttcttcagc

SEQ ID NO: 6692 - DNA, 1190 bp, Zea mays
  Zm_smallRNAprecursor_2181
tcaccggccgccgccgccactgccatcgacgcgacggcgaggaggacgtggccgagaagacacaaggctattctcgtggccattggtgaaggaaagaaggaaggaagaatgccacgctttggttgtgttgtcgccgttaaatagattctgctttggcaagaattgtatggttctggttgcttgtagttgtagttgtggcagatcgaggaagttaaggttgagacttgaggatgggctttgtggcagatccacgtgggtcactgcttggttatgatgcttatggtcttttgatgggctgtttggatcgggttggtagtggccgttgacacacatagccgttggtttttcaaactatgcttttgtgctaagcaaggaacggccgtacctgagaatctgatatgcacgcccactggcacgcgcggggctgaattttgaaatggcaagaaaaaacgtccacattgatcaaaccgttgctgtgactactaggttgcgtttgttggcaagcagtccttctgtgcaagcgtgcaagcaaaccatctgatccattagatcgtgattcaaccgtaggtcacatttaacacttaaacccttccaccaccagctcaataatctttataaaaaactccctaacaaatcatagttgtatctgtggttggatcgtaatctaatggatcagatggtttgattgcacgcttgcacagaaggactgcttgcataacagtcgttaccgcgtttgtttgtaattataatatgtctagattattagtttaaaagttgttggattatataatcttagcatattataattctaaacaaacactccataagtctccggacgcttcatagtctgcagggatgacaacgactaagatatgcgggcagagacaaggacacactcatggtcaccagagaaaaaaagatatcattattcacatccactatccatccagcgatgaagctaaagcgaaccaaagcagggtgcaaatgacttgatggtgtatagtaataactcatagatggtgcgtatatagtgaaaatttggtctaaatcactagtttttaaaattttcgtgggtgcatgtccattcaccatcacctacatagctacgcccctgtatccatcatacgtgtaaaattattctatgcccgtcacccacaaggataatgggtatccatccatcaggtacctat

SEQ ID NO: 6693 - DNA, 1191 bp, Zea mays
  Zm_smallRNAprecursor_2182
tcaccggccgccgccgccactgccatcgacgcgacggcgaggaggacgtggccgagaagacacaaggctattctcgtggccattggtgaaggaaagaaggaaggaagaatgccacgctttggttgtgttgtcgccgttaaatagattctgctttggcaagaattgtatggttctggttgcttgtagttgtagttgtggcagatcgaggaagttaaggttgagacttgaggatgggctttgtggcagatccacgtgggtcactgcttggttatgatgcttatggtcttttgatgggctgtttggatcgggttggtagtggccgttgacacacatagccgttggtttttcaaactatgcttttgtgctaagcaaggaacggccgtacctgagaatctgatatgcacgcccactggcacgcgcggggctgaattttgaaatggcaagaaaaaacgtccacattgatcaaaccgttgctgtgactactaggttgcgtttgttggcaagcagtccttctgtgcaagcgtgcaagcaaaccatctgatccattagatcgtgattcaaccgtaggtcacatttaacacttaaacccttccaccaccagctcaataatctttataaaaaactccctaacaaatcatagttgtatctgtggttggatcgtaatctaatggatcagatggtttgattgcacgcttgcacagaaggactgcttgcataacagtcgttaccgcgtttgtttgtaattataatatgtctagattattagtttaaaagttgttggattatataatcttagcatattataattctaaacaaacactccataagtctccggacgcttcatagtctgcagggatgacaacgactaagatatgcgggcagagacaaggacacactcatggtcaccagagaaaaaaagatatcattattcacatccactatccatccagcgatgaagctaaagcgaaccaaagcagggtgcaaatgacttgatggtgtatagtaataactcatagatggtgcgtatatagtgaaaatttggtctaaatcactagtttttaaaattttcgtgggtgcatgtccattcaccatcacctacatagctacgcccctgtatccatcatacgtgtaaaattattctatgcccgtcacccacaaggataatgggtatccatccatcaggtacctatg

SEQ ID NO: 6694 - DNA, 1188 bp, Zea mays
  Zm_smallRNAprecursor_2183
caccggccgccgccgccactgccatcgacgcgacggcgaggaggacgtggccgagaagacacaaggctattctcgtggccattggtgaaggaaagaaggaaggaagaatgccacgctttggttgtgttgtcgccgttaaatagattctgctttggcaagaattgtatggttctggttgcttgtagttgtagttgtggcagatcgaggaagttaaggttgagacttgaggatgggctttgtggcagatccacgtgggtcactgcttggttatgatgcttatggtcttttgatgggctgtttggatcgggttggtagtggccgttgacacacatagccgttggtttttcaaactatgcttttgtgctaagcaaggaacggccgtacctgagaatctgatatgcacgcccactggcacgcgcggggctgaattttgaaatggcaagaaaaaacgtccacattgatcaaaccgttgctgtgactactaggttgcgtttgttggcaagcagtccttctgtgcaagcgtgcaagcaaaccatctgatccattagatcgtgattcaaccgtaggtcacatttaacacttaaacccttccaccaccagctcaataatctttataaaaaactccctaacaaatcatagttgtatctgtggttggatcgtaatctaatggatcagatggtttgattgcacgcttgcacagaaggactgcttgcataacagtcgttaccgcgtttgtttgtaattataatatgtctagattattagtttaaaagttgttggattatataatcttagcatattataattctaaacaaacactccataagtctccggacgcttcatagtctgcagggatgacaacgactaagatatgcgggcagagacaaggacacactcatggtcaccagagaaaaaaagatatcattattcacatccactatccatccagcgatgaagctaaagcgaaccaaagcagggtgcaaatgacttgatggtgtatagtaataactcatagatggtgcgtatatagtgaaaatttggtctaaatcactagtttttaaaattttcgtgggtgcatgtccattcaccatcacctacatagctacgcccctgtatccatcatacgtgtaaaattattctatgcccgtcacccacaaggataatgggtatccatccatcaggtaccta

SEQ ID NO: 6695 - DNA, 1189 bp, Zea mays
  Zm_smallRNAprecursor_2184
caccggccgccgccgccactgccatcgacgcgacggcgaggaggacgtggccgagaagacacaaggctattctcgtggccattggtgaaggaaagaaggaaggaagaatgccacgctttggttgtgttgtcgccgttaaatagattctgctttggcaagaattgtatggttctggttgcttgtagttgtagttgtggcagatcgaggaagttaaggttgagacttgaggatgggctttgtggcagatccacgtgggtcactgcttggttatgatgcttatggtcttttgatgggctgtttggatcgggttggtagtggccgttgacacacatagccgttggtttttcaaactatgcttttgtgctaagcaaggaacggccgtacctgagaatctgatatgcacgcccactggcacgcgcggggctgaattttgaaatggcaagaaaaaacgtccacattgatcaaaccgttgctgtgactactaggttgcgtttgttggcaagcagtccttctgtgcaagcgtgcaagcaaaccatctgatccattagatcgtgattcaaccgtaggtcacatttaacacttaaacccttccaccaccagctcaataatctttataaaaaactccctaacaaatcatagttgtatctgtggttggatcgtaatctaatggatcagatggtttgattgcacgcttgcacagaaggactgcttgcataacagtcgttaccgcgtttgtttgtaattataatatgtctagattattagtttaaaagttgttggattatataatcttagcatattataattctaaacaaacactccataagtctccggacgcttcatagtctgcagggatgacaacgactaagatatgcgggcagagacaaggacacactcatggtcaccagagaaaaaaagatatcattattcacatccactatccatccagcgatgaagctaaagcgaaccaaagcagggtgcaaatgacttgatggtgtatagtaataactcatagatggtgcgtatatagtgaaaatttggtctaaatcactagtttttaaaattttcgtgggtgcatgtccattcaccatcacctacatagctacgcccctgtatccatcatacgtgtaaaattattctatgcccgtcacccacaaggataatgggtatccatccatcaggtacctat

SEQ ID NO: 6696 - DNA, 1187 bp, Zea mays
  Zm_smallRNAprecursor_2185
accggccgccgccgccactgccatcgacgcgacggcgaggaggacgtggccgagaagacacaaggctattctcgtggccattggtgaaggaaagaaggaaggaagaatgccacgctttggttgtgttgtcgccgttaaatagattctgctttggcaagaattgtatggttctggttgcttgtagttgtagttgtggcagatcgaggaagttaaggttgagacttgaggatgggctttgtggcagatccacgtgggtcactgcttggttatgatgcttatggtcttttgatgggctgtttggatcgggttggtagtggccgttgacacacatagccgttggtttttcaaactatgcttttgtgctaagcaaggaacggccgtacctgagaatctgatatgcacgcccactggcacgcgcggggctgaattttgaaatggcaagaaaaaacgtccacattgatcaaaccgttgctgtgactactaggttgcgtttgttggcaagcagtccttctgtgcaagcgtgcaagcaaaccatctgatccattagatcgtgattcaaccgtaggtcacatttaacacttaaacccttccaccaccagctcaataatctttataaaaaactccctaacaaatcatagttgtatctgtggttggatcgtaatctaatggatcagatggtttgattgcacgcttgcacagaaggactgcttgcataacagtcgttaccgcgtttgtttgtaattataatatgtctagattattagtttaaaagttgttggattatataatcttagcatattataattctaaacaaacactccataagtctccggacgcttcatagtctgcagggatgacaacgactaagatatgcgggcagagacaaggacacactcatggtcaccagagaaaaaaagatatcattattcacatccactatccatccagcgatgaagctaaagcgaaccaaagcagggtgcaaatgacttgatggtgtatagtaataactcatagatggtgcgtatatagtgaaaatttggtctaaatcactagtttttaaaattttcgtgggtgcatgtccattcaccatcacctacatagctacgcccctgtatccatcatacgtgtaaaattattctatgcccgtcacccacaaggataatgggtatccatccatcaggtaccta

SEQ ID NO: 6697 - DNA, 1167 bp, Zea mays
  Zm_smallRNAprecursor_2186
atcgacgcgacggcgaggaggacgtggccgagaagacacaaggctattctcgtggccattggtgaaggaaagaaggaaggaagaatgccacgctttggttgtgttgtcgccgttaaatagattctgctttggcaagaattgtatggttctggttgcttgtagttgtagttgtggcagatcgaggaagttaaggttgagacttgaggatgggctttgtggcagatccacgtgggtcactgcttggttatgatgcttatggtcttttgatgggctgtttggatcgggttggtagtggccgttgacacacatagccgttggtttttcaaactatgcttttgtgctaagcaaggaacggccgtacctgagaatctgatatgcacgcccactggcacgcgcggggctgaattttgaaatggcaagaaaaaacgtccacattgatcaaaccgttgctgtgactactaggttgcgtttgttggcaagcagtccttctgtgcaagcgtgcaagcaaaccatctgatccattagatcgtgattcaaccgtaggtcacatttaacacttaaacccttccaccaccagctcaataatctttataaaaaactccctaacaaatcatagttgtatctgtggttggatcgtaatctaatggatcagatggtttgattgcacgcttgcacagaaggactgcttgcataacagtcgttaccgcgtttgtttgtaattataatatgtctagattattagtttaaaagttgttggattatataatcttagcatattataattctaaacaaacactccataagtctccggacgcttcatagtctgcagggatgacaacgactaagatatgcgggcagagacaaggacacactcatggtcaccagagaaaaaaagatatcattattcacatccactatccatccagcgatgaagctaaagcgaaccaaagcagggtgcaaatgacttgatggtgtatagtaataactcatagatggtgcgtatatagtgaaaatttggtctaaatcactagtttttaaaattttcgtgggtgcatgtccattcaccatcacctacatagctacgcccctgtatccatcatacgtgtaaaattattctatgcccgtcacccacaaggataatgggtatccatccatcaggtacctatg

SEQ ID NO: 6698 - DNA, 1097 bp, Zea mays
  Zm_smallRNAprecursor_2187
gcgccacttttttttattcggtcgcatcctgcataaccggtcatttcatctgcgtccggtcacttcccctgcggcgcgcgcagaatttttttttttttttgctgtgcatgcagaagcttttccacttttccctgtccggtccttcacgcgcgcgcagatttttttttgtcactgtctggtctcagcttgcatgcaaaatgtcagggcgccatgcagtatccgctgtgctctagcgtccatgcgcgcacagtttttttttttgagttcggtcaacagcaggggtgcgcatgcaggaatttttttatttgttctgtccggtcacctctcctctgctgggcgcgcgcagatttttcttggacatttctgctctgcccgcgcactagccatgcatgcgtgtcaggggcgcccatttttctgtccagtcgcttccagccgctgcgcgcaaatttgaatattctttttgcatcttccctctgctgtttctggttctctgaccacactggtcagaaccagctgaactggcccatgggggcggttgaactggtcctgaggaccagctcaactgcctatatatacttgactctccccttctcttctcccacttcattcactctcgcctttgtcgcttcacaacctttagagcctctccttcacacacttcaaccggttcacagtttcaccaccttttcaatcatggtgcgtcgtcgcaacccctctgtggttgagtttagcagcgactccgacgagattcaggaggaatctcccgtcccctatcctccgcctcgtcgctccctctctaagagaggacgtggctctggtcggaaggatggcgagggctcttctatgccttcgcagccgactcgcgggagacgccaaaaggttggcgcctctcgtcctcgtcgtagcacgtcttcctctgggtatgctccctgccaggaggaggatggggcgttcgacgacttcgtggaccttccggcgcctgatgctctctacgtcaccggactgcacatgcatccggcgaacgtcagccgcggtccgcatgaatctcccgtcgacttcactcagaagggaatagacacccttcagcgtctgaggtt

SEQ ID NO: 6699 - DNA, 1149 bp, Zea mays
  Zm_smallRNAprecursor_2188
ccatgcgcgcacagtttttttttttgagttcggtcaacagcaggggtgcgcatgcaggaatttttttatttgttctgtccggtcacctctcctctgctgggcgcgcgcagatttttcttggacatttctgctctgcccgcgcactagccatgcatgcgtgtcaggggcgcccatttttctgtccagtcgcttccagccgctgcgcgcaaatttgaatattctttttgcatcttccctctgctgtttctggttctctgaccacactggtcagaaccagctgaactggcccatgggggcggttgaactggtcctgaggaccagctcaactgcctatatatacttgactctccccttctcttctcccacttcattcactctcgcctttgtcgcttcacaacctttagagcctctccttcacacacttcaaccggttcacagtttcaccaccttttcaatcatggtgcgtcgtcgcaacccctctgtggttgagtttagcagcgactccgacgagattcaggaggaatctcccgtcccctatcctccgcctcgtcgctccctctctaagagaggacgtggctctggtcggaaggatggcgagggctcttctatgccttcgcagccgactcgcgggagacgccaaaaggttggcgcctctcgtcctcgtcgtagcacgtcttcctctgggtatgctccctgccaggaggaggatggggcgttcgacgacttcgtggaccttccggcgcctgatgctctctacgtcaccggactgcacatgcatccggcgaacgtcagccgcggtccgcatgaatctcccgtcgacttcactcagaagggaatagacacccttcagcgtctgaggtttaccaaccctactctcactcctcgtcatcctggtgtccaggaccctcggttctggaatcttttccaggctgacttctacaattctgtcattctttccaagaaacacccagtcgtccgacatagatttattgactgggagggttgtgagaatatgggagatgctgacatgtcgtcagctctcgtaaacttagagagaaaggggttacgaaacattatgaccatggaatacccctggaacgatgaggtggtagctcagttctatgccaccctctggataaagaaagtaga

SEQ ID NO: 6700 - DNA, 1067 bp, Zea mays
  Zm_smallRNAprecursor_2189
gtttctggttctctgaccacactggtcagaaccagctgaactggcccatgggggcggttgaactggtcctgaggaccagctcaactgcctatatatacttgactctccccttctcttctcccacttcattcactctcgcctttgtcgcttcacaacctttagagcctctccttcacacacttcaaccggttcacagtttcaccaccttttcaatcatggtgcgtcgtcgcaacccctctgtggttgagtttagcagcgactccgacgagattcaggaggaatctcccgtcccctatcctccgcctcgtcgctccctctctaagagaggacgtggctctggtcggaaggatggcgagggctcttctatgccttcgcagccgactcgcgggagacgccaaaaggttggcgcctctcgtcctcgtcgtagcacgtcttcctctgggtatgctccctgccaggaggaggatggggcgttcgacgacttcgtggaccttccggcgcctgatgctctctacgtcaccggactgcacatgcatccggcgaacgtcagccgcggtccgcatgaatctcccgtcgacttcactcagaagggaatagacacccttcagcgtctgaggtttaccaaccctactctcactcctcgtcatcctggtgtccaggaccctcggttctggaatcttttccaggctgacttctacaattctgtcattctttccaagaaacacccagtcgtccgacatagatttattgactgggagggttgtgagaatatgggagatgctgacatgtcgtcagctctcgtaaacttagagagaaaggggttacgaaacattatgaccatggaatacccctggaacgatgaggtggtagctcagttctatgccaccctctggataaagaaagtagatgaggaagccgatgggtatgattacccagtcatgtatttcttcatccagggtaactggcacaaagtcagttatcgtcgttttgcccatattctgggcttctctgatgcagacattcagggcagcaacatgcgagtgcatggcattcggctgcccatgcgg

SEQ ID NO: 6701 - DNA, 1066 bp, Zea mays
  Zm_smallRNAprecursor_2190
aatgaaaagttactgaaatacaaattattaatggatagaattctaaatacaacattatcctttagatatttcaaatgttggctcttatcacttttattggataatttcggtttttatcaatccttttttaccggaaatttttatcaatcttatgctcatctaagacttcgttttgtttgatatgtatcatgtgtatgtaatatattgtggtattacaaataccaaatggccagactttgtaaggtatttattatacataccaattttttttactccttagtaattttaagtagccatctttttacatcatcgcccgccactgcatgcactcctatatactgggctgggcccaacacgttggatcccatgggcagaaaaaaaagatggcgttgtctgctgaagtcggaacacgttgggtgcagcggcggagaacatgtgacctccaaaggtttacaaaggtaaaaaaaaagatggtggtctgctttaatgtggatctgggcccgagttgggctctcagtgcagccggcctgttatcctcccaccgttggaagcgggcagtgatcgctgctctgttaaaccagcctcacgccgtgcctaccgcttcaggcctagagaggtccaaggcttgccctgagccccgccagacactcccaacttgggatggacagtccagcctagtggcacatatgggcccaggcccagaagccgtcagaaagcatccgcaccacctttaatgcccccactagggttacaagctctcgtaactgagctcggcgagtgagggagatcgggatgaatatttaagttggtgtgctgcagtgtcgactgccgaggtggtgctaaatatgacttgagcgaagggtggcttggaggagtgggctttcgttgcttctctcgacgaaaaatacttgtcgtcgggccaacggccctgcgcactttgcagcacaatttccatcacaggccggatgaaaacagagctgtaaagtgtaaagataccccttcgcaacgtttttattcaccagaacagcactgaactgaaaggcaacattttctcttttttttcatc

SEQ ID NO: 6702 - DNA, 1090 bp, Zea mays
  Zm_smallRNAprecursor_2191
caaattattaatggatagaattctaaatacaacattatcctttagatatttcaaatgttggctcttatcacttttattggataatttcggtttttatcaatccttttttaccggaaatttttatcaatcttatgctcatctaagacttcgttttgtttgatatgtatcatgtgtatgtaatatattgtggtattacaaataccaaatggccagactttgtaaggtatttattatacataccaattttttttactccttagtaattttaagtagccatctttttacatcatcgcccgccactgcatgcactcctatatactgggctgggcccaacacgttggatcccatgggcagaaaaaaaagatggcgttgtctgctgaagtcggaacacgttgggtgcagcggcggagaacatgtgacctccaaaggtttacaaaggtaaaaaaaaagatggtggtctgctttaatgtggatctgggcccgagttgggctctcagtgcagccggcctgttatcctcccaccgttggaagcgggcagtgatcgctgctctgttaaaccagcctcacgccgtgcctaccgcttcaggcctagagaggtccaaggcttgccctgagccccgccagacactcccaacttgggatggacagtccagcctagtggcacatatgggcccaggcccagaagccgtcagaaagcatccgcaccacctttaatgcccccactagggttacaagctctcgtaactgagctcggcgagtgagggagatcgggatgaatatttaagttggtgtgctgcagtgtcgactgccgaggtggtgctaaatatgacttgagcgaagggtggcttggaggagtgggctttcgttgcttctctcgacgaaaaatacttgtcgtcgggccaacggccctgcgcactttgcagcacaatttccatcacaggccggatgaaaacagagctgtaaagtgtaaagataccccttcgcaacgtttttattcaccagaacagcactgaactgaaaggcaacattttctcttttttttcatctgaacaactaacaggcaacactgtacttggaattcagaggcact

SEQ ID NO: 6703 - DNA, 1135 bp, Zea mays
  Zm_smallRNAprecursor_2192
caaattattaatggatagaattctaaatacaacattatcctttagatatttcaaatgttggctcttatcacttttattggataatttcggtttttatcaatccttttttaccggaaatttttatcaatcttatgctcatctaagacttcgttttgtttgatatgtatcatgtgtatgtaatatattgtggtattacaaataccaaatggccagactttgtaaggtatttattatacataccaattttttttactccttagtaattttaagtagccatctttttacatcatcgcccgccactgcatgcactcctatatactgggctgggcccaacacgttggatcccatgggcagaaaaaaaagatggcgttgtctgctgaagtcggaacacgttgggtgcagcggcggagaacatgtgacctccaaaggtttacaaaggtaaaaaaaaagatggtggtctgctttaatgtggatctgggcccgagttgggctctcagtgcagccggcctgttatcctcccaccgttggaagcgggcagtgatcgctgctctgttaaaccagcctcacgccgtgcctaccgcttcaggcctagagaggtccaaggcttgccctgagccccgccagacactcccaacttgggatggacagtccagcctagtggcacatatgggcccaggcccagaagccgtcagaaagcatccgcaccacctttaatgcccccactagggttacaagctctcgtaactgagctcggcgagtgagggagatcgggatgaatatttaagttggtgtgctgcagtgtcgactgccgaggtggtgctaaatatgacttgagcgaagggtggcttggaggagtgggctttcgttgcttctctcgacgaaaaatacttgtcgtcgggccaacggccctgcgcactttgcagcacaatttccatcacaggccggatgaaaacagagctgtaaagtgtaaagataccccttcgcaacgtttttattcaccagaacagcactgaactgaaaggcaacattttctcttttttttcatctgaacaactaacaggcaacactgtacttggaattcagaggcactacctctgcatggaaaaaggctttgtgagggttttgtataagcttg

SEQ ID NO: 6704 - DNA, 1135 bp, Zea mays; identical to SEQ ID NO: 6703
  Zm_smallRNAprecursor_2193

SEQ ID NO: 6705 - DNA, 1137 bp, Zea mays
  Zm_smallRNAprecursor_2194
atggatagaattctaaatacaacattatcctttagatatttcaaatgttggctcttatcacttttattggataatttcggtttttatcaatccttttttaccggaaatttttatcaatcttatgctcatctaagacttcgttttgtttgatatgtatcatgtgtatgtaatatattgtggtattacaaataccaaatggccagactttgtaaggtatttattatacataccaattttttttactccttagtaattttaagtagccatctttttacatcatcgcccgccactgcatgcactcctatatactgggctgggcccaacacgttggatcccatgggcagaaaaaaaagatggcgttgtctgctgaagtcggaacacgttgggtgcagcggcggagaacatgtgacctccaaaggtttacaaaggtaaaaaaaaagatggtggtctgctttaatgtggatctgggcccgagttgggctctcagtgcagccggcctgttatcctcccaccgttggaagcgggcagtgatcgctgctctgttaaaccagcctcacgccgtgcctaccgcttcaggcctagagaggtccaaggcttgccctgagccccgccagacactcccaacttgggatggacagtccagcctagtggcacatatgggcccaggcccagaagccgtcagaaagcatccgcaccacctttaatgcccccactagggttacaagctctcgtaactgagctcggcgagtgagggagatcgggatgaatatttaagttggtgtgctgcagtgtcgactgccgaggtggtgctaaatatgacttgagcgaagggtggcttggaggagtgggctttcgttgcttctctcgacgaaaaatacttgtcgtcgggccaacggccctgcgcactttgcagcacaatttccatcacaggccggatgaaaacagagctgtaaagtgtaaagataccccttcgcaacgtttttattcaccagaacagcactgaactgaaaggcaacattttctcttttttttcatctgaacaactaacaggcaacactgtacttggaattcagaggcactacctctgcatggaaaaaggctttgtgagggttttgtataagcttgctccatggcagc

SEQ ID NO: 6706 - DNA, 1058 bp, Zea mays
  Zm_smallRNAprecursor_2195
gtttttatcaatccttttttaccggaaatttttatcaatcttatgctcatctaagacttcgttttgtttgatatgtatcatgtgtatgtaatatattgtggtattacaaataccaaatggccagactttgtaaggtatttattatacataccaattttttttactccttagtaattttaagtagccatctttttacatcatcgcccgccactgcatgcactcctatatactgggctgggcccaacacgttggatcccatgggcagaaaaaaaagatggcgttgtctgctgaagtcggaacacgttgggtgcagcggcggagaacatgtgacctccaaaggtttacaaaggtaaaaaaaaagatggtggtctgctttaatgtggatctgggcccgagttgggctctcagtgcagccggcctgttatcctcccaccgttggaagcgggcagtgatcgctgctctgttaaaccagcctcacgccgtgcctaccgcttcaggcctagagaggtccaaggcttgccctgagccccgccagacactcccaacttgggatggacagtccagcctagtggcacatatgggcccaggcccagaagccgtcagaaagcatccgcaccacctttaatgcccccactagggttacaagctctcgtaactgagctcggcgagtgagggagatcgggatgaatatttaagttggtgtgctgcagtgtcgactgccgaggtggtgctaaatatgacttgagcgaagggtggcttggaggagtgggctttcgttgcttctctcgacgaaaaatacttgtcgtcgggccaacggccctgcgcactttgcagcacaatttccatcacaggccggatgaaaacagagctgtaaagtgtaaagataccccttcgcaacgtttttattcaccagaacagcactgaactgaaaggcaacattttctcttttttttcatctgaacaactaacaggcaacactgtacttggaattcagaggcactacctctgcatggaaaaaggctttgtgagggttttgtataagcttgctccatggcagc

SEQ ID NO: 6707 - DNA, 1040 bp, Zea mays
  Zm_smallRNAprecursor_2196
cggcatttttctccatgtgccgcaacatttctgttgatgtccattaggtggcaaggcatcagcgggagactgacgacaatcttcgtcgtcaagcttccactatgggtgtgccctttgcccctcgctcgcctgacgtgcctctccatcctcctcccccggagatcaatgagtggcacctgcaggcctacggggtgccatttatgtcagcagacgacgacgacgaagaagaagaagcctatgttgatgatcgcgagcagtttgccccgcctccctaccatggggatccgggtcaatcatcctctcaccccccgcctccctacccgggtctgggacccattcctggtgaccctaggccatccggctttggttatcatcaccaccctccacctcctcctgatcatcatacatcttcgacatctgtcttttttgcggctgatgagccacctcgggactccacatttgaggaggacgtgatgaggaccctcttccctgactacacttcataccctccatcatatcctccatcatatcctcctcctggaggatattgattcatgtatccttgtctctctcttcgtttttggtacttgttgccaaaaagggggagaaaatctaacttctagtttgtggttctttcgattttcttttggattatttttgttttggccactgttatggcttgtatcttttgatcattatatgaaataaaactgatgggttattattcaaagtgatatgatggtcttctggccatcatcttttgtcctatcagtttgtaatgattactttgctatgaagtaaaaatgatgtgtatttagagatagtcatgtgcatcacaactcctgttatgacactcttgcacccctcggatggttgtattcagtatggtttttgtcactatctctaaatgtgttgctcacatgacatattatgtcaaaacattggattcacaatcgtgcacacatttagggggagccatctacatacaatcattcaaaagaaattttctattgcaaatgtatatcttttttaccttaatt

SEQ ID NO: 6708 - DNA, 1067 bp, Zea mays
  Zm_smallRNAprecursor_2197
agattttaaggatctcttggagatgctcttatgacatgctcttaattatgtcatgctagtggagcccaccctcgagacctgccattaaagcagggcacctgcgcttgttcttcagagacgcgggtcaccatgcgaggacgctaatgctattgctaagccacatcgtctccagcactcgcaggaagagagagaaaggatggatcagacgagaatccatcctggtcctgtagtggagtctgaagctccaagaaagagcacacgcagacgcagatgctgccaatgcgtttcagagggtctctgatcagaaaacggcccgtgtgttttcagcgacgcaaaagcaggaggtacctacctgattctggatggacggctaatctcctcgcctgctcaaaaaaaaaaaacagacaagctgaaggagccgtcgaggtacgtcgtaaacttggccgtcgtcgaggtcccgtgtgcacagctgagctgggccagcgagagcccgccctatgcttcaggcgagatgacacccacttcagacggacagacacggcgcggatggaccggtccgtctggcgtcggtgtcatctctcctgagcgtaggacgcacacccacaaataaccacggctgcagggttcggttctgcttgccgcacgcatgctgtcttgtcttgtatatatagaggcagaggcgtaagcaggggcgttcatgccgggtaggggtagctggtgacgtccagccctgacgtgacgactgacgacgaggcacactgtgcggtgaccggcgatccagcggtccggctggagctcgtgctttcacacgagaaaactttgacgccttccttcagcttccacttccacaccggacggagattataggcacggggtcaacgcctctgtctgtcactggctcactgagcgcgagccgttcagtgcgagaacgcaatggtgcgctccgggctccgctgtctgtctgtctctgtctgtcacccaatatttttgtgcccaagaccgactgacacccgcaacagttgcccgagcaagaccaggcggtgagtgcagagatattcctcatgttc

SEQ ID NO: 6709 - DNA, 1051 bp, Zea mays
  Zm_smallRNAprecursor_2198
aaggatctcttggagatgctcttatgacatgctcttaattatgtcatgctagtggagcccaccctcgagacctgccattaaagcagggcacctgcgcttgttcttcagagacgcgggtcaccatgcgaggacgctaatgctattgctaagccacatcgtctccagcactcgcaggaagagagagaaaggatggatcagacgagaatccatcctggtcctgtagtggagtctgaagctccaagaaagagcacacgcagacgcagatgctgccaatgcgtttcagagggtctctgatcagaaaacggcccgtgtgttttcagcgacgcaaaagcaggaggtacctacctgattctggatggacggctaatctcctcgcctgctcaaaaaaaaaaaacagacaagctgaaggagccgtcgaggtacgtcgtaaacttggccgtcgtcgaggtcccgtgtgcacagctgagctgggccagcgagagcccgccctatgcttcaggcgagatgacacccacttcagacggacagacacggcgcggatggaccggtccgtctggcgtcggtgtcatctctcctgagcgtaggacgcacacccacaaataaccacggctgcagggttcggttctgcttgccgcacgcatgctgtcttgtcttgtatatatagaggcagaggcgtaagcaggggcgttcatgccgggtaggggtagctggtgacgtccagccctgacgtgacgactgacgacgaggcacactgtgcggtgaccggcgatccagcggtccggctggagctcgtgctttcacacgagaaaactttgacgccttccttcagcttccacttccacaccggacggagattataggcacggggtcaacgcctctgtctgtcactggctcactgagcgcgagccgttcagtgcgagaacgcaatggtgcgctccgggctccgctgtctgtctgtctctgtctgtcacccaatatttttgtgcccaagaccgactgacacccgcaacagttgcccgagcaagaccaggcggtgagtgcagagatattc

SEQ ID NO: 6710 - DNA, 1142 bp, Zea mays
  Zm_smallRNAprecursor_2199
caaaaggcatgcccatggagaaagcttgccgatgaagattgtcgtcagtctcccgctgacgccgtgccacctcatggacatcagcagaaatgttgcggcacatggagaaaaatgccgcaaacccatggaccaagcgagcacccatcccgcggccacgacctcgaccacgaccacgagcacgtggcatgggagatccgcggctaggagagggacgcgaggcagcagcggggggagaggaggatggatgatggggaggctggcgaggtggctcagtggaggaggcagggcctccagaccgtgagggagcccgcttcgtacgagcagctgggttggaggaatcaacccagtagggtacgtagcgggagtgtttgacgggtttttcgaagtgggtctgggtgaccacttcgatcatcttcatgataaaggatgcatgaagacaccctctgagaggagaccaggaagcacggacgatctcttcccagatcatgtcaaacacattgatgcgggcgagactgtttggagcaaggaggaggaggaagactcgactctccccaaggacgttcatttgatttccgcccttcgggagaacggtcatccgggacaaagaattaaggtacctgtattacctatgcatgttagcggttgtccagaactcccgctcagtagagacatgaatgaattccgtctcttcccgcatgggcagccgaatgtcatgcacacgcatgttgctgccctgaatatttgcatcagagaagcccagtatatgggcaaaacgacgataactgactttatgccagttaccctggatgaagaaatacatgactgggtaatcatacccatcggcttcctcatctactttctttatccagagggtggcatagaactgagctaccacctcatcgttccaggggtattccatggtcataatgtttcgtaacccctttctctctaagtttacgagagctgacgacatgtcagcatctcccatattctcacaaccctcccagtcaataaatctatgtcggacgactgggtgtttcttggaaagaatgacagaattgtagaagtcagcctggaaaagattccagaaccgagggtcctggacaccaggatgacgaggagtgagagtagggttggtaaac

SEQ ID NO: 6711 - DNA, 1058 bp, Zea mays
  Zm_smallRNAprecursor_2200
gcagaaatgttgcggcacatggagaaaaatgccgcaaacccatggaccaagcgagcacccatcccgcggccacgacctcgaccacgaccacgagcacgtggcatgggagatccgcggctaggagagggacgcgaggcagcagcggggggagaggaggatggatgatggggaggctggcgaggtggctcagtggaggaggcagggcctccagaccgtgagggagcccgcttcgtacgagcagctgggttggaggaatcaacccagtagggtacgtagcgggagtgtttgacgggtttttcgaagtgggtctgggtgaccacttcgatcatcttcatgataaaggatgcatgaagacaccctctgagaggagaccaggaagcacggacgatctcttcccagatcatgtcaaacacattgatgcgggcgagactgtttggagcaaggaggaggaggaagactcgactctccccaaggacgttcatttgatttccgcccttcgggagaacggtcatccgggacaaagaattaaggtacctgtattacctatgcatgttagcggttgtccagaactcccgctcagtagagacatgaatgaattccgtctcttcccgcatgggcagccgaatgtcatgcacacgcatgttgctgccctgaatatttgcatcagagaagcccagtatatgggcaaaacgacgataactgactttatgccagttaccctggatgaagaaatacatgactgggtaatcatacccatcggcttcctcatctactttctttatccagagggtggcatagaactgagctaccacctcatcgttccaggggtattccatggtcataatgtttcgtaacccctttctctctaagtttacgagagctgacgacatgtcagcatctcccatattctcacaaccctcccagtcaataaatctatgtcggacgactgggtgtttcttggaaagaatgacagaattgtagaagtcagcctggaaaagattccagaaccgagggtcctggacaccaggatgacgaggagtgagagtagggttggtaaa

SEQ ID NO: 6712 - DNA, 1057 bp, Zea mays
  Zm_smallRNAprecursor_2201
cagaaatgttgcggcacatggagaaaaatgccgcaaacccatggaccaagcgagcacccatcccgcggccacgacctcgaccacgaccacgagcacgtggcatgggagatccgcggctaggagagggacgcgaggcagcagcggggggagaggaggatggatgatggggaggctggcgaggtggctcagtggaggaggcagggcctccagaccgtgagggagcccgcttcgtacgagcagctgggttggaggaatcaacccagtagggtacgtagcgggagtgtttgacgggtttttcgaagtgggtctgggtgaccacttcgatcatcttcatgataaaggatgcatgaagacaccctctgagaggagaccaggaagcacggacgatctcttcccagatcatgtcaaacacattgatgcgggcgagactgtttggagcaaggaggaggaggaagactcgactctccccaaggacgttcatttgatttccgcccttcgggagaacggtcatccgggacaaagaattaaggtacctgtattacctatgcatgttagcggttgtccagaactcccgctcagtagagacatgaatgaattccgtctcttcccgcatgggcagccgaatgtcatgcacacgcatgttgctgccctgaatatttgcatcagagaagcccagtatatgggcaaaacgacgataactgactttatgccagttaccctggatgaagaaatacatgactgggtaatcatacccatcggcttcctcatctactttctttatccagagggtggcatagaactgagctaccacctcatcgttccaggggtattccatggtcataatgtttcgtaacccctttctctctaagtttacgagagctgacgacatgtcagcatctcccatattctcacaaccctcccagtcaataaatctatgtcggacgactgggtgtttcttggaaagaatgacagaattgtagaagtcagcctggaaaagattccagaaccgagggtcctggacaccaggatgacgaggagtgagagtagggttggtaaa

SEQ ID NO: 6713 - DNA, 1058 bp, Zea mays
  Zm_smallRNAprecursor_2202
cagaaatgttgcggcacatggagaaaaatgccgcaaacccatggaccaagcgagcacccatcccgcggccacgacctcgaccacgaccacgagcacgtggcatgggagatccgcggctaggagagggacgcgaggcagcagcggggggagaggaggatggatgatggggaggctggcgaggtggctcagtggaggaggcagggcctccagaccgtgagggagcccgcttcgtacgagcagctgggttggaggaatcaacccagtagggtacgtagcgggagtgtttgacgggtttttcgaagtgggtctgggtgaccacttcgatcatcttcatgataaaggatgcatgaagacaccctctgagaggagaccaggaagcacggacgatctcttcccagatcatgtcaaacacattgatgcgggcgagactgtttggagcaaggaggaggaggaagactcgactctccccaaggacgttcatttgatttccgcccttcgggagaacggtcatccgggacaaagaattaaggtacctgtattacctatgcatgttagcggttgtccagaactcccgctcagtagagacatgaatgaattccgtctcttcccgcatgggcagccgaatgtcatgcacacgcatgttgctgccctgaatatttgcatcagagaagcccagtatatgggcaaaacgacgataactgactttatgccagttaccctggatgaagaaatacatgactgggtaatcatacccatcggcttcctcatctactttctttatccagagggtggcatagaactgagctaccacctcatcgttccaggggtattccatggtcataatgtttcgtaacccctttctctctaagtttacgagagctgacgacatgtcagcatctcccatattctcacaaccctcccagtcaataaatctatgtcggacgactgggtgtttcttggaaagaatgacagaattgtagaagtcagcctggaaaagattccagaaccgagggtcctggacaccaggatgacgaggagtgagagtagggttggtaaac

SEQ ID NO: 6714 - DNA, 1040 bp, Zea mays
  Zm_smallRNAprecursor_2203
cctgctgagcggcagcaaacagacaaaaacaaaaaaaaagtaatctgacccgcccaacagaggaagtgaccagtcaaaaaaaagtgttgtgcgccctgcagaaagcgaccggattaaaaaatttgcacgctaggctgccagcaaaagtggaagcgaccgatcaatagagaaaaagatgttgcgcgcccagcaggatgtgaccggttaaaaaaatcccgtgcatctgacgctgctgcagctgacagacatgcgaggacaggcctgcgcggacagaccgggcagagaccggttcaaccggtccaccatgccggttcaaccggttttaaccaggatggtccttgtaaaaactggttaaaaacagttgagctgaagttcagatggcctcctccagctgaactagaaagttcagctggtcaagccagttgagccccaaaaaatcttagcacagaaattcattcgaattttaacattttcaccaagtttttgaaagatcatcacaaagctttaaaactatcaatcaaaaatagtgaatcaaacaatttttgtgaccgttttcaagttaagttacgagaatccaagatatttaattcactcctaagaaagcaaaacctagtctcatcgaggggttttgtgaagatgtcggctagttgattttcggtgctcacatgaaacaattcgatatctcctttggcttcgtggtctctcaagaaatggtgtctgatgtcaatatgtttagttctagagtgttgcacagggttgtttgcaagttttatggcactctcattgtcacacaaaagtggaattttgttaaactcacaaccaaaatctctaagggtttgcttcatccataacaactgtgcacaacatgccccagctgctatgtactcagcttctgcagtggaaagtgcaacacaattttgtttcttggaactccatgatactaaggatcgcccaaggaattggcaagtcccagtagtgctttttcgatctactttgcaaccggcataatctgagtcagaatagccaagtaaatcgaaaag

SEQ ID NO: 6715 - DNA, 1142 bp, Zea mays
  Zm_smallRNAprecursor_2204
caaaaggcatgcccatggaggaagcttgacgacgaagattgtcgtcagtctcccgctgacgccgtgccacctcatggacatcagcagaaatgttgcggcacatggagaaaaatgccgcaaccccatggaccaagcgagcacccatcccgcggccacgacctcgaccacgaccacgagcacgtggcatgggagatccacggccaggagagggacgcgaggcagcagcggggggagaggaggatggatgatggggaggctggcgaggtggctcagaggaggaggcagggcctccagaccgtgagggagcccgcttcgtacgagcagctgggttggaggaatcaacccagtagggtacgtagcgggagtgtttgacgggtttttcgaagtgggtctgggtgaccacttcgatcattttcatgataaagggtgcatgaagacaccctctgtgaggagaccaggaagcacggacgatctcttcccagatcatgtcaaacacattgatgcgggcgagactgtttggagcaaggaggaggaggaagacgcgactctccccaaggacgttcatttgatttccgcccttcgggagaacggtcatccgggacaaagaattaaggtacctgtagtacctatgcatgttagcggttgtccagaactcccgctcagtagagatatgaatgaattccgtatcttcccgcatgggcagccgaatgccatgcactcgcatgttgctgccctgaatgtctgcatcagagaagcccagaatatgggcaaaacgacgataactgactttgtgccagttaccctggatgaagaaatacatgactgggtaatcatacccatcggcttcctcatctactttctttatccagagggtggcatagaactgagctaccacctcatcgttccaggggtattccatggtcataatgttacgtaacccctttctctctaagtttacgagagctgacgacatgtcagcatctcccatattctcacaaccctcccagtcaataaatctatgtcagacgactgggtgtttcttggaaagaatgacagaattgtagaagtcagcctggaaaagattccagaaccgagggtcctggacaccaggatgacgaggagtgagagtagggttggtaaac

SEQ ID NO: 6716 - DNA, 1058 bp, Zea mays
  Zm_smallRNAprecursor_2205
gcagaaatgttgcggcacatggagaaaaatgccgcaaccccatggaccaagcgagcacccatcccgcggccacgacctcgaccacgaccacgagcacgtggcatgggagatccacggccaggagagggacgcgaggcagcagcggggggagaggaggatggatgatggggaggctggcgaggtggctcagaggaggaggcagggcctccagaccgtgagggagcccgcttcgtacgagcagctgggttggaggaatcaacccagtagggtacgtagcgggagtgtttgacgggtttttcgaagtgggtctgggtgaccacttcgatcattttcatgataaagggtgcatgaagacaccctctgtgaggagaccaggaagcacggacgatctcttcccagatcatgtcaaacacattgatgcgggcgagactgtttggagcaaggaggaggaggaagacgcgactctccccaaggacgttcatttgatttccgcccttcgggagaacggtcatccgggacaaagaattaaggtacctgtagtacctatgcatgttagcggttgtccagaactcccgctcagtagagatatgaatgaattccgtatcttcccgcatgggcagccgaatgccatgcactcgcatgttgctgccctgaatgtctgcatcagagaagcccagaatatgggcaaaacgacgataactgactttgtgccagttaccctggatgaagaaatacatgactgggtaatcatacccatcggcttcctcatctactttctttatccagagggtggcatagaactgagctaccacctcatcgttccaggggtattccatggtcataatgttacgtaacccctttctctctaagtttacgagagctgacgacatgtcagcatctcccatattctcacaaccctcccagtcaataaatctatgtcagacgactgggtgtttcttggaaagaatgacagaattgtagaagtcagcctggaaaagattccagaaccgagggtcctggacaccaggatgacgaggagtgagagtagggttggtaaa

SEQ ID NO: 6717 - DNA, 1057 bp, Zea mays
  Zm_smallRNAprecursor_2206
cagaaatgttgcggcacatggagaaaaatgccgcaaccccatggaccaagcgagcacccatcccgcggccacgacctcgaccacgaccacgagcacgtggcatgggagatccacggccaggagagggacgcgaggcagcagcggggggagaggaggatggatgatggggaggctggcgaggtggctcagaggaggaggcagggcctccagaccgtgagggagcccgcttcgtacgagcagctgggttggaggaatcaacccagtagggtacgtagcgggagtgtttgacgggtttttcgaagtgggtctgggtgaccacttcgatcattttcatgataaagggtgcatgaagacaccctctgtgaggagaccaggaagcacggacgatctcttcccagatcatgtcaaacacattgatgcgggcgagactgtttggagcaaggaggaggaggaagacgcgactctccccaaggacgttcatttgatttccgcccttcgggagaacggtcatccgggacaaagaattaaggtacctgtagtacctatgcatgttagcggttgtccagaactcccgctcagtagagatatgaatgaattccgtatcttcccgcatgggcagccgaatgccatgcactcgcatgttgctgccctgaatgtctgcatcagagaagcccagaatatgggcaaaacgacgataactgactttgtgccagttaccctggatgaagaaatacatgactgggtaatcatacccatcggcttcctcatctactttctttatccagagggtggcatagaactgagctaccacctcatcgttccaggggtattccatggtcataatgttacgtaacccctttctctctaagtttacgagagctgacgacatgtcagcatctcccatattctcacaaccctcccagtcaataaatctatgtcagacgactgggtgtttcttggaaagaatgacagaattgtagaagtcagcctggaaaagattccagaaccgagggtcctggacaccaggatgacgaggagtgagagtagggttggtaaa

SEQ ID NO: 6718 - DNA, 1058 bp, Zea mays
  Zm_smallRNAprecursor_2207
cagaaatgttgcggcacatggagaaaaatgccgcaaccccatggaccaagcgagcacccatcccgcggccacgacctcgaccacgaccacgagcacgtggcatgggagatccacggccaggagagggacgcgaggcagcagcggggggagaggaggatggatgatggggaggctggcgaggtggctcagaggaggaggcagggcctccagaccgtgagggagcccgcttcgtacgagcagctgggttggaggaatcaacccagtagggtacgtagcgggagtgtttgacgggtttttcgaagtgggtctgggtgaccacttcgatcattttcatgataaagggtgcatgaagacaccctctgtgaggagaccaggaagcacggacgatctcttcccagatcatgtcaaacacattgatgcgggcgagactgtttggagcaaggaggaggaggaagacgcgactctccccaaggacgttcatttgatttccgcccttcgggagaacggtcatccgggacaaagaattaaggtacctgtagtacctatgcatgttagcggttgtccagaactcccgctcagtagagatatgaatgaattccgtatcttcccgcatgggcagccgaatgccatgcactcgcatgttgctgccctgaatgtctgcatcagagaagcccagaatatgggcaaaacgacgataactgactttgtgccagttaccctggatgaagaaatacatgactgggtaatcatacccatcggcttcctcatctactttctttatccagagggtggcatagaactgagctaccacctcatcgttccaggggtattccatggtcataatgttacgtaacccctttctctctaagtttacgagagctgacgacatgtcagcatctcccatattctcacaaccctcccagtcaataaatctatgtcagacgactgggtgtttcttggaaagaatgacagaattgtagaagtcagcctggaaaagattccagaaccgagggtcctggacaccaggatgacgaggagtgagagtagggttggtaaac

SEQ ID NO: 6719 - DNA, 1040 bp, Zea mays
  Zm_smallRNAprecursor_2208
tgcacaggggaaaagtagcgcgcctgacacgcaaacaaacaaaaaaaaatggcgcgccccagcagagtgaatgaccggtcagaaaaaaaatttactggcgcgctggcaaggcagtggcgaagcgaccggacacaaaaagaattgctgcgcgacagagaaaaaggtgcagcgcgacaaaaaaggcaggtgacagacctgcgaccggtcaaaaaggtgctgcgcgactgaaaaaattgcaggtgacagacctgcgcggacaggccagtcagagaccggttcaaccggtccactatgccggttcaaccggttttaaccaggatggtcctggtaaaaactggttaaaaacagctgagctgaagttcagctgctaagttcagctggcctcctccagctgaactagaaagttcagctggtcaagccagttgagccaaaaaaaatcttagcactaaaatgcattcaacttttaacattttcaccaagtttttgaaagatcatcacatagctttaaaactatcaatcaaaaatagtaaatcaaacaatttttgtgaccgttttcaagctaagttacgagaatccaagatatttaattcactcctaagaaagcaaaacctagtctcatcgaggggttttgtgaagatatcggctagttgattttcggtgctcacatgaaacaattcgatatctcctttggcttcgtggtctctcaagaaatgatgtctgatgtcaatatgtttagttctagagtgttgcacagggttgtttgcaagttttatggcactctcattgtcacacaaaagtggaattttgttaaactcacaaccaaaatctcgaagggtttgcttcatccataacaactgtgcacaacatgccccagctgctatgtactcagcttctgcagtggaaagtgcaacacaattttgtttcttggaactccatgatactaaggatcgcccaaggaattggcaagtcctagtagtactttttcgatctactttgcaaccggcataatctgagtcagaatagccaagtaaatcgaaaag

SEQ ID NO: 6720 - DNA, 1159 bp, Zea mays
  Zm_smallRNAprecursor_2209
taacacaatggaaacggagaaaggggaaagggacattttgtatctgcatgcatattatattctgaaatgatatgtacgcgataaattgtcatgtcaaacaataatgcatgcaatttgctaatttttggctggtaggcgttgaagcgggagaatcggcaatttgacaagatcgatcgaagatgatgcatgttttttcatgcatagtgtcttcaactcttcattggacacagtatgaactagaacatatatgcctagctctacgtacaggtacagcatgaatgacagtaaatgatcggtagtgccgtagtgctcgccagtgatcacgaactagcataccttggaccttgcgatatcgatgtcgaacggcggcgacgggtaggccgggtacgcaccggccggcaggggtaggggtcactgaacccaccaccgtaccaatagctagcttgtgacgatgatcgcgcgacgggccatgctgtggcagcgaagtgagaaagaaccgtgatggagaaggagaccacgtgcgtgcacagccagcatgcatgagctcgctagcttattgcttctccgatcgatccagtccgagctacgtacatccatccatggagatagctagatgcagtagtggtggagaggagagatcgagaatggcgtatgtgcatgcacgtgccctgcttctccagcgtggtccttctcactcatatatatacacatatatctcgacctctcgtcacctcatctcatactcgctcgtcgtcgggaactcggaacggtgtggcagtagtggagggaggagcaaggaagaagaagcaaggttggaggttggagcccggcctctccttttatgcaccggggaaagggagagagagagagtgcagccgtgtagcggtgtaggtgtgagggtccgtgggagtagctgatcagaggtatgggcatgcatggcgtggggtgggctgggccgtggaggcgatggatggggtggatttgtactgctatagttataatttataaaaataaaatactgtaaaaataatagaaatcgtgtatcagacgaagcatggcatagccatggtctgtgaattaattatgccatggccatgacctgtgaatgaatttacaacttctttccgttttggatgtggctcgtaccttgtgcagcctg

SEQ ID NO: 6721 - DNA, 1159 bp, Zea mays; identical to SEQ ID NO: 6720
  Zm_smallRNAprecursor_2210

SEQ ID NO: 6722 - DNA, 1157 bp, Zea mays
  Zm_smallRNAprecursor_2211
acacaatggaaacggagaaaggggaaagggacattttgtatctgcatgcatattatattctgaaatgatatgtacgcgataaattgtcatgtcaaacaataatgcatgcaatttgctaatttttggctggtaggcgttgaagcgggagaatcggcaatttgacaagatcgatcgaagatgatgcatgttttttcatgcatagtgtcttcaactcttcattggacacagtatgaactagaacatatatgcctagctctacgtacaggtacagcatgaatgacagtaaatgatcggtagtgccgtagtgctcgccagtgatcacgaactagcataccttggaccttgcgatatcgatgtcgaacggcggcgacgggtaggccgggtacgcaccggccggcaggggtaggggtcactgaacccaccaccgtaccaatagctagcttgtgacgatgatcgcgcgacgggccatgctgtggcagcgaagtgagaaagaaccgtgatggagaaggagaccacgtgcgtgcacagccagcatgcatgagctcgctagcttattgcttctccgatcgatccagtccgagctacgtacatccatccatggagatagctagatgcagtagtggtggagaggagagatcgagaatggcgtatgtgcatgcacgtgccctgcttctccagcgtggtccttctcactcatatatatacacatatatctcgacctctcgtcacctcatctcatactcgctcgtcgtcgggaactcggaacggtgtggcagtagtggagggaggagcaaggaagaagaagcaaggttggaggttggagcccggcctctccttttatgcaccggggaaagggagagagagagagtgcagccgtgtagcggtgtaggtgtgagggtccgtgggagtagctgatcagaggtatgggcatgcatggcgtggggtgggctgggccgtggaggcgatggatggggtggatttgtactgctatagttataatttataaaaataaaatactgtaaaaataatagaaatcgtgtatcagacgaagcatggcatagccatggtctgtgaattaattatgccatggccatgacctgtgaatgaatttacaacttctttccgttttggatgtggctcgtaccttgtgcagcctg

SEQ ID NO: 6723 - DNA, 1157 bp, Zea mays; identical to SEQ ID NO: 6722
  Zm_smallRNAprecursor_2212

SEQ ID NO: 6724 - DNA, 1123 bp, Zea mays
  Zm_smallRNAprecursor_2213
gatgcctggcagttccctactctcgcatggggagaccccacactaccatcggcgctacggcgtttcacttctgagttcggcatggggtcaggtgggaccaccgcgctacggccgccaggcaaattctgttttatcagaccgcttctgcgttctgatttaatctgtatcaggctgaaaatcttctctcatccgccaaaacagcttcggcgttgtaaggttaagcctcacggttcattagtaccggttagctcaacgcatcgctgcgcttacacacccggcctatcaacgtagtcgtcttcaacgttccttcaggacccttaaagggtcagggagaactcatctcggggcaagtttcgtgcttagatgctttcagcacttatctcttccgcatttagctaccgggcagtgccattggcatgacaacccgaacaccagtgatgcgtccactccggtcctctcgtactaggagcagcccccctcagttctccagcgcccacggcagatagggaccgaactgtctcacgacgttctaaacccagctcgcgtaccactttaaatggcgaacagccatacccttgggacctacttcagccccaggatgtgatgagccgacatcgaggtgccaaacaccgccgtcgatatgaactcttgggcggtatcagcctgttatccccggagtaccttttatccgttgagcgatggcccttccattcagaaccaccggatcactatgacctgctttcgcacctgctcgcgccgtcacgctcgcagtcaagctggcttatgccattgcactaacctcctgatgtccgaccaggattagccaaccttcgtgctcctccgttactctttaggaggagaccgccccagtcaaactacccaccagacactgtccgcaacccggattacgggtcaacgttagaacatcaaacattaaagggtggtatttcaaggtcggctccatgcagactggcgtccacacttcaaagcctcccacctatcctacacatcaaggctcaatgttcagtgtcaagctatagtaaaggttcacggggtctttccgtcttgccgcgggtacactgcatcttcacagcgagttcaatttcactgagtctcgggtgga

SEQ ID NO: 6725 - DNA, 1126 bp, Zea mays
  Zm_smallRNAprecursor_2214
agagagtgttgtgcactcaacataatcttgtggtggttgacttctgtttttggatccgtatccaaagggataaacaagccaaatttgcgaggacgaagtggtggaaactcaaagggaagacatcccaagtttttaagggaagagtttttgtggagggcgcttggtccgaagaagatgtgaacaacatgtgggtgaagattgcaacttgtattaggaaggtggcttcagaggtgtttggagtgaccaaagggagcagaggtgaacctaaagatacttggtgggccgagaacgttcaaaaaacaataaaggagaagaaagaatgttacaagaacttgttccatgacaggagcacggtcaacatagagaggtataaggtggaaaagaagactgcaaagtgagttgtaaggcaaagggtcgagcctatgatgatctttaccgaagactaagtacaaaggaaggggagaaggaagacgagggacctcaaccaagttaaatgcattaaggatgagatggatcaactcttggtgaaaggacaagacatcaaacagaggtggcggagatattttgacaatcttttcaatggtgagaatgagactatggacacccagttggatgattcctttgatgatttaaatagatgctttgtacgcaggatccaagagtcggaggtctaagaagctttaaagaggatgaaaggggacaaggcgatcgcccggatggtatcccaatagagttgtggaaatgccttggggatattgctatagtttagctaaccaagttgttcaaccatatttttcgatcaaacaaaatgtccgatgagtggaggagtacattagtaccaatcttgaaggacaagggagatattcagagttgtaccaactatcgaggggttaagctcacgagccacaaagttctctcaaaagcttttccccctcccctttctctctctttctctttttggtgacttctggttgggtttcaactctagcctaccccaacaagtttgggactaaaaggctatgttgatgttgataaaactcttaagtgagttagccattatcactaaacatccatttttgcactaaaaaatctgctcaacaaagtgcaaggtacctggatagaagtt

SEQ ID NO: 6726 - DNA, 1076 bp, Zea mays
  Zm_smallRNAprecursor_2215
ggactacaccccagctcctttataaacaggccacctccccatcctttcgacgatatcatgtcacctggccgctagctagggtttggtctttacggccgccgccgcttctgcagacgtcccgtgccctttgctgtttcagcgttctttcttgtagtttcatgaagcatcttggttggtttgtttcttgagtgtctcttccttttctcccctttgctcctctttgtgcagttttgttcagagagacgatgttttcctcttttttgtcgtccttaagaatttatttctctcttctgttgcgagctctgatgaggactgtgatgaaaaacacaatcaaaacacaccatctttcgggactgattggctcgatacgagccatgctgccaactctgcaattctgacgtccccattccagcccgcagattttcttttgcatttccacgcttttattcatgcgtctgtatgctgcatcgtaaaaaaattgatctgaaatactttgacagtggcctgtgacgaaactcagcaatcaaaaacaccatctttcggggctgattggcgcgagccatgctgtcacactgcaaagaattctgaggccaaacagagtataaccacttttgagtctgataccgcattggccatattttttttttcaggaaaatggtaacagcaaatcagaccagaaagacttcttggttcttaggcgtttcaaaatattgtagcctagtattttcatggtattgctattttttgaacaaaccactgaacggtacccgtaaaaactgccaacgttaaaagtgaattaactactagttttattttacatttgtaggatgtaatgtgctgcagaatttgagatggaattggatacctgcagattatgattacttacactgcttgtgggtacaagtcctatggatcgcccttgccggtgatgacgcggaagtgcagcaggatgctgctgctaggctcaatgaagctgaagcccgatgtccacttggcagtcgcagagtgggtgaaatattgatctacgacccatgtaggcctcggcatggctgtaaaaatgacttcggctcttgtcc

SEQ ID NO: 6727 - DNA, 1174 bp, Zea mays
  Zm_smallRNAprecursor_2216
catgtctacactcagccatcgtagagtagcgagcatgagttcgccccccaatgcagcagtagcacttgttatctttgcatggaggaaaccctacaacgcaccatgctccgtttccttgcataattccttctttagctggagtagaaacactgacatcatctgtgacatgacctagtagaaggtataggataagagttctattaccaacaaatgcctcgagaataattacattcgaaattatttgagtaatttaacacaggggattgcgatacattagcaattcgccatgatacacacggtatcatataataacatcttctaaaattgtctagatctatctaagcatgcacacacatgtctgtatagttttcacttacccttcccatgtgcatgagcagcaaagtatccgaggagaagtaacgagaaaaacactagcgcatccaccctctttctgtactccatgtcgcaagacaatttaatgaactcctcacgattgatcctagaagagtgtatacttatatatatatactataatcctataagagtgtatacttatatatatatactatagcggaaaccaattcactagcaagtattcaccaaagatatgctactccaaacttagcagtgatttagtttcttttagacaaaattgtaagttatctattctatcatatctatctatctatctatctatatcttctatatatctatatctatatctataccccttattatatctatatctatacccctatattatttggtgaatttgctatatctatctatatccctatatctatatctatttgaggtgtgggaaaacccaaggttacaattctggctctactactacctacctgtgtcgagagctcatggtcgcacacgcatcgccaacgaggagcaaacaatgcaagccactgcacgcagagctgtgcaaccgtcgctgccctccactcctgctatgccacctgtcaccccaggttttagaaggtaaaccgaatgcgaaccatgtacgtgctaggatcagaactcacgtacatagcgattacataaatgactcatcatagcacaatgcttcgaataacaataaagagtaagtaataatattaaagactagagtcatttacataatataaatcaaagtacacagaattgaaacgtagccaacgta

SEQ ID NO: 6728 - DNA, 1171 bp, Zea mays
  Zm_smallRNAprecursor_2217
gtacttgcagactgcagcgtcctgtcttttcccccgcgcagttttttttttcttttgcatgcagtctgctgcgtcaggtcacttccccctgcgctgcgcgcaaattagaattttttcctctgttgtttctagttctctgaccacactggtcagtaccagctgagctggcccatgggggcggttgaactggttctgaggaccagctcaactgcctatatatacttcactcttcctcatctcttttcccacttcattcactctcgccttggtcgcttcacaacctttagagcctttccttcacacacttcaaccgcttcacagtttcaccaccgttttcaatcatggtgcgtcgccgcaacccctctgtggttgagtttagcagcgactccgacgagattcaggaggaatctcccatcccctctcctccgcctcgtcgctccctctctaagagaggacgtggctctggtcggatgcctggcgagggctcttccttgccctcgcagccgactcgcgggagacgccaaaaggttggcgcctctcgtcctcgtcgtagcacgtcttcctcagggtatgctccctgccaagaggaggatggggctttcgacgacttcgtcgaccttccggcgcctgatgctctctacgtcaccggactgcacatgcatccggcgaacgtcagccgcggtccgcatgaatctcccatcgacttcactcagaagggaatagaaacccttcagcgtctgaggttttccaaccctactctcactcctcgtcatcctggtgtccaggaccctcagttctggaatcttttccaggctgacttctacaattctgtcattcttaccaagaaacacccagtcgtccgacatagatttattgactgggagggttgtgagaatatgggagatgttgacatgtcgtcagctctcgttcacttagagagaaaggggttacgtaacattatgaccatggaatacccctggaacgatgaggtggtagctcagttctatgccaccctctggataaagaaagtagatgaggaagccgatgggtatgagtacccagtcatgtatttctttatccagggtaactggcacaaagtcagttatcgtcgttttgcccatattctgggcttctctgatacagacattcagggcagcaacatgcgagtgca

SEQ ID NO: 6729 - DNA, 1058 bp, Zea mays
  Zm_smallRNAprecursor_2218
aaacccttcagcgtctgaggttttccaaccctactctcactcctcgtcatcctggtgtccaggaccctcagttctggaatcttttccaggctgacttctacaattctgtcattcttaccaagaaacacccagtcgtccgacatagatttattgactgggagggttgtgagaatatgggagatgttgacatgtcgtcagctctcgttcacttagagagaaaggggttacgtaacattatgaccatggaatacccctggaacgatgaggtggtagctcagttctatgccaccctctggataaagaaagtagatgaggaagccgatgggtatgagtacccagtcatgtatttctttatccagggtaactggcacaaagtcagttatcgtcgttttgcccatattctgggcttctctgatacagacattcagggcagcaacatgcgagtgcatggcattcggctgcccatgcgggaagagacggaattcattcatgtctctactgagcgggagttctggacaaccgctaacatgcataggtactacaggtaccttaattccttgtcccggatgaccgttctcccaaagggcggtaatcaaatgaacgtccttggggagagtcgagtcttcctcctcctccttgctcccaacagtctcgcccgcatcaatgtgtttgacatgatctgggaagagatcgtccgtgcttcctggtctcctctcagagggtgtcttcatgcaccctttatcatgaagttgatcgaagtggtcacccagacccacttcgaaaaacctgtcaaacactcccgctacgtaccctactgggttgattcctccaacccagctgctcgtacaaagcgggttccctcacggtctggaggccctgcctcctcctctgagccacctcgccagcctcctcaccatccttcctcctctccccccgctgctgcctcgcgtccctctcctggccgcggatctcccatgccacgtgctagtggtcgtggtcgaggtcgtggccgcgggatgggtgctcgcttgctccatgggcttgcgacatttttctcc

SEQ ID NO: 6730 - DNA, 1057 bp, Zea mays
  Zm_smallRNAprecursor_2219
aacccttcagcgtctgaggttttccaaccctactctcactcctcgtcatcctggtgtccaggaccctcagttctggaatcttttccaggctgacttctacaattctgtcattcttaccaagaaacacccagtcgtccgacatagatttattgactgggagggttgtgagaatatgggagatgttgacatgtcgtcagctctcgttcacttagagagaaaggggttacgtaacattatgaccatggaatacccctggaacgatgaggtggtagctcagttctatgccaccctctggataaagaaagtagatgaggaagccgatgggtatgagtacccagtcatgtatttctttatccagggtaactggcacaaagtcagttatcgtcgttttgcccatattctgggcttctctgatacagacattcagggcagcaacatgcgagtgcatggcattcggctgcccatgcgggaagagacggaattcattcatgtctctactgagcgggagttctggacaaccgctaacatgcataggtactacaggtaccttaattccttgtcccggatgaccgttctcccaaagggcggtaatcaaatgaacgtccttggggagagtcgagtcttcctcctcctccttgctcccaacagtctcgcccgcatcaatgtgtttgacatgatctgggaagagatcgtccgtgcttcctggtctcctctcagagggtgtcttcatgcaccctttatcatgaagttgatcgaagtggtcacccagacccacttcgaaaaacctgtcaaacactcccgctacgtaccctactgggttgattcctccaacccagctgctcgtacaaagcgggttccctcacggtctggaggccctgcctcctcctctgagccacctcgccagcctcctcaccatccttcctcctctccccccgctgctgcctcgcgtccctctcctggccgcggatctcccatgccacgtgctagtggtcgtggtcgaggtcgtggccgcgggatgggtgctcgcttgctccatgggcttgcgacatttttctcc

SEQ ID NO: 6731 - DNA, 1058 bp, Zea mays
  Zm_smallRNAprecursor_2220
aacccttcagcgtctgaggttttccaaccctactctcactcctcgtcatcctggtgtccaggaccctcagttctggaatcttttccaggctgacttctacaattctgtcattcttaccaagaaacacccagtcgtccgacatagatttattgactgggagggttgtgagaatatgggagatgttgacatgtcgtcagctctcgttcacttagagagaaaggggttacgtaacattatgaccatggaatacccctggaacgatgaggtggtagctcagttctatgccaccctctggataaagaaagtagatgaggaagccgatgggtatgagtacccagtcatgtatttctttatccagggtaactggcacaaagtcagttatcgtcgttttgcccatattctgggcttctctgatacagacattcagggcagcaacatgcgagtgcatggcattcggctgcccatgcgggaagagacggaattcattcatgtctctactgagcgggagttctggacaaccgctaacatgcataggtactacaggtaccttaattccttgtcccggatgaccgttctcccaaagggcggtaatcaaatgaacgtccttggggagagtcgagtcttcctcctcctccttgctcccaacagtctcgcccgcatcaatgtgtttgacatgatctgggaagagatcgtccgtgcttcctggtctcctctcagagggtgtcttcatgcaccctttatcatgaagttgatcgaagtggtcacccagacccacttcgaaaaacctgtcaaacactcccgctacgtaccctactgggttgattcctccaacccagctgctcgtacaaagcgggttccctcacggtctggaggccctgcctcctcctctgagccacctcgccagcctcctcaccatccttcctcctctccccccgctgctgcctcgcgtccctctcctggccgcggatctcccatgccacgtgctagtggtcgtggtcgaggtcgtggccgcgggatgggtgctcgcttgctccatgggcttgcgacatttttctcca

SEQ ID NO: 6732 - DNA, 1094 bp, Zea mays
  Zm_smallRNAprecursor_2221
cccactacatatgaagctgctatgagaagtgcaaattcatccaaatggttatcagccatggaagatgaattagaatccatgagaatgaacaaagtttgggacttagaagtcattccccatggagccaaaacagtaggctgtaaatgggtctacaagacaaagcgtgactccagagggaacatagaaagatacaaggctagacttgtggccaaagggttcacacaaagagaaggcattgactaccatgaaaccttctcacctgtctcaacaaaagattcattcaggatcataatggcactagttgctcattttgatctagagctccatcagatggatgtaaagacagcattcctaaatggagagttagaagaaaacgtgttcatggtacaaccaaagggttttgttgtgagcggtaaagaacacatgggatgtcacttgaggaggtccatttatggattaaaacaggcctccagacagtggtacatcaagtttgatcagactataagaaagtttggtttcgaggaaaacaaggaagacaattgcatttatgcaaaatttagaaaaggaaagtatatcttccttgttttgtatgtcgatgacatactcttagctagtagtgataaggatctactagcggaaacaaaagggtttctttcctcgaattttgatatgaaagacatgggagaagcctcctatgttcttggaatagaaattcacagagacagacaaaagggagtattaggactctcacagaagtcatatatagaaaatgtactaaagaggtataatatgcacaagtgtaatgccttgcctggtccaatagtcaagggtgataagtttggggaatatcagtgtcccaagaatcagtatgagaaaaacaagatgaagtcagtaccatatgcttcagctatcggaagcattatgtatgctcaagtatgtactcgccctgacttagcttttaccaccgggatgcttggacgctatcagaagaatccaggcatagaacactggaaagcagtcaagaaggctctaaggtaccttcaaggtactaaaggtctcatgcttacgtacagaagatctaattccctacaaat

SEQ ID NO: 6733 - DNA, 1175 bp, Zea mays
  Zm_smallRNAprecursor_2222
tctctttctctgtggtttatggtcgatttagttccattttggaagttgaacatatatgttcatatagatgcagcacaaaagatatatgtaggcagtgcctattagtttactaatgttatgaagtagtggtttatgattgttgagtgattaatttggacatgattgatgaccgtatttatgtgaaaaatatgatccagtaagtatataaaaactgaaatgcatttcagtttatctgaataatatatagtagcacgaagtcatgagcagcacacttgtttccacatcaaaatatcaaccactacttcataaaggtatgtataattcacatcattgcatatatcttcacccacacaatttgagcattcaatgagtctaaaacaacaggtccgtgaacctttatcaaagctaaaggctctatgataaacaactgaaccataatcgcacaagaacagtaagatcaatgacgaccgttggtgggcgtgtaaaatacctatgggacgcggtggcggaggattgacagcagcgcccggctcgacgacactgtcaacggcggcgccgattagggttgagttcgtgcggggacaaatgaaggcgattcacactgccggaagggaggaaggagattaggaagttgcattgtaaagcataaatttaaaagaccaactcgagcaccttggaatccggacgacatagcgaccgcggacgtgagccaatgtgacgcggggcgcgcaagattgacaacggcagcggctcgacgatgctgtcaacggcggtggcgattaatgttgagggcgtgcggcggcggaggacgacgaaacgcgctggcggcgacggatgaagaagaatcgccctggcgacccctgaagaaacgcggcgagtcggccaagaaggttgaccgcgcgggggttacgatatagaaatgtttgaccgcgtgggaagtggggtagtgggccaattcctttatttctggaacgtgggtcggctgaagtagttacgctaaatcactattatgtataaacagaagaatggaatagcgtaaacatgtgttgactaaggaagatatggttgaccacgtggaaagtgggcctaagccgctatttctggaacgagggctcgcggctgttactctgtttacgctaaaatgggtttccgtttacgctaaatcagttcgcttg

SEQ ID NO: 6734 - DNA, 1047 bp, Zea mays
  Zm_smallRNAprecursor_2223
ggcgccggcggcatctgtgcactacgggtgatgatgaatagttgctggttaaaatacagttcaaacatacagttcataatatacagacacacatacgacggcatatatgttctccttttttattgacaacctttatcaattcatccaccatagcaatttgatctctattaaggcccaatttatatctttctcatcactagaatcatcctcatcattatggctagttactaggtccacttggccagcgtggccatgcggcccgcgcagaagagcatgaaggcgttgatggcgagctgcagcttgccccggctctgcaccatggggttcttgatgattacctgaacaataaagtcagtgctccattttggaaatcgacaatggactgtatgatgattacctgaacgatgcagccgccaagaccgaggcgccgtgcgagtgcccgtgcgtcgcgtgcgtgtgcatgtgcgcgtgcccgccgtggccgtggccgtcgccgtctgctccgtcgtcgacgtgcggcgccgacgccgcctgctgctgctgttgctcctcgtcgccgacggcggcggcgcccacggcggcggcggcgctgtccttgaagtggacgcgcgtgaagtagcccgtggcgacggtgtcgacgacgagcgtgccgatggcgcccaccatggcgccgagccccgcgaaggggaagtcctgccacggcccgccggagaggcagtcggacgtgagcttctcgaacgcgtcggggaggatgtggatgaaccccgtggccagcccaggatgacccccgccgcgaacgccttgatgaggaagaacacgtccctgtcagggcgcagcgccggcacgcgccgccccagcacgggcaggcagcagcccagcgccccgcacacgaggatggagaagaaggctgcgccctgacagggacgtgtttcttcctcatcaaggcgtattttttcgcattccgtctttggccgggcgcgaggaggaccagcgggacgccggctgccagggcgagggcgagcgcggcgcgccggtgctgcgtggacg

SEQ ID NO: 6735 - DNA, 1084 bp, Zea mays
  Zm_smallRNAprecursor_2224
ggttaaaatacagttcaaacatacagttcataatatacagacacacatacgacggcatatatgttctccttttttattgacaacctttatcaattcatccaccatagcaatttgatctctattaaggcccaatttatatctttctcatcactagaatcatcctcatcattatggctagttactaggtccacttggccagcgtggccatgcggcccgcgcagaagagcatgaaggcgttgatggcgagctgcagcttgccccggctctgcaccatggggttcttgatgattacctgaacaataaagtcagtgctccattttggaaatcgacaatggactgtatgatgattacctgaacgatgcagccgccaagaccgaggcgccgtgcgagtgcccgtgcgtcgcgtgcgtgtgcatgtgcgcgtgcccgccgtggccgtggccgtcgccgtctgctccgtcgtcgacgtgcggcgccgacgccgcctgctgctgctgttgctcctcgtcgccgacggcggcggcgcccacggcggcggcggcgctgtccttgaagtggacgcgcgtgaagtagcccgtggcgacggtgtcgacgacgagcgtgccgatggcgcccaccatggcgccgagccccgcgaaggggaagtcctgccacggcccgccggagaggcagtcggacgtgagcttctcgaacgcgtcggggaggatgtggatgaaccccgtggccagcccaggatgacccccgccgcgaacgccttgatgaggaagaacacgtccctgtcagggcgcagcgccggcacgcgccgccccagcacgggcaggcagcagcccagcgccccgcacacgaggatggagaagaaggctgcgccctgacagggacgtgtttcttcctcatcaaggcgtattttttcgcattccgtctttggccgggcgcgaggaggaccagcgggacgccggctgccagggcgagggcgagcgcggcgcgccggtgctgcgtggacggcacgaggagggggtggaggtaggggtacagaggaggagctcgcacgcagacgcagctacgtgggtgggctcatataggcggc

SEQ ID NO: 6736 - DNA, 1152 bp, Zea mays
  Zm_smallRNAprecursor_2225
ctcctcccctgtacccctacctctccaccccctcctcgtgccgtccacgcaccaccggcgcgccgcgctgccatggccatgaggccacgcgccgcgctcgccctctccctggcagccggcgtcccgctggtcctcctcctcctcctcctcgcgcccggcgcgcgcgccgacgacggcagcggcgggtgcggggcggcgggcggcggcgaggcggcgccgggcgaccgcgcgcgggccagggcgctgaagatcgcggccttcttctccatcctcgtgtgcggggcgctgggctgctgcctgcccgtgctggggcggcgcgtgccggcgctgcgccccgacagggacgtgttcttcctcatcaaggcgttcgcggcgggggtcatcctggccacggggttcatccacatcctccccgacgcgttcgagaagctcacgtccgattgcctctccggcgggccgtggcaggacttccccttcgcggggctcggcgccatggtcggcgccatcggcacgctcgtcgtcgacaccgtcgccacgggctacttcacgcgcgtccacttcaaggacagcgccgccgccgccgtgggcgccgccgccgtcggcgacgaggagaagcagcagcagcaggcggcgtcggcgccgcacgtcgacgacggagcagacggcgacggccacggccacggcgggcacgtgcacatgcacacgcacgcgacgcacgggcactcgcacggcgcctcggcgctcgtggccgccgtcggcggcgccgagggcgacaaggagcacgcgctgcgccaccgtgtcatcgctcaggtaaccgaccgacgatccctgttgagtattcacagctgttgttataaccgtgtgcagttatcattcaccacaccaccgtcgttataaataaaatggcatgcatttatcatgcgtttttgttttctttttttggtttcgtacgtaggttcttgagcttgggattgtggtgcactcggtgatcatcggcatctccctcggcgcgtctcaagaccccagcaccatcaagcctcttgtggtcgccctcagcttccaccaaatgttcgagggcatgggtctaggcggctgcatcgttcaggtaatcatcatacagtccattgtcctaagatatacagtccattaatc

SEQ ID NO: 6737 - DNA, 1065 bp, Zea mays
  Zm_smallRNAprecursor_2226
cgctcctgtgcgcggcgctgcgcgggcgggatccgcgcgagcaggcaggggcgcgtccgaccacagcgcgacacgggcgtgatctgcgtgggcggggcgcgggcgggagttgcgcagcgcaggccaggctccggcgcggcgtaggcgtgctgcgcgggcgggatccgcgcgagcaggcgggggcgcgtccgaccacagcgcgacacgggcgtgatctgcgtgggcggggcgcgggcgggagttgcgcagcgcaggccaggctccggcgcggcgtaggcgtgctgcgcgggcaaatctcggcgcagacaagctcggcgcgagcggccaccggcgcaggcgggcgcggcgtgcacggtccggttctccgcgtgtgcatgggtggcgcaggcgtgcactagtagaaaaatgctcaaagcctgcggagcaagcggattcgattatcaaccgcctatgctatttttaatgacggttacttaagaaaaccgccactataaatcgatttctacagacggttccttaagaaaaccgtctgtaaaactccatgatatttagtggcagttttcttaaggaactgtatgtagaaatcgatttctagtgacagttttcttaaagaactgccactagaaatcatttttatccttaattttttgagtttttaaatgacctcatatgaaaaactaccaaaataaaagttaataaaagttgtagatctctaaagttatgaaactttgcagttcacaactcttttatttgaacttatttcggttctcaaaaattgaatctaagtatgtccaatttaaaattcaaatttcgtaaacctcggatgaaaaaagtgtcaaaataaaagttgtagaacttcaaaagttattcaactttgtagttgataacctttttatttgaattcgtttacgatctcaaacaagcaatttacactcaaatggttgtaatatgtggataaaaactacatattagacacaaagcatgcaataggtggagtggtagtggaggtaggtgcgaggtgaggttgacagttcgattcctagcaaccgcgtagcgcgctaattt

SEQ ID NO: 6738 - DNA, 1070 bp, Zea mays
  Zm_smallRNAprecursor_2227
tcgtcgccgacatcgctgctgcctccgtcgcccttgtcgtcgtcgccgccgccctcgctggcgctgccctccttggagtctgaggagtcctccacctcctccgaggaggcctcctccgagtcatccgacccaccgagccccgtgctctcgacggaccagatgtaagaccgctctgcggtggacagccccatggagtcgtccgaatcatcggacgacgccacgggggacgccggaatgagcgagggatcatactcggaggagacttcctccgagtactctgagtccccaaagtcctccgagggaggactcagggggcgcttgcgcttcccatcggcggggcggcgccctttcttgcctttcttccctccggccatggttcactcggaaggataggaagcagggaagaagaagaaggcgaatgaacgagagcaagtggggagagcagccaggcgagcgggctatttaaaggggccaattccctatatgccactggaaaatatactcattccttgtatgccactggccccacatgtcatagacaccaaaaaatatacctatatgccactcagtggcacacaagggatgagtataaaatctgatggcatactaggaattttctctatttaaagaggccgagagacgatcgttcacttcctacccgctcaccgaacagtcacaagaattcaaaagtgattcaaactgcctggaaatgagtcagacgtctggcgccgcttcacgtaacacggcaccggatggaatcaaagtcaaccgctcaagtagagtattatgtctctccatcgtatcaagttactatttcaggactacgtgatggacatcttttactgggtagacacccgttgggcacacccattgggtgtaccgcctagattctccgagattctctgaagtagttagaccttcaacatatacgcaatgaatataccacgacaaaggggaagatctgtggaaatgggaggaagtctagatgcggtcaccaagcacaagtcgaatctgtagaggcattgaagttcatggccgagaggcgtccagccaggacctctctgttccga

SEQ ID NO: 6739 - DNA, 1086 bp, Zea mays
  Zm_smallRNAprecursor_2228
tttttttctagctgtatggcttctactatatgttttatattagaaaaactacgtacatataaaagaagtcaaaacaaaactattaactattcattcggctgcccatgaaacgtttcagcctgctgtgtgcagcctggtgtagcggctgctagctgagggaacgacaggaaagggccgcatcgcgcgcagtacaagctgtactcgccgggcgcgtggtctgcggtaccgcgcgcgtactacaggagcgtactaccggccgtccgccacccacggacccacccctggtacatagcacaccacacagggctcatcccgccacgtgcccacgtcagatgcgaccgagatccatcttcacgaacggcgataaaatatgagctcatttggcgtcatagtgtgctcatctggtgccatataagtgccaaattatctgccctcgcctcgctccttcgctttcattcctcggcctccgcagctagcgcaacgcaaaggcagttccggcgggggcggactgggaacacatgggaatgagatgagatcattgctcggtcgtgctggcctgggccgtcggcgcgcgttgatcttgcatgtgttctcaggtcgcccccggagggccttccttgctgctgtgttccgctagacctggagtatctcgacgacggtggcaggcacacgcagtgacggcaccactacgtctgttccgccacgagagcctatgtaacggtatgtttattttgctgctgcagcactcttcgtcctagctcatgtcaactgccccgacaataagaaaccagtgcaggcatgtctataaagaaaaagatctacgtggtacggtctgggcactgatgattagttgctcttgttcaggccaactgataaccaagtaaatgaacatgtaagagtactactccatagattactctgctccgtttttttattactcgctccgtttttttatttgctacgttctagtttaaaaataaattaatatgcgataaatattcgagaacgagagtattgctttatagatctgttaaaatttggtttaggcgggaccagccaatttttctccttctttctgtttttatc

SEQ ID NO: 6740 - DNA, 1084 bp, Zea mays
  Zm_smallRNAprecursor_2229
ttttttctagctgtatggcttctactatatgttttatattagaaaaactacgtacatataaaagaagtcaaaacaaaactattaactattcattcggctgcccatgaaacgtttcagcctgctgtgtgcagcctggtgtagcggctgctagctgagggaacgacaggaaagggccgcatcgcgcgcagtacaagctgtactcgccgggcgcgtggtctgcggtaccgcgcgcgtactacaggagcgtactaccggccgtccgccacccacggacccacccctggtacatagcacaccacacagggctcatcccgccacgtgcccacgtcagatgcgaccgagatccatcttcacgaacggcgataaaatatgagctcatttggcgtcatagtgtgctcatctggtgccatataagtgccaaattatctgccctcgcctcgctccttcgctttcattcctcggcctccgcagctagcgcaacgcaaaggcagttccggcgggggcggactgggaacacatgggaatgagatgagatcattgctcggtcgtgctggcctgggccgtcggcgcgcgttgatcttgcatgtgttctcaggtcgcccccggagggccttccttgctgctgtgttccgctagacctggagtatctcgacgacggtggcaggcacacgcagtgacggcaccactacgtctgttccgccacgagagcctatgtaacggtatgtttattttgctgctgcagcactcttcgtcctagctcatgtcaactgccccgacaataagaaaccagtgcaggcatgtctataaagaaaaagatctacgtggtacggtctgggcactgatgattagttgctcttgttcaggccaactgataaccaagtaaatgaacatgtaagagtactactccatagattactctgctccgtttttttattactcgctccgtttttttatttgctacgttctagtttaaaaataaattaatatgcgataaatattcgagaacgagagtattgctttatagatctgttaaaatttggtttaggcgggaccagccaatttttctccttctttctgtttttat

SEQ ID NO: 6741 - DNA, 1084 bp, Zea mays; identical to SEQ ID NO: 6740
  Zm_smallRNAprecursor_2230

SEQ ID NO: 6742 - DNA, 1085 bp, Zea mays
  Zm_smallRNAprecursor_2231
ttttttctagctgtatggcttctactatatgttttatattagaaaaactacgtacatataaaagaagtcaaaacaaaactattaactattcattcggctgcccatgaaacgtttcagcctgctgtgtgcagcctggtgtagcggctgctagctgagggaacgacaggaaagggccgcatcgcgcgcagtacaagctgtactcgccgggcgcgtggtctgcggtaccgcgcgcgtactacaggagcgtactaccggccgtccgccacccacggacccacccctggtacatagcacaccacacagggctcatcccgccacgtgcccacgtcagatgcgaccgagatccatcttcacgaacggcgataaaatatgagctcatttggcgtcatagtgtgctcatctggtgccatataagtgccaaattatctgccctcgcctcgctccttcgctttcattcctcggcctccgcagctagcgcaacgcaaaggcagttccggcgggggcggactgggaacacatgggaatgagatgagatcattgctcggtcgtgctggcctgggccgtcggcgcgcgttgatcttgcatgtgttctcaggtcgcccccggagggccttccttgctgctgtgttccgctagacctggagtatctcgacgacggtggcaggcacacgcagtgacggcaccactacgtctgttccgccacgagagcctatgtaacggtatgtttattttgctgctgcagcactcttcgtcctagctcatgtcaactgccccgacaataagaaaccagtgcaggcatgtctataaagaaaaagatctacgtggtacggtctgggcactgatgattagttgctcttgttcaggccaactgataaccaagtaaatgaacatgtaagagtactactccatagattactctgctccgtttttttattactcgctccgtttttttatttgctacgttctagtttaaaaataaattaatatgcgataaatattcgagaacgagagtattgctttatagatctgttaaaatttggtttaggcgggaccagccaatttttctccttctttctgtttttatc

SEQ ID NO: 6743 - DNA, 1085 bp, Zea mays; identical to SEQ ID NO: 6742
  Zm_smallRNAprecursor_2232

SEQ ID NO: 6744 - DNA, 1085 bp, Zea mays; identical to SEQ ID NO: 6742
  Zm_smallRNAprecursor_2233

SEQ ID NO: 6745 - DNA, 1085 bp, Zea mays; identical to SEQ ID NO: 6742
  Zm_smallRNAprecursor_2234

SEQ ID NO: 6746 - DNA, 1082 bp, Zea mays
  Zm_smallRNAprecursor_2235
tttttctagctgtatggcttctactatatgttttatattagaaaaactacgtacatataaaagaagtcaaaacaaaactattaactattcattcggctgcccatgaaacgtttcagcctgctgtgtgcagcctggtgtagcggctgctagctgagggaacgacaggaaagggccgcatcgcgcgcagtacaagctgtactcgccgggcgcgtggtctgcggtaccgcgcgcgtactacaggagcgtactaccggccgtccgccacccacggacccacccctggtacatagcacaccacacagggctcatcccgccacgtgcccacgtcagatgcgaccgagatccatcttcacgaacggcgataaaatatgagctcatttggcgtcatagtgtgctcatctggtgccatataagtgccaaattatctgccctcgcctcgctccttcgctttcattcctcggcctccgcagctagcgcaacgcaaaggcagttccggcgggggcggactgggaacacatgggaatgagatgagatcattgctcggtcgtgctggcctgggccgtcggcgcgcgttgatcttgcatgtgttctcaggtcgcccccggagggccttccttgctgctgtgttccgctagacctggagtatctcgacgacggtggcaggcacacgcagtgacggcaccactacgtctgttccgccacgagagcctatgtaacggtatgtttattttgctgctgcagcactcttcgtcctagctcatgtcaactgccccgacaataagaaaccagtgcaggcatgtctataaagaaaaagatctacgtggtacggtctgggcactgatgattagttgctcttgttcaggccaactgataaccaagtaaatgaacatgtaagagtactactccatagattactctgctccgtttttttattactcgctccgtttttttatttgctacgttctagtttaaaaataaattaatatgcgataaatattcgagaacgagagtattgctttatagatctgttaaaatttggtttaggcgggaccagccaatttttctccttctttctgttttta

SEQ ID NO: 6747 - DNA, 1082 bp, Zea mays; identical to SEQ ID NO: 6746
  Zm_smallRNAprecursor_2236

SEQ ID NO: 6748 - DNA, 1083 bp, Zea mays
  Zm_smallRNAprecursor_2237
tttttctagctgtatggcttctactatatgttttatattagaaaaactacgtacatataaaagaagtcaaaacaaaactattaactattcattcggctgcccatgaaacgtttcagcctgctgtgtgcagcctggtgtagcggctgctagctgagggaacgacaggaaagggccgcatcgcgcgcagtacaagctgtactcgccgggcgcgtggtctgcggtaccgcgcgcgtactacaggagcgtactaccggccgtccgccacccacggacccacccctggtacatagcacaccacacagggctcatcccgccacgtgcccacgtcagatgcgaccgagatccatcttcacgaacggcgataaaatatgagctcatttggcgtcatagtgtgctcatctggtgccatataagtgccaaattatctgccctcgcctcgctccttcgctttcattcctcggcctccgcagctagcgcaacgcaaaggcagttccggcgggggcggactgggaacacatgggaatgagatgagatcattgctcggtcgtgctggcctgggccgtcggcgcgcgttgatcttgcatgtgttctcaggtcgcccccggagggccttccttgctgctgtgttccgctagacctggagtatctcgacgacggtggcaggcacacgcagtgacggcaccactacgtctgttccgccacgagagcctatgtaacggtatgtttattttgctgctgcagcactcttcgtcctagctcatgtcaactgccccgacaataagaaaccagtgcaggcatgtctataaagaaaaagatctacgtggtacggtctgggcactgatgattagttgctcttgttcaggccaactgataaccaagtaaatgaacatgtaagagtactactccatagattactctgctccgtttttttattactcgctccgtttttttatttgctacgttctagtttaaaaataaattaatatgcgataaatattcgagaacgagagtattgctttatagatctgttaaaatttggtttaggcgggaccagccaatttttctccttctttctgtttttat

SEQ ID NO: 6749 - DNA, 1083 bp, Zea mays; identical to SEQ ID NO: 6748
  Zm_smallRNAprecursor_2238

SEQ ID NO: 6750 - DNA, 1083 bp, Zea mays; identical to SEQ ID NO: 6748
  Zm_smallRNAprecursor_2239

SEQ ID NO: 6751 - DNA, 1083 bp, Zea mays; identical to SEQ ID NO: 6748
  Zm_smallRNAprecursor_2240

SEQ ID NO: 6752 - DNA, 1084 bp, Zea mays
  Zm_smallRNAprecursor_2241
tttttctagctgtatggcttctactatatgttttatattagaaaaactacgtacatataaaagaagtcaaaacaaaactattaactattcattcggctgcccatgaaacgtttcagcctgctgtgtgcagcctggtgtagcggctgctagctgagggaacgacaggaaagggccgcatcgcgcgcagtacaagctgtactcgccgggcgcgtggtctgcggtaccgcgcgcgtactacaggagcgtactaccggccgtccgccacccacggacccacccctggtacatagcacaccacacagggctcatcccgccacgtgcccacgtcagatgcgaccgagatccatcttcacgaacggcgataaaatatgagctcatttggcgtcatagtgtgctcatctggtgccatataagtgccaaattatctgccctcgcctcgctccttcgctttcattcctcggcctccgcagctagcgcaacgcaaaggcagttccggcgggggcggactgggaacacatgggaatgagatgagatcattgctcggtcgtgctggcctgggccgtcggcgcgcgttgatcttgcatgtgttctcaggtcgcccccggagggccttccttgctgctgtgttccgctagacctggagtatctcgacgacggtggcaggcacacgcagtgacggcaccactacgtctgttccgccacgagagcctatgtaacggtatgtttattttgctgctgcagcactcttcgtcctagctcatgtcaactgccccgacaataagaaaccagtgcaggcatgtctataaagaaaaagatctacgtggtacggtctgggcactgatgattagttgctcttgttcaggccaactgataaccaagtaaatgaacatgtaagagtactactccatagattactctgctccgtttttttattactcgctccgtttttttatttgctacgttctagtttaaaaataaattaatatgcgataaatattcgagaacgagagtattgctttatagatctgttaaaatttggtttaggcgggaccagccaatttttctccttctttctgtttttatc

SEQ ID NO: 6753 - DNA, 1084 bp, Zea mays; identical to SEQ ID NO: 6752
  Zm_smallRNAprecursor_2242

SEQ ID NO: 6754 - DNA, 1136 bp, Zea mays
  Zm_smallRNAprecursor_2243
ctcaggatgaacgctggcggcatgcttaacacatgcaagttgaatgggaagtggtgtttccagtggcgaacgggtgagtaacgcgtaagaacctgcccttgggaggggaacaacaactggaaacagttgctaataccccatagtctgaggagcaaaaggagaaatcctcccaaggaggggctcgcgtctgattagctagttggtgaggcaatagcttaccaaggcgatgatcagtagctggtccgagaggatgatcagccacactgggactgagacacggcccagactcctacgggaggtagcagtggggaattttctgcaatgggcgaaagcctgatggagcaatgccgcatggaggtggaaggcctacgggtcgtcaacttcttttctcggagaagaaacaatgacggtatctgaggaataagcatcggctaactctgtgctagcagccgcggtaagacagaggatgcaagcgttatccagaatgattgggcgtaaagcgtctgtaggtggcttttcaagtccaccgtcaaatcccagggctcaaccctggacaggcggtggaaactaccaagctggagtacggtaggggcagagggaatttccggtggagcggtgaaatgcattgagatcggaaagaacaccaacggcgaaagcactcttctgggccgacactgacactgagagacaaaagctaggggagcaaatgggattagagaccccagtagtcctagccgtaaacgatggatactaggtgctgtgcgactcgacccgtgcagtgttgtagctaacgcgttaagtatcccgcctggggagtacgttcgcaagaatgaaactcaaaggaattgacgggggcccgcacaagcagtggagcatgtggtttaattcgatgcaaagcgaagaaccttaccagggcttgacatgccgcgaatcctcttgaaagagaggggtgcccttgggaacacggacataggtggtgcatggctgtcgttagctcgtgccgtaaggtgttgggttaagtctcgcaacgagcgcaaccctcgtgtttagttgccactatgagtttggaaccctgaacagaccgtcggtgttaagccggaggaaggagaggatgaggccaagtcatcatacccctt

SEQ ID NO: 6755 - DNA, 1064 bp, Zea mays
  Zm_smallRNAprecursor_2244
caagattccccggaaccacaagaatccttagaatgggattccaactcagcaccttttgttttgggattttgagaagagttgctctttggagagcacagtacgatgaaagttgtaagctgtgttcgggggggagttattgcctatcgttgtcctctatggtagaacccatcggggaggcctgagaggcggtggtttaccctatggcagatgtcagcgattcgagtccgcttatctccagcttagcggatactatgatagcaccaaaggttgccaatttgtcagttcgatctatgatttcgcattcatggacgttgataagatccttccatttagtagcaccttaggatggtagagccttaacgttaatggcgaggttcaaaagaggaaaggcttgcggtggatacctaggcacccagagacgaggaagggcgtagcaagcgacgaaatgcttcggggagttgaaaataagcatagatccggagattcccaaataggtcaaccttttgaactgcctgctgaatccatgagcaggcaagagacaacctggcgaactgaaacatcttagtagccagaggaaaagaaagcaaaagcgattcccgtagtagcggcgagcgaaatgggagcagcctaaaccgtgaaaacggggttgtgggagagcaatacaagtgttgtgctgctaggcaaagcggttgagtgtcgtaccctagatggctaaagtccagtagccgaaagcatcactagcttacgctctgacccgagtagcatggggcacgtggaatcccgtgtgaatcagcaaggaccaccttgcaaggctaaatactcctgggtgaccgatagcgaagtagtaccgtgacagaaaggtgaaaagaacccccagtgggtagtgaaatagaacgtgaaaccatgctgagctcccaagcagtgggaggggaaagtgatctctgactgcgtgcctgttgaagaatgagccggcgactcataggcagtggcttggttaagggaatggaacccaccggagctgtagcgaaagcgagtcttcatagggcgattgtcactgcttatgg

SEQ ID NO: 6756 - DNA, 1063 bp, Zea mays
  Zm_smallRNAprecursor_2245
gtgcctgttgaagaatgagccggcgactcataggcagtggcttggttaagggaatggaacccaccggagctgtagcgaaagcgagtcttcatagggcgattgtcactgcttatggacccgaacctgggtgatctatccatgaccaggatgaagcttggatgaaactaagcagaggtccaaactgattgatgttgaagaatcagcggatgagttgtggttaggggcgaaatgccactcgaacccacagctagctgattctccccgaaatgcgttgaggcgcagcagttgactggacatctaggggtaaagcactgtttcgatgcgggctacgcgagcggtaccaaatcgaggcaaactctgaatactagatatgacccaaaaataataggggtcaaggtcggccagtgagacgatgggggataagcttcatcgtcgagagggaaacagcccagatcaccagctaacgcccctaaatgaccgctcagtgataaaggaggtgggggtgcaaagacagccaggaggtttgcctagaagcagccaccctttaaagagtgcgtaatagctcactgatcgagcgcccttgcgctgaagatgaacggggctaagcgatctgccgaagatgtgggatgtcaaaatgcatcggtaggggagtgttccgccttagagggaagcaaacgtgaaagcgggggtcgacgaagcggaagcgggaatgtcggcttgagtaacaaaaacattggtgagaatccaatgccccgaaaacccaaggtttcctccacaaggttcgtccacggagggtgagtcagggcctaagatcaggccaaaaggcgtagtcgatggacaacaagtcaatattcctgtactaccccttgttggtacggagggacggaggaggctaggttagccgaaagatggttataggtttaaggacacaaggtgaccctgcttttttagggtaagaaggggtagagaaaatgcttcgagctgaggtccaagtaccaagcgctgcagcgctgaagtatgagccccgtggactagccattgcttctccacgaggctcatacca

SEQ ID NO: 6757 - DNA, 1086 bp, Zea mays
  Zm_smallRNAprecursor_2246
taaggttgattctgtaattatacatgcatcatgctaagaactatactaatcaaattttcccccttagaaaatgccgtcgcgcacaaggagaatagcgcgcaaacatactggaccgattggtgtgccgagtcaccagctggccccaaggcatgataatagtagtagcggaagaaatgatcctataggggatctcaaagctgaagtaagtcggctccaagcggaacttcaccgcaggacggctatatgggtcgtagatggcgaccgcataaatgagttgagaagagacgtccgccatctacgagattagctcgcggaccgggatttggcactcgactgggttgttcaatctcgttcgcttgcatcggacaaggagcaaaaagctcaagctcgagtagccgagctcaacttggtcgttgatgaactgcagacatattgcaataccttacatgaagaggttcatgtattatattcgcaactgcatcccagtgagcctacgaatcctgttgagtcggaagccggaccctcgcatgttgcaggacacgcttggtggtgagttagacctttttcagccccctccttctatgaggctggtcgacgaatggtctcccacacccgacgacgaggccgccaaaagcaacggaaagcaggaatagtggtgtagtaatagaaatagatgtagtgtattgtataacaggttgtactactgtataataggtagtgtatttgtataataggtaatgtatcctgttgtaaaaaaatccgagtctgtacattactctttttggtaatgtaaaatggaaggtttttctttggcatatcatattgtttccaaatgttgttgccacagatgtcgtccaagacccgatcacaggatgcagctggaacttccagtgggagggagtctaccccaaatccacctcctgttcctcccacactggccgaggcgattgccgccttggtaaatgcaaccgcggataatacccgttttctgagagagatggcgggtcaacagtttccacaacaaggcgggcggggttatcaacagggtccccgtgaaacctcttacttggacttctcagagacgca

SEQ ID NO: 6758 - DNA, 1090 bp, Zea mays
  Zm_smallRNAprecursor_2247
ccactacatatgaagctgctatgaggagtgcaaattcatccaaatggttatcatccatggaagatgaattagaatccatgagaatgaacaaagtttgggacttagaagtcattccccatggagccaaaacaataggctgtaaatgggtctacaagacaaagcgtgaatccagagggaacatagaaagatacaaggctagacttgtggccaaagggttcacatagagagaaggcattgactaccatgaaaccttctcacctgtctcaacaaaagattcattcaggatcataatggcactagttgctcattttgatctagagctccatcagatggatgtaaagacagcattcctaaatggagagttagaagaaaatgtgttcatgacacaaccaaagggttttgttgtgagcggtaaagaacacatgggatgtcacttgacgaggtccatttatggattaaaacaggccttcagacagtggtacatcaagttttgatcagactataagaaagtttggtttcgaggaaacaaggaagacatgcattatgcaaagtttagaaaaggaaagtatatcttccctgttctgtatgtcgatgacatactcttagctagtagtgataaggatctactagcggaaacaaaagggtttctttccttgaattttgatatgaaagacatgggagaagcctcttatgttcttggaatagaaattcacagagataaacaaaaggaatattaggactctcacagaagtcatatatagaaaatgtactaaagaggtataatatgcacaagtgtaatgcctcgcctggtccaatagtcaagggtgataagtttggggaatatcagtgtcccaagaatcagtatgagaaaaacaagatgaagtcagtaccatatgcttcagctatcggaagcattatgtatgctcaagtatgtactcgccctgacttagcttttaccaccgggatgcttggacgctatcagaagaatccaggcatagaacactggaaagcagtcaagaaggctctaaggtaccttcaaggtactaaaggtctcatgcttacgtacagaagatctaattccctacaaata

SEQ ID NO: 6759 - DNA, 1154 bp, Zea mays
  Zm_smallRNAprecursor_2248
cagagtagccaaataaatcgaaaaaggagcccttaggataccagagacctagattttgtgtgtgaactagatatctcaaaattctcttaacggccactaagtgacactcttttgggtgagcttgaaaacgggcacacatgcacacactaagcatgatatctggcctagatgcacataaatatagtagagatcctatcattgatttataaagcttttgatctatagttttaccttcttcatttaagtcgagatgaccacttgaagccattggtgtcttggcttgctttgccttttccatgccaaactttttgagcatgtcttgtgtgtacttggtttggcacagaaaagttccttccttgagttgtttaacttgaaaacccaggaagtacttgagctcacccatcatggacatctcaaacctatttgtcataaccctactaaattcctcacaaaaagtttcatcagtactgccaaatataatgtcgtcgacatatatttgacaaacaaataattgattgtcaactttgcgagtgaataaagtagagtctacttttcctatttcaaaactatttttaagcaagaaatctttaaggcaatcataccaagctctaggggcttgtttaagcccgtagagtgccttgtgaagtaggtaaacatggtttggcttctttggatcttcaaagcccggtggttgctccacatagaccctttcttgtagtggtccatttaaaaaagcgctcttgacatccatttgatataacttgaaatcatggttagtagcataagcaattaatattctaattgactctaaccttgctaccggcgcatatgtttcaccaaaatcaagtccttccacttgagtgtagccttgggcaaccaaccatgctttgtttcttgtaaccacgccatgttcatcttgtttgttcctaaagaccgattttgtcccaatcacattttgtttgggtctttggactaaggaccaaacttcattccgggtgaagttgttcaactcctcttgcatggcaattatccaatccggatcacccaatgcttcttcaaccttaagtggctcaagagaggaaacaaacaagtaaaattcacaaaaattagctaaacgagatcgagttgttacccctctcctgatgctacccagg

SEQ ID NO: 6760 - DNA, 1041 bp, Zea mays
  Zm_smallRNAprecursor_2249
aatgttaaggtcataattatatttctacctggttgcgtcccgtgtctataaatatatgaacagtaccaccgtactgttcacgctggattgtaatcgctctcgtgtcaacaccttcaaacaagccgaaggtatcaatgtaatctctactactctataagaatacaatgtaggtgtccacatggtgcacggttctgcctctcccccacccattctgtctcgtaacgcccgtcccacagtccctgcccccgtcgccctgctctcgatgccccagcggcgtcttcatcctcgccaacgcccccgcccctgcctgccctgtgaccttcactgccgcgtcttcatcccctcgtgcccccgaccgaattttttgtattttagcccttaaacagaagtaaaatcacgtttagacctaaaaaaattttaaatgcagttttggaccctttgctcggcgccatagcctatggcgccgagctaacacagctcggcgccataggctatggcgccgaggtcgtgttgcgttggcacaccccagacgcgtggcgtcgacgtggaaccgagctcggcgccacagatcttggcgccgagctcggttgtgttattacaatgtttgttgcgaacatgagcacaaagcccatctagcccacttggtagagcacaaggcttctaaccatgtggtcgtgggttcaagccccatagtttgcattttttttgttttttttgtttatgtcgttggtgtgtccgcttaaatttatttctcgcctagatttttgtttatcttccaggtgcactcgatgatgctgccattacagagtcattagaactacacaaaattaagagccgccaatgggcgattttcaaaacatctgcaataaagggagaggggctcttcgaaggtttggactggtaagtggggtcaaattttcatgtcctaagcgatgtttctgcaagatatgacaagtggatgaatgtctttaataaaccattcgtatcatcagttaaaatagttcttcatacattatcaagtagtggctgtactgtccgtcg

SEQ ID NO: 6761 - DNA, 1041 bp, Zea mays; identical to SEQ ID NO: 6760
  Zm_smallRNAprecursor_2250

SEQ ID NO: 6762 - DNA, 1042 bp, Zea mays
  Zm_smallRNAprecursor_2251
aatgttaaggtcataattatatttctacctggttgcgtcccgtgtctataaatatatgaacagtaccaccgtactgttcacgctggattgtaatcgctctcgtgtcaacaccttcaaacaagccgaaggtatcaatgtaatctctactactctataagaatacaatgtaggtgtccacatggtgcacggttctgcctctcccccacccattctgtctcgtaacgcccgtcccacagtccctgcccccgtcgccctgctctcgatgccccagcggcgtcttcatcctcgccaacgcccccgcccctgcctgccctgtgaccttcactgccgcgtcttcatcccctcgtgcccccgaccgaattttttgtattttagcccttaaacagaagtaaaatcacgtttagacctaaaaaaattttaaatgcagttttggaccctttgctcggcgccatagcctatggcgccgagctaacacagctcggcgccataggctatggcgccgaggtcgtgttgcgttggcacaccccagacgcgtggcgtcgacgtggaaccgagctcggcgccacagatcttggcgccgagctcggttgtgttattacaatgtttgttgcgaacatgagcacaaagcccatctagcccacttggtagagcacaaggcttctaaccatgtggtcgtgggttcaagccccatagtttgcattttttttgttttttttgtttatgtcgttggtgtgtccgcttaaatttatttctcgcctagatttttgtttatcttccaggtgcactcgatgatgctgccattacagagtcattagaactacacaaaattaagagccgccaatgggcgattttcaaaacatctgcaataaagggagaggggctcttcgaaggtttggactggtaagtggggtcaaattttcatgtcctaagcgatgtttctgcaagatatgacaagtggatgaatgtctttaataaaccattcgtatcatcagttaaaatagttcttcatacattatcaagtagtggctgtactgtccgtcga

SEQ ID NO: 6763 - DNA, 1042 bp, Zea mays; identical to SEQ ID NO: 6762
  Zm_smallRNAprecursor_2252

SEQ ID NO: 6764 - DNA, 1043 bp, Zea mays
  Zm_smallRNAprecursor_2253
aatgttaaggtcataattatatttctacctggttgcgtcccgtgtctataaatatatgaacagtaccaccgtactgttcacgctggattgtaatcgctctcgtgtcaacaccttcaaacaagccgaaggtatcaatgtaatctctactactctataagaatacaatgtaggtgtccacatggtgcacggttctgcctctcccccacccattctgtctcgtaacgcccgtcccacagtccctgcccccgtcgccctgctctcgatgccccagcggcgtcttcatcctcgccaacgcccccgcccctgcctgccctgtgaccttcactgccgcgtcttcatcccctcgtgcccccgaccgaattttttgtattttagcccttaaacagaagtaaaatcacgtttagacctaaaaaaattttaaatgcagttttggaccctttgctcggcgccatagcctatggcgccgagctaacacagctcggcgccataggctatggcgccgaggtcgtgttgcgttggcacaccccagacgcgtggcgtcgacgtggaaccgagctcggcgccacagatcttggcgccgagctcggttgtgttattacaatgtttgttgcgaacatgagcacaaagcccatctagcccacttggtagagcacaaggcttctaaccatgtggtcgtgggttcaagccccatagtttgcattttttttgttttttttgtttatgtcgttggtgtgtccgcttaaatttatttctcgcctagatttttgtttatcttccaggtgcactcgatgatgctgccattacagagtcattagaactacacaaaattaagagccgccaatgggcgattttcaaaacatctgcaataaagggagaggggctcttcgaaggtttggactggtaagtggggtcaaattttcatgtcctaagcgatgtttctgcaagatatgacaagtggatgaatgtctttaataaaccattcgtatcatcagttaaaatagttcttcatacattatcaagtagtggctgtactgtccgtcgat

SEQ ID NO: 6765 - DNA, 1043 bp, Zea mays; identical to SEQ ID NO: 6764
  Zm_smallRNAprecursor_2254

SEQ ID NO: 6766 - DNA, 1041 bp, Zea mays
  Zm_smallRNAprecursor_2255
taacacgctcaaatctggaagcagctaaggagcctccgcctcgtcatgaatcatttgctggaggctaaagaatagccgatgcttgcaagtcagcgcgcaaatcccattctctttgttttaactccagaagttctacaccgccatcaattatctgtaaagtgcgtgttaaattttttggatactacattagatgtacccccaggttgagatcaagaataggtctgtggcaacttcagtgtaagtataggtaaattatataagctgaactgacttcagtgacaaaacaaagataaaaaaaatctaggcgagaaataaatttaagcggacacaccaacgacataaacaaaaaaaacaaaaaaaatgcaaactatggggttgaacccacgaccacatggttagaaaccttgtgctctaccaagtgggctagatgggctttgtgctcatgtctgcaacaaatattttaataacacaaccgagctcggcgccaagatctgtggcgccgagctcggttccacgtcgacgccacgcgtctggggtgtgccaacgcaacacgacctcggcgccatagcctatggcgccgagcaaagggtccaaaactgcatttaaaatttttttaggtctaaacgtgattttacttctgtttaagggctaaaatacaaaaaaaattcggtgcccccgacaaacccgctccgaccccctgacagcagagtgtttggccccggcctctgcctgctatcgctggcggacatctccgagttcgacgcccagatcaaggagaagggcgcgagacgctggacaaactcccctggtcggagtcgaagctggggcggctggtgcacgtgctggtgtacgacgctagatgaactctcccggtcggagtcgaatcactcgcaaatcgcctcgcgtcccactcgcaggggcaggcaatgaggctagcgcatggtccaaactctctctctctctctcttcactcctggtgccgtgaccttcgatctcggtacatgacagctcttccggatgcaggaaaaagtctacgtttcg

SEQ ID NO: 6767 - DNA, 1040 bp, Zea mays
  Zm_smallRNAprecursor_2256
aacacgctcaaatctggaagcagctaaggagcctccgcctcgtcatgaatcatttgctggaggctaaagaatagccgatgcttgcaagtcagcgcgcaaatcccattctctttgttttaactccagaagttctacaccgccatcaattatctgtaaagtgcgtgttaaattttttggatactacattagatgtacccccaggttgagatcaagaataggtctgtggcaacttcagtgtaagtataggtaaattatataagctgaactgacttcagtgacaaaacaaagataaaaaaaatctaggcgagaaataaatttaagcggacacaccaacgacataaacaaaaaaaacaaaaaaaatgcaaactatggggttgaacccacgaccacatggttagaaaccttgtgctctaccaagtgggctagatgggctttgtgctcatgtctgcaacaaatattttaataacacaaccgagctcggcgccaagatctgtggcgccgagctcggttccacgtcgacgccacgcgtctggggtgtgccaacgcaacacgacctcggcgccatagcctatggcgccgagcaaagggtccaaaactgcatttaaaatttttttaggtctaaacgtgattttacttctgtttaagggctaaaatacaaaaaaaattcggtgcccccgacaaacccgctccgaccccctgacagcagagtgtttggccccggcctctgcctgctatcgctggcggacatctccgagttcgacgcccagatcaaggagaagggcgcgagacgctggacaaactcccctggtcggagtcgaagctggggcggctggtgcacgtgctggtgtacgacgctagatgaactctcccggtcggagtcgaatcactcgcaaatcgcctcgcgtcccactcgcaggggcaggcaatgaggctagcgcatggtccaaactctctctctctctctcttcactcctggtgccgtgaccttcgatctcggtacatgacagctcttccggatgcaggaaaaagtctacgtttcg

SEQ ID NO: 6768 - DNA, 1088 bp, Zea mays
  Zm_smallRNAprecursor_2257
taaggttgattctataattatacatgcatcatgctaagaactatactaatcaaattttcccccttagaaaatgccgccgcgcacaaggagaacagcgcgcaaacatactggaccgattggtgtgccgtgtcaccagctggccccaagacatgataatagtagtagcggaagtaacgatcctatagaggatctcgaagcagaagtaagtcggctccaagcggaactccgccgcaggacggctatatgggtcgtagatggcgaccgcataaatgagttaagaagagacgtccgccatctgcgagatcagctcgcggaccgggatttggcactcgactgggttgttcaatctcgttcgcttgcatgggccaaggaggaaaaggctcaagctcgagtagccgagctcaacttggccgttgaagacctgcagacatattgcaataccttacatgaagaagttcatgtattatattcgcaactgcatcccagtgagcctacgaatcctgttgagtcggaagccggaccctcgcatgttgcgggacaagcgcttggtggtgagttggacctttttcagccccctccttccatgaggctggtcgacgaatggtctcccacacccaacgacgaggctgccaaaagcaaccggaagcaggaatagtggtgtagttgaaatagaagtagtgtattgtataataggttgtactattgtataataggtagtgctattgtataataggtaatgtatcctgttgtaaaaatctgagtctgtaacattactctttttggtaatgtaaaatggatggtttttctttggcatatcatattgtttccaaatgttgttgccacagatgccgtccaagacccgatcacaggatgcagctggaacttccagtgggagggagtctaccccaaatccacctcctgttcctcccacacttgccgaggcgattgccgccttggtaaatgcaaccgcagataatacccgttttctgagagagatggcgggtcaacagtttcaacagcaaggcgggcagggttatcaacagggtccccgtgaaacctcttacttggacttctcagagacgcgacca

SEQ ID NO: 6769 - DNA, 1064 bp, Zea mays; identical to SEQ ID NO: 4679
  Zm_smallRNAprecursor_2258

SEQ ID NO: 6770 - DNA, 1063 bp, Zea mays; identical to SEQ ID NO: 4680
  Zm_smallRNAprecursor_2259

SEQ ID NO: 6771 - DNA, 1075 bp, Zea mays
  Zm_smallRNAprecursor_2260
tggagacgttgatccgcgttgatccgcattgatccgctccaggccgtaatcgacgttggcctcgaggaaccccccatggatgaacaccgagtcgcccactacaagcacggtagggaggtcggctaggaaccagcgcgaaatggacccgttgggtcgaagggcggcgaggcgggaccacatcccgtcccagaactccggcttgacgccggggaaggacttgggcatgccgagaaaggggctcctcggctgctggtcaaggtgctcgccgcagcggcgcttgatggcgagcaccgcgcggtaccaccctgcccaggcgcgcggtgaggcgttcaagtggacgcggggtggcggcgggcaagtagcggcgggctggcggcgaggcaggtagggaaaagaagatagacgcgcggggtgggagagatttaggtttttggttaagttcgacggtgtccacgtggcccacgaatttaagttaagaacgtgggtactcacgttcctaatacgataagttcgacggttttaccgcgagcccacgaatttaatataagaacgtgggtacccacgttcttaaattaacccacgaacataactcaattaagaacgtcggtacccacgttcttaaattaacccacgaacatttattagtttcttgtagtgattggagtctttgcaggcttggcgtccttcatcccaaaccgctttagcaagtcttgcgtgtactttgtttgggagatgaaggtgccgtccttgagttgcttcacttggaatccaaggaagtagttcaactcgcccatcatcgacatctcgaatttctgtgtcatcaccctgctaaactcttcacaagacttttgattagtagaaccaaatattatgtcattgacataaatttggcacacaaaaagatcaccatcacaagtcttagtgaataaagttggatcggctttcctaaccttgaaagcattagcaagtaaaaagtccctaatgcattcataccattctcttggggcttgcttaagtccatacagcgccttatagagcttacacacctggtcggggtaccgttcatcctcgaagc

SEQ ID NO: 6772 - DNA, 1041 bp, Zea mays
  Zm_smallRNAprecursor_2261
gagtggctaggggccaccaaagtagtttgcaatgaaattcttggtaactaccttgtcaaagaggaccgagcaatgacagcagccttcggaactcgagaaaaatgaaggctgaacaaagtcatggatgcactggaatttgaatatcctaattatcaaaactggctaaatatatcgacataggaataaagaggaaaagaatcatcaattatgcagagggaggcactaggatggtaaaagccaaggggcaaaaacaaaagatgaccaaaaaatcgaaggtggcaagtgatgatgatgaggggtcctctcactcaaaatcgaacaccccacctaaaaaggaagaaggcagtcacatgtacgaattttttatatttttagccatttttcggaaaaaaattcacgtttagatcttaaaaaaatttaatgtcatttttggaccctttgctcggcgccatagcctatggcgccgaagtaacacagctcggcgccataggctatggcgccgaggtcgtgttgcgttggcacaacacggacgcgtggcgtcgacgtggaaccgagctcggcgccacagatcttggcgccgagctcggttgtgttattaacatatttgttgcagacatgcgctcaaagcccatctagcccacttggtggagcacaagacttctaaccttgtggtcgtgggttcaaaccccacagtttgcatttttatttgttctttttttgtttatgtcgctggtgtgtccgttcaaatttatttctcgcctagatttttttatctagccactactcattttttttaaataactcattaggtatattttttttttgtcttggggcttttgctgccagcacaaaagcgtccatgcacgaactcatttcctagcttccaaaaataaacgtgtgcactgtgcagtaaagcccgcaaagcaataaagcacatggacctggttatttggttaagcacatgggtgtgattcgatattgttcaaacaattccatggaatcaattatagcactttttaattcctaaaaaataaagtgaaa

SEQ ID NO: 6773 - DNA, 1041 bp, Zea mays; identical to SEQ ID NO: 6772
  Zm_smallRNAprecursor_2262

SEQ ID NO: 6774 - DNA, 1042 bp, Zea mays
  Zm_smallRNAprecursor_2263
gagtggctaggggccaccaaagtagtttgcaatgaaattcttggtaactaccttgtcaaagaggaccgagcaatgacagcagccttcggaactcgagaaaaatgaaggctgaacaaagtcatggatgcactggaatttgaatatcctaattatcaaaactggctaaatatatcgacataggaataaagaggaaaagaatcatcaattatgcagagggaggcactaggatggtaaaagccaaggggcaaaaacaaaagatgaccaaaaaatcgaaggtggcaagtgatgatgatgaggggtcctctcactcaaaatcgaacaccccacctaaaaaggaagaaggcagtcacatgtacgaattttttatatttttagccatttttcggaaaaaaattcacgtttagatcttaaaaaaatttaatgtcatttttggaccctttgctcggcgccatagcctatggcgccgaagtaacacagctcggcgccataggctatggcgccgaggtcgtgttgcgttggcacaacacggacgcgtggcgtcgacgtggaaccgagctcggcgccacagatcttggcgccgagctcggttgtgttattaacatatttgttgcagacatgcgctcaaagcccatctagcccacttggtggagcacaagacttctaaccttgtggtcgtgggttcaaaccccacagtttgcatttttatttgttctttttttgtttatgtcgctggtgtgtccgttcaaatttatttctcgcctagatttttttatctagccactactcattttttttaaataactcattaggtatattttttttttgtcttggggcttttgctgccagcacaaaagcgtccatgcacgaactcatttcctagcttccaaaaataaacgtgtgcactgtgcagtaaagcccgcaaagcaataaagcacatggacctggttatttggttaagcacatgggtgtgattcgatattgttcaaacaattccatggaatcaattatagcactttttaattcctaaaaaataaagtgaaac

SEQ ID NO: 6775 - DNA, 1042 bp, Zea mays; identical to SEQ ID NO: 6774
  Zm_smallRNAprecursor_2264

SEQ ID NO: 6776 - DNA, 1043 bp, Zea mays
  Zm_smallRNAprecursor_2265
gagtggctaggggccaccaaagtagtttgcaatgaaattcttggtaactaccttgtcaaagaggaccgagcaatgacagcagccttcggaactcgagaaaaatgaaggctgaacaaagtcatggatgcactggaatttgaatatcctaattatcaaaactggctaaatatatcgacataggaataaagaggaaaagaatcatcaattatgcagagggaggcactaggatggtaaaagccaaggggcaaaaacaaaagatgaccaaaaaatcgaaggtggcaagtgatgatgatgaggggtcctctcactcaaaatcgaacaccccacctaaaaaggaagaaggcagtcacatgtacgaattttttatatttttagccatttttcggaaaaaaattcacgtttagatcttaaaaaaatttaatgtcatttttggaccctttgctcggcgccatagcctatggcgccgaagtaacacagctcggcgccataggctatggcgccgaggtcgtgttgcgttggcacaacacggacgcgtggcgtcgacgtggaaccgagctcggcgccacagatcttggcgccgagctcggttgtgttattaacatatttgttgcagacatgcgctcaaagcccatctagcccacttggtggagcacaagacttctaaccttgtggtcgtgggttcaaaccccacagtttgcatttttatttgttctttttttgtttatgtcgctggtgtgtccgttcaaatttatttctcgcctagatttttttatctagccactactcattttttttaaataactcattaggtatattttttttttgtcttggggcttttgctgccagcacaaaagcgtccatgcacgaactcatttcctagcttccaaaaataaacgtgtgcactgtgcagtaaagcccgcaaagcaataaagcacatggacctggttatttggttaagcacatgggtgtgattcgatattgttcaaacaattccatggaatcaattatagcactttttaattcctaaaaaataaagtgaaacg

SEQ ID NO: 6777 - DNA, 1043 bp, Zea mays; identical to SEQ ID NO: 6776
  Zm_smallRNAprecursor_2266

SEQ ID NO: 6778 - DNA, 1041 bp, Zea mays
  Zm_smallRNAprecursor_2267
ggggtaaaaaaacaactctaggtctctctgcagaaacaaacaccacgtaggtttttccaccaattgacgatatggtcgtcttttttttcttgaaaaaaggaagaaagaacaacatgaaggaaggaatgaagtgccatcacatgagacggcagagaatcggtgaaataaagtgaaacaggccgtgtggtggggtggaccgaattttttgtattttagccatttttcgaaaaaacccaagaaaaaaaatatacctaatgagttatttaaaaaatgagtagtgacaaagataaaaaaatctaggcgagaaataaattttagcggacacaccagcgacataaacaaaagaaaaacaaataaaaatgcaaactatggggcttgaacccatgaccataaggttagaagctttgtgctctaccaagtgggctagctgggctttatgctcatgtttgcaacaaatattttaataacacaaccgagctcggcgccaagatctgtggcgccgagctcggttccacgtcgacgccacgcgtccgtgttgtgccaacgcaacacgacctcggcgccatagcctatggcgccgagctgtgttactacggcgccatagcctatggcgccgagcaaagggtccaaaaataacattaaaattttttaagatctaaacgtgaatttttttttcgaaaaatggctaaaatacaaaaaattcggtcacatgtaggggtgtaaatggtatggatattgtccgtccgtatttgaaattgacccgtctaagagggatgaaatccgatccgtatcagaatctaggtactcagtatccgatctatatctgatctttatccgtatccgtatttttaaagttggatatttaagttgtcaatatttattcaaatcttattcgatacaacttgataatatccatatccgtttcaaatccgaagagaagatatgaaaacaaatatggaatgagtaatattcgtctgtatccgatccaattacacccctagtcacatgtgctagcaagatagagtaaaggtctacgaaggt

SEQ ID NO: 6779 - DNA, 1040 bp, Zea mays
  Zm_smallRNAprecursor_2268
gggtaaaaaaacaactctaggtctctctgcagaaacaaacaccacgtaggtttttccaccaattgacgatatggtcgtcttttttttcttgaaaaaaggaagaaagaacaacatgaaggaaggaatgaagtgccatcacatgagacggcagagaatcggtgaaataaagtgaaacaggccgtgtggtggggtggaccgaattttttgtattttagccatttttcgaaaaaacccaagaaaaaaaatatacctaatgagttatttaaaaaatgagtagtgacaaagataaaaaaatctaggcgagaaataaattttagcggacacaccagcgacataaacaaaagaaaaacaaataaaaatgcaaactatggggcttgaacccatgaccataaggttagaagctttgtgctctaccaagtgggctagctgggctttatgctcatgtttgcaacaaatattttaataacacaaccgagctcggcgccaagatctgtggcgccgagctcggttccacgtcgacgccacgcgtccgtgttgtgccaacgcaacacgacctcggcgccatagcctatggcgccgagctgtgttactacggcgccatagcctatggcgccgagcaaagggtccaaaaataacattaaaattttttaagatctaaacgtgaatttttttttcgaaaaatggctaaaatacaaaaaattcggtcacatgtaggggtgtaaatggtatggatattgtccgtccgtatttgaaattgacccgtctaagagggatgaaatccgatccgtatcagaatctaggtactcagtatccgatctatatctgatctttatccgtatccgtatttttaaagttggatatttaagttgtcaatatttattcaaatcttattcgatacaacttgataatatccatatccgtttcaaatccgaagagaagatatgaaaacaaatatggaatgagtaatattcgtctgtatccgatccaattacacccctagtcacatgtgctagcaagatagagtaaaggtctacgaaggt

SEQ ID NO: 6780 - DNA, 1068 bp, Zea mays
  Zm_smallRNAprecursor_2269
gaatgaattccgtctcttcccgcctgggcagccgaatgccatgcactcgcatgttgctgccctgaatgtctgcatcagagaagcccagaatatgggcaaaacgacgataactgactttgtgccagttaccctggatgaagaaataaatgactgggtaatcatacccatcggcttcctcatctactttctttatccagagggtggcatagaactgagctaccacctcatcgttccaggggtattccatggtcataatgttacgtaacccctttctctctaagtttacgagagctgacgacatgtcagcatctcccatattctcacaaccctcccagtcaataaatctatgtcggacgactgggtgcttcttggtaagaatgacagaattgtagaagtcagcctggaaaagattccagaaccgagggtcctggacaccaggatgacgaggagtgagggtggggttggtaaacctcagacgctgaagggtttctattcccttctgagtgaagtcgacgggagattcatgcggaccgcggctgacgttcgccggatgcatgtgcagtccggtgacgtagagagcatcaggcgccggaaggtcgatgaagtcgtcgaaagccccatcctcctcttggcagggagcataccctgaggaagacgtgctacgacgaggacgagaggcgccaaccttttggcgtctcccgcgagtcgggctgcgagggcatggaagagccctcgccaggcatccgaccatgagccacgtcctctcttatagagggagcgacgaggcggaggagaggggacgggagattcctcctgaatctcgtcggagtcgctgctaaactcaaccacagaggggttgcgacgacgcaccatgattgaaaaggtggtgaaactgtgaagcggatgaagtatgtggaggagaggctctaaaggttgggaagcgaccaaggcgagagtgaatgaagtgggagaagagaaggggtagagtgaagtatatataggcagttgagctggtcctcaggaccagttcaaccgcccccatgggccagttcagctggttctgaccag

SEQ ID NO: 6781 - DNA, 1150 bp, Zea mays
  Zm_smallRNAprecursor_2270
atacccatcggcttcctcatctactttctttatccagagggtggcatagaactgagctaccacctcatcgttccaggggtattccatggtcataatgttacgtaacccctttctctctaagtttacgagagctgacgacatgtcagcatctcccatattctcacaaccctcccagtcaataaatctatgtcggacgactgggtgcttcttggtaagaatgacagaattgtagaagtcagcctggaaaagattccagaaccgagggtcctggacaccaggatgacgaggagtgagggtggggttggtaaacctcagacgctgaagggtttctattcccttctgagtgaagtcgacgggagattcatgcggaccgcggctgacgttcgccggatgcatgtgcagtccggtgacgtagagagcatcaggcgccggaaggtcgatgaagtcgtcgaaagccccatcctcctcttggcagggagcataccctgaggaagacgtgctacgacgaggacgagaggcgccaaccttttggcgtctcccgcgagtcgggctgcgagggcatggaagagccctcgccaggcatccgaccatgagccacgtcctctcttatagagggagcgacgaggcggaggagaggggacgggagattcctcctgaatctcgtcggagtcgctgctaaactcaaccacagaggggttgcgacgacgcaccatgattgaaaaggtggtgaaactgtgaagcggatgaagtatgtggaggagaggctctaaaggttgggaagcgaccaaggcgagagtgaatgaagtgggagaagagaaggggtagagtgaagtatatataggcagttgagctggtcctcaggaccagttcaaccgcccccatgggccagttcagctggttctgaccagtgtggtcagagaaccagaaacaacagagggaagaaagaaaaatttaaatttgcgcacagctgctggaagtgaccggacagaaaaataataaaaatctgcatgcgcacccctgctgttgaccgggcagcacacaaaaaaactgtgcgcgcagacaagaaatgacttgactctgcatgcacacccagaaaacgattctccactcgcgtgaaggaccagacaggaaaaagtaaaaagcctctgca

SEQ ID NO: 6782 - DNA, 1097 bp, Zea mays
  Zm_smallRNAprecursor_2271
gtgagggtggggttggtaaacctcagacgctgaagggtttctattcccttctgagtgaagtcgacgggagattcatgcggaccgcggctgacgttcgccggatgcatgtgcagtccggtgacgtagagagcatcaggcgccggaaggtcgatgaagtcgtcgaaagccccatcctcctcttggcagggagcataccctgaggaagacgtgctacgacgaggacgagaggcgccaaccttttggcgtctcccgcgagtcgggctgcgagggcatggaagagccctcgccaggcatccgaccatgagccacgtcctctcttatagagggagcgacgaggcggaggagaggggacgggagattcctcctgaatctcgtcggagtcgctgctaaactcaaccacagaggggttgcgacgacgcaccatgattgaaaaggtggtgaaactgtgaagcggatgaagtatgtggaggagaggctctaaaggttgggaagcgaccaaggcgagagtgaatgaagtgggagaagagaaggggtagagtgaagtatatataggcagttgagctggtcctcaggaccagttcaaccgcccccatgggccagttcagctggttctgaccagtgtggtcagagaaccagaaacaacagagggaagaaagaaaaatttaaatttgcgcacagctgctggaagtgaccggacagaaaaataataaaaatctgcatgcgcacccctgctgttgaccgggcagcacacaaaaaaactgtgcgcgcagacaagaaatgacttgactctgcatgcacacccagaaaacgattctccactcgcgtgaaggaccagacaggaaaaagtaaaaagcctctgcatgcacagcccaaaaaaaatttttctgcgcgcgcgaagtgaccggacaggggagacgctgcagtctgcagagcggcagcaacaaaaaaacaaaacactgcgcgcgccaggggaaagtgaccgcacaggggaaaagtagcgccctagcagagtgaatgacctgtctgtctgcagagcggcaacaaataataataaaaaaaacactgcgcgcaggggaagtgaccggagactgtagagc

SEQ ID NO: 6783 - DNA, 1088 bp, Zea mays
  Zm_smallRNAprecursor_2272
taaggttgattctgtaattatacatgcatcatgctaagaactatactaatcaaattttcccccttagaaaatgccgccgcgcacaaggagaacagcgcgcaaacatactggaccgattggtgtgccgtgtcaccagctagccccaagacatgataatagtagtagcggaagtaacgatcctataggggatctcaaagctgaagtgagtcggctccaagcggaactccgccgcaggacggctatatgggtcgtagatggcgaccgcataaatgagttgagaagagacgtccgccatctgcgagatcagctcgcggaccgggatttggcactcgactgggttgttcaatcccgttcgcttgcatgggacaaggagcaaaaagctcaagctcgagtagtcgagctcaactcgaccgttgaagatctgtagacatattgcaataccttacatgaagaagttcatgtattatattcgcaactgcatcccagtgagcctacgaatcctgttgagtcggaagccggaccctcgcatgttgcgggacacacgcttggtggtgagttagacctttttcagccccctccttctatgaggctggtcgacgaatggtctcccacacccgacgacgaggccgccaaaagcaacgggaagcaggaataatggtgtagtagttgaaatagaagtggtgtattgtataataggttgtactattgtataataggtagtgtatttgtataataggtaatgtatcctgttgtaaaaatctgagtctgtaacattacttttggtaatgtataatggaaggtttttctttggcatatcatattgtttccaaatgttgttgccacagatgccgtccaagacccgatcacaggatgcagccggaacttccagtgggagggagtctaccccaaatccacctcctgtttctcccacactggccgaggcgattgccgccttggtaaatgcaaccgcggataatacccgttttctgagagagatggcgggtcaacagtttcaacagcaaggcgggcggggttatcaacagggtccccgtgaaacctcttacttggacttctcagagacgcgacca

SEQ ID NO: 6784 - DNA, 1176 bp, Zea mays
  Zm_smallRNAprecursor_2273
ctctttctctgtggtttatggtcgatttagttccattttggaagttgaacatatatgttcatatagctgcagcacaaaagataaatgtaggcagtgcctattagtttactaatgttatgaagtagtggtttatgattgttgagtgattaatttggacatgattgatgaccatatttatgtgaaaaatatgatccagtaagtatataaaaagtgaaatgcattacagtttatttgaataatatatagtagcacgaagtcatgagcagcacacttgtttcacatcaaaaatatcaacccctacttcataaatgtatgtataattcacatcattgcatatatcttcacccacacaatttgagcatacaatgagtctaaaacaacaggtccgtgaacctttatcaaagctaaaggctctatgataaacaactgaaccataatcgcacaagaacagtaagatcaatgaagaccgttggtgggcatgtaaaaatacctatgggacgcggtggcggaggattgacagcagcggcccggctcgacgacactgtcaacggcggcgccgattagggttgagttcgcgcggagacaaatgaaggcgattcacactgtcggaaggggggaaggagattaggaagttgcattgtaaagcataaatttaaaaaatcaactcgagcaccttggaatccggacgacatagcgaccgcggacgtgagccaatgtgacgcggggcgcgcaagattgacaacggcagcggctcgacgatgctgtcaacagcggcggtgattaatgttgaggtcgtgcggcggtggaggacagcgaaacgcgctggcggcggcggatgaagaagaatcgccctggcgacccctgaagaaacgcggcgagtcggccaggaaggttgaccgcgcgggggttagggtatagaaatgtttgaccgcgtgggaagtggggtagtgggccaattcctttatttctggaacgtgggtcggctgaagtagttatgctaaatcactattatgtataaacggaagaatggaatagcgtaaacatgtgttgactaaggaagatatggttgaccacgtgtaaagtgggcctaagccgctatttctggaacgagggctcgcggttgttactctgtttacgctaaaatgggtttccgtttacgctaaatcagttcgcttg

SEQ ID NO: 6785 - DNA, 1173 bp, Zea mays
  Zm_smallRNAprecursor_2274
ggtcgtggccgagggatgggtgcccgcttggtccatgggattgcagcatttttctctatgtgccggaacatttctactgatgtacatgagctggcaaggcgtcagcgggagactgacgacaatcttcgtcgtcaagcttccactatgggtatgccctttgctcctcgctcgcctgacgtgcctctccatcctcctcccccggagatcaatgagtggcaccggcaggcctacgaggtgccatttatgtcagcagacaaagaagaagaagaagaagcctacattgatgatcgcgagccgtttgccccgcctccctaccattgggatccgggtcaatcatcctctcaccctccgcctccctactcgggttagggacccactcccggtgaccctaggccatccgactttggttaccatcaccaccctccacctccttctcaccatcatacatcttcggcatctgtttttactgcgggtgatgagccccctagggactcctcactcgaggaagacatgatgaggaccttcttccctgactacacatcataccctccatcatatcctccatcctatcctcctcctggaggatattgattcatgtatccttgtctctctctcttcgtttttggtacttgttgccaaaaagggggagaaaatccaaaatttctcatcattctgtttgtggttctttcggttatgtatttcttttggattatttttttgttttggccactgttgtggcttgtatcctcttatcattgtatgaaataaaactgctgggtttttattcaaagtgatatgatggtcttctggccatcatcttttgtcccatcagtttgtaatgattgctttgctatgaagtaaaaatgatgtgtatttagagatagtcatatgcatcacaactcctgttatgacactcttgcacccctcggatggttgtattcagtatggtttttgtcactatctctaaatgtgttgctcacatgacatattatgtcaaaacattggattcacaatcgtgcacacatttagggggagccatctacatacaatcattcaaaagaaattttctattgcaaatgtttatctttttgaccttaattgttttggcatcaatcaccaaaacgggggagattgtaagtgcaatcaaccccaagtgagggttttggtgattta

SEQ ID NO: 6786 - DNA, 1140 bp, Zea mays
  Zm_smallRNAprecursor_2275
atccccggacagtggagacttgagctccgacctacaacctaagtcaagatgtgaacactatggataaaaatgatgttgtattgatgagatgatgaaattagactagatgcaaacagagtctattaaatatttaatctggcgttaaaatattgaaagtaaggactcactttagtaagctatttctgcaaaagtatctaagttgattcttgctaaagcctctccttgattcccaaatccagcatatccttgagagtcttttctttagtcgggtaagtcttgctgagtaattccatactcagggttttattccctgttgtttttcaggttatagttttgtgctgctgttgatggtgttaagtgccggtgggctcggccttcttatataagtataccccgcctttatcttcttattgaggatggtcacttgagctagcatatatttcaaaactataaataatttataaccgttcaaagtttctttctttgaatcaatgtagtaatcactctgatcatgtacgaagtaaaatttttgtaatttgtaaaatttggtaataagatttccgctgcaaaatattggtgtgtgtgatttgtattacttaatcccgcggttctggttgtaagtggtttatccggtgtccgtggggcaatcagacggatcctgttaagttatctggtgcacatgcatggccgtctgagttctttaagacaaggacaggtgcatgtgggcccgataccttgggaggttctgccacatcgtgcttgcgactatcgcgtcgaattagtaagggtaagtaaatttgttattcgtgttagtgggttggtggatggtctgacttggtttaatatttattagattgcctgagtcgttttagtaatttggtcgatgtcgtaggatgaaaaagatctcaataggtctcagtgtttgcgggattgtaggtgttaaaaatgggaagttatattaatatatatatgatacacaggttaatcggtaaatcaaataattaagatacacagtttaaagagttaataaaaagctaggaataaaaatagatgttcgagtgttattatatcaatttggttaatagatgtagtcgatgccctgatgtgatatccataataattaatgcttggtttttagtg

SEQ ID NO: 6787 - DNA, 1095 bp, Zea mays
  Zm_smallRNAprecursor_2276
ccaatctagctagtacgcctagcaataatcagcaccttaggccgagtattttctttagatgaaataaaaaaatggacagaatcccatcctcgattcctcatgaaccatactatctcccaagtccaaccctagcaacggcgccactggcaagaacaaggtaactaggggaccatctcctctatataagcactcttccacggggtagacggtaccaccagaacgggtgtagaagcccagccagtaggataagccctcccagatctggccgggcggccggctgctgccttcttccccaattcgggaaagacgactatgaagatcagtttgtgtagcgtggtttggttcttctctctagctgtatctccttgctcccccgcgcgcgctctctctctctccgtgtccagttcttgttgcgtctgcttggtactgtactttgcagcggtggtcgacgttgggatgatgggggcgctggctggagccagcagctcgacggtgtggctgacagaagagagtgagcacgcatcggccagactgcatctatatacggctgctcctggcgaatggatagatgccaaggcgcagctgctgttgcgtgctcacttctctttctgtcagctccctctcctcctagggacttgttccgccgtatgcatccaccaccgtcccagtagtcccacttccgtccatcgcagcgcgccaatgatgcgtcgtcgtcgtcgtccaggcgcagccgttccccttatcacatcggtcgccgttctctgaggcgcctgccggccttgtcgtgtccctacctgaaaccttatcttgtctcccgctcggatttcgatgacctctgctctttggaataaggtactcttaaaatctcagggaagcttagccgcccagcgcatgtacgccatggacccttgcgctgcgggctgcggctggcaacgtttcttttcttttatcggtgaggtcctcgttgccgtctttgtggcttccgatgatggaattttagccagctccgttccgtccttcaggcttcaaccttgggggaagggacgcgtgaaggtttggttaacttaacacctgtgtctttgctctcctccctag

SEQ ID NO: 6788 - DNA, 1048 bp, Zea mays
  Zm_smallRNAprecursor_2277
gcaactgagcacaacaagcaccagcagctatgtattcagcctcggcagtggaaagtgcaacacagttttgcttcttagagctccaagacaccagggatcgcccaaggaattggcaagtccccgaggtgctttttcgatctactttacaaccagcatagtctgaatcagagtagccaaataaatcgaaaaaggagcccttgggataccagagacctagattttgggtgtgaactagatatctcaaaattctcttaacggccactaagtgacactcttttggttttgcttgaaaacgagcacacatacacacactaagcatgatatctggcctagatgcacataaatatagtagagatcctatcattgatctataaagcttttgatctacagttttaccttcttcatttaagtcgagatgaccacttgaagccattggtgtcttggcgtgctttgccttttccatgccaaactttttgagcatgtcttgtgtgtacttggtttggcacagaaaggttccttccttgagttgtttaacttgaaaacccaagaagtacttgagctcacccatcatggacatctcaaacctatttgtcataaccctactaaattcctcacaaaaagtttcatcagtactgccaaatataatgtcgtcgacatatatttgacaaacaaataattgattgtcaattttgcgagtgaataaagtagagtctacttttcctatttcaaaaccatttttaagcaagaaatctttaaggtaatcataccaagctctaggggcttgtttaagcccgtagagtgccttgtgaagtaggtaaacgtggtttggcttctttggatcttcaaagccaggtggttgctccacatagaccctctcttgtagtggtccatttagaaatgcgctcttgacatccatttgatataacttgaaatcatggttagtagcataggcaattaatattctaattgactctaaccttgctaccggcgcatatgtttccccaaaatcaagtccttccacttgagtgtaaccttgggcaaccaaccg

SEQ ID NO: 6789 - DNA, 1163 bp, Zea mays
  Zm_smallRNAprecursor_2278
gaaacaatcaaacaaatcctctctgtgtgcaaagaaacacggtgagtcatgccgagatcatactcatctgatatacatgcttacagctcacaagacattacaaacaactcatattgcattacaaagatcgtttcatgaaaaataaaataggccggacaggacaaaaatccttgacgtgtaaagtaaatttacaacaaaaaaaagccatatgtcaagctaaatctaattcgttttacgtagatcaacaacctgtagaaggcaacaaaactgagccacgcagaagtacagaatgattccagatgaaccatcgacgtgctacgtaaagagagtgacgagtcatatacatttggcaagaaaccatgaagctgcctacagccgtctcggtggcataagaacacaagaaattgtgttaattaatcaaagctataaataacgctcgcatgcctgtgcacttctccatcaccaccactgggtcttcagaccattagctttatctactccagagcgcagaagaacccgatcgacaccatgagggtgttgctcgttgccctcgctctcctggctctcgctgcgagcgccacctccacgcatacaagcggcggctgcggctgccagccaccgccgccggttcatctaccgccgccggtgcatctgccacctccggttcacctgccacctccggtgcatctcccaccgccggtccacctgccgccgccggtccacctgccaccgccggtccatgtgccgccgccggttcatctgccgccgccaccatgccactaccctactcaaccgccccggcctcagcctcatccccagccacacccatgcccgtgccaacagccgcatccaagcccgtgccagctgcagggaacctgcggcgttggcagcaccccgatcctgggccagtgcgtcgagttcctgaggcatcagtgcagcccgacggcgacgccctactgctcgcctcagtgccagtcgttgcggcagcagtgttgccagcagctcaggcaggtggagccgcagcaccggtaccaggcgatcttcggcttggtcctccagtccatcctgcagcagcagccgcaaagcggccaggtcgcggggctgttggcggcgcagatagcgcagcaactgacggcgatgtgcggcctgcagcagccgactcc

SEQ ID NO: 6790 - DNA, 1121 bp, Zea mays
  Zm_smallRNAprecursor_2279
ttgctaaatttatcccttcgtccatttcatatgcgactgcaggtcgaaccgaaacaaaatacttttccttgcttttgagaaattttttccgttgaacataaacccaatttttccttttttttattctatttgtttttgatgtggaaacagtctttctctacccttgggcaatgagtttcgacgtattgggtgtatccgtttttatcgaagctttcatttttgtgcttatcctagttgttggtttagtttatgcatggcgaaaaggagccttggaatggtcttaactgaatattcagaaaaaaaaagaaggaaaagattccattgagacaattatgagtttgattgagtttccgttactcgaccaaacaagttccaattccgttatttcaactacaccaaacgatctttcaaattggtcaagactctcaagtttatggccccttctatatggtaccagttgttgtttcattgaatttgcttcattaataggctcacgattcgactttgatcgttatggattggtaccaagatcaagtcctagacaagcggacctaattttaacagctggtacggtaacaatgaaaatggctccatctttagtgcgattatatgagcaaatgcctgaaccgaaatacgtcattgctatgggagcctgtactattacagggggcatgttcagtacagattcctatagtactgttcgaggagttgataagttaattcctgtggacgtctacctgccgggttgcccgcctaaaccagaggctgttatagatgccctaacaaaatttcgtaagaagatagcgcgacaatggggatggcatagctgttggatggttaggacatcccgtctttagagataaagaaggacgcgagctttttgtacgtcgtatgcctactttttttgaaacatttccggtcgttttggtagatgaagagggaattgtgagagaggacgttccttttagaagagcagaatccaaatatagtgttgaacaagtaggcgtaacggtggagttctatggtggcgaacttaatggagtaagttattctgatcctgctactgtaaaaaaatatgcgcggcgtgctcaattaggggaaatttttgaattagatcgagc

SEQ ID NO: 6791 - DNA, 1091 bp, Zea mays
  Zm_smallRNAprecursor_2280
attatatgagcaaatgcctgaaccgaaatacgtcattgctatgggagcctgtactattacagggggcatgttcagtacagattcctatagtactgttcgaggagttgataagttaattcctgtggacgtctacctgccgggttgcccgcctaaaccagaggctgttatagatgccctaacaaaatttcgtaagaagatagcgcgacaatggggatggcatagctgttggatggttaggacatcccgtctttagagataaagaaggacgcgagctttttgtacgtcgtatgcctactttttttgaaacatttccggtcgttttggtagatgaagagggaattgtgagagaggacgttccttttagaagagcagaatccaaatatagtgttgaacaagtaggcgtaacggtggagttctatggtggcgaacttaatggagtaagttattctgatcctgctactgtaaaaaaatatgcgcggcgtgctcaattaggggaaatttttgaattagatcgagctactttgaaatcagatggtgtttttcgcagcagtccaaggggttggttcacttttggtcatgctacctttgctttgctcttctttttcggacacatttggcatggcgctcgaaccttgttccgagatgtttttgctggtattgatccagacttggatgctcaagtggaatttggaacattccaaaaagttggagatccaactacaaggagacaggcagcctgataccacattgctatggtatctttcacctccattttttgtttgatttgacatgaggaacatctcctgtcctttctttgactctttttctttttttatatgggaaatgatcccaaatgataagtgaataggtgtggaagttataattgtaaataaaccaggatcgaatctatggaagcattggtttatacgttccttttagtttcgactttagggataatttttttcgctatcttcttccgagaaccacctaaggttccgactaagaaatgaaataatttaattgaagtaagaagaatttctggaccgaaaatcacgtcagagcccaaatttcaaaacaaattaaaaaaaaga

SEQ ID NO: 6792 - DNA, 1071 bp, Zea mays
  Zm_smallRNAprecursor_2281
ttgattttggcttgtgcttggtgagtaggttggtggcctgtttggtcccaatctatcttttagctatgtgccttctcaagacctgaaatgtagcagcaagaacgtcttactgctgtcttgaattgatgcggtgttttttttttttgagagagagggcgttgagatttttgttagtatcaccagtggaactttaaagtgcgcaactatgtgcactttggacctgcatggagctggtgtcttgtgaaactaaaaacacccagacttttcttgtactatttgcttcccacttactatttctctctcatccttactcacatgggaactgtttttatgtcctgaagaagagtgattattttccctggtcttttttttaacgaattggtgggagctctgcctttcaattaagagagggaaaagagttagagtatctgcattttccctggtctgtttggatcccaggaactaaaacaaaagtgactaaagtttagtcacttatgagctaaggattcaaacaggaagagctagaagtgactaaaatgataaaaaatatcaatctagtcacttttagctcttcatgtttggatctttagctctaagtgactaaactttagtcacttttgctttagctcctcggatccaaacaaatcatgtagtttctaaactttcagaagaaaactggattttccatgaaaagctggagcttttttgtgtggtattaggcatgcgtagcaaaatttcagaaagaattggtcccctctagcagttctatcattcatgtattgcttttctagaaatattcatgttgcctgtcatgtatttttgtgacaagtactggtcagaattttgaccttattatcattgtgctgttgagctatccatgcatactacagggaaaagaaatgccttacactttgtattaaacagttacttatttccactaacattttggctggatcaatgttttcggttgcaaatatttggattctgtcattctgaaatgcactaagcctcattgggactagcactattttagcctagataccagaaaaatgagggatagcagtttcactt

SEQ ID NO: 6793 - DNA, 1070 bp, Zea mays
  Zm_smallRNAprecursor_2282
tgtgacattcccattcggtgctcttgctttctctcattgttgtccagtgaaaccgtcttccctcctaagttgcaagctgtaagttgggaattgtagtttgttagaagctgtaaaatggagcaaacatgttttgagagccgcaaggttgtatgctgcttcagaccttcagtgcagctgcccagcttttacagagcggaccgtataagcgtcgaagagaaacatactgcagaaaatttgctaacaacttccacggaaccgaagagagaaaaaaaggaactgtacaacaggggcgtaattgcctgagagaactccactgtgctgactgctgaccacctcagcgaaagctaaccagagcgagcaacggtagctactctgccccctcctaaccatgagcaggagcaattcgacgagtgccaaacgattttttggtgatttagtcagacaccgtcagtacagccccaaaattttgggccaattccctgtatgccactggaaaatatactcattccttgtatgccactggccccacatgtcatagacaccaaaaaatatacctatatgccactcagtggcacacaagggatgagtataaaatctgatggcataccaggaattttctccaaaattttccaccgaatggttccaacaactccccagattaacgtgttgatcagggctgttataaaacccagcctgaaacacatctggaagcccgcttgcccaacaactatacccggctgcagaacaaaagtaacaggttaaaaagcataccaatctcgaagggctatctatatattcaaaagaaggcccgcttgcccacttagaataatagatcttatccgtggtaagtgcttttttttccctttcattatttttagtactaccagatcccatgtgtgattgcagagggagaccaaaaattttaatcggcagggttagtaatttgagctgaagaagagccagcattttcagggagagggaaaaaaaagaaattacctccaaagtatactgcagcctgcccactactataatgagtgattgcaccgaacagatttgtgttaaatgccaaa

SEQ ID NO: 6794 - DNA, 1126 bp, Zea mays
  Zm_smallRNAprecursor_2283
attcagagatgaaaatatgtaacaacccctaaatatactcacataactaatgcaatcatatcccggatcaaccagacaagagctatcttaaggatggatgctatattggagcaaaaccaaggaaggtatgaccgctcctgctatggactaaaccgatggcctaagcactagttgagaagggctccagattctcaacacaataggactcttcagttttcctgagaagccatttggtgaagcatactcatatgaaaaattctaatgtgaagttgaaactctaaagtaaacagaatataatctatggaaccagattatgaccggttgcaaaacaattggtgatctggtggaagtcttagcttttataaagttcatttctgtagagtttgtttaaaagaataaactctgatagtctgattacaaagttgtcaaatacaattatacaacatatactattatttttcagttggcatgagaactattaacattcttcttgctaaagtttgtgcacgtatttttttaaaataacacaactaacaatagtagagaacatatttttaaaatattaagcaacaggcgtatgaggcactgaagctacaacataatgaaaaatccgtacctctgaaagtgactgaatatatgcagaaagaggttcgccagtacgagaaattatattaacaagcaacccagtgcaatcaacaagaacaatcctttcctttagaagcttctggtcattccatttgaacctttctcccatctcaagacaaatgaaaacctcagtatacgctcattgataatgtcaaactcatctttcttattactgccatttatcttcgaggaacaacccccacagatcttcccctaagcagccagtagtaaaaccgcagactggataagttttacattctcaatgtagttccagagctcttcaagtagattatttgttttttcagcaagaagtctaattgtatccatgaagatcttctgtaaaacaacaagtaacacaaatctaagtgttatgtagaatttgtatgcaagcaagtagtgttgaataactttaaatgtattacttcatcttctcctatcaaagtaatgatggcttagaaacattctccaaggcaagggaaaa

SEQ ID NO: 6795 - DNA, 1191 bp, Zea mays
  Zm_smallRNAprecursor_2284
ttgcaaaacaattggtgatctggtggaagtcttagcttttataaagttcatttctgtagagtttgtttaaaagaataaactctgatagtctgattacaaagttgtcaaatacaattatacaacatatactattatttttcagttggcatgagaactattaacattcttcttgctaaagtttgtgcacgtatttttttaaaataacacaactaacaatagtagagaacatatttttaaaatattaagcaacaggcgtatgaggcactgaagctacaacataatgaaaaatccgtacctctgaaagtgactgaatatatgcagaaagaggttcgccagtacgagaaattatattaacaagcaacccagtgcaatcaacaagaacaatcctttcctttagaagcttctggtcattccatttgaacctttctcccatctcaagacaaatgaaaacctcagtatacgctcattgataatgtcaaactcatctttcttattactgccatttatcttcgaggaacaacccccacagatcttcccctaagcagccagtagtaaaaccgcagactggataagttttacattctcaatgtagttccagagctcttcaagtagattatttgttttttcagcaagaagtctaattgtatccatgaagatcttctgtaaaacaacaagtaacacaaatctaagtgttatgtagaatttgtatgcaagcaagtagtgttgaataactttaaatgtattacttcatcttctcctatcaaagtaatgatggcttagaaacattctccaaggcaagggaaaaaacagttactaataacaatttttgtatattttattgaagaatcatagttttttgctataacaacatgcactaacacatgaatacagaagattaacaacggtaaactttactttatctaacaagtggagataaatgatgctcagcctttagtatcactaattcaatataacacctgtcttatatctatggcatgactaaaattacattttatgtcatgtgacataagaagagcttcgtacatagaagagaagcgaaacgaaccatttcaggtaaacacagcagatggataagcttgtagacataataatttaaattacgctgatagaaagattgtcctctagatacttatgcatgcaagtattcaaaactataacatggagcggaag

SEQ ID NO: 6796 - DNA, 1044 bp, Zea mays
  Zm_smallRNAprecursor_2285
tttctgtagagtttgtttaaaagaataaactctgatagtctgattacaaagttgtcaaatacaattatacaacatatactattatttttcagttggcatgagaactattaacattcttcttgctaaagtttgtgcacgtatttttttaaaataacacaactaacaatagtagagaacatatttttaaaatattaagcaacaggcgtatgaggcactgaagctacaacataatgaaaaatccgtacctctgaaagtgactgaatatatgcagaaagaggttcgccagtacgagaaattatattaacaagcaacccagtgcaatcaacaagaacaatcctttcctttagaagcttctggtcattccatttgaacctttctcccatctcaagacaaatgaaaacctcagtatacgctcattgataatgtcaaactcatctttcttattactgccatttatcttcgaggaacaacccccacagatcttcccctaagcagccagtagtaaaaccgcagactggataagttttacattctcaatgtagttccagagctcttcaagtagattatttgttttttcagcaagaagtctaattgtatccatgaagatcttctgtaaaacaacaagtaacacaaatctaagtgttatgtagaatttgtatgcaagcaagtagtgttgaataactttaaatgtattacttcatcttctcctatcaaagtaatgatggcttagaaacattctccaaggcaagggaaaaaacagttactaataacaatttttgtatattttattgaagaatcatagttttttgctataacaacatgcactaacacatgaatacagaagattaacaacggtaaactttactttatctaacaagtggagataaatgatgctcagcctttagtatcactaattcaatataacacctgtcttatatctatggcatgactaaaattacattttatgtcatgtgacataagaagagcttcgtacatagaagagaagcgaaacgaaccatttcaggtaaacacagcagatggata

SEQ ID NO: 6797 - DNA, 1160 bp, Zea mays
  Zm_smallRNAprecursor_2286
gtcaaatacaattatacaacatatactattatttttcagttggcatgagaactattaacattcttcttgctaaagtttgtgcacgtatttttttaaaataacacaactaacaatagtagagaacatatttttaaaatattaagcaacaggcgtatgaggcactgaagctacaacataatgaaaaatccgtacctctgaaagtgactgaatatatgcagaaagaggttcgccagtacgagaaattatattaacaagcaacccagtgcaatcaacaagaacaatcctttcctttagaagcttctggtcattccatttgaacctttctcccatctcaagacaaatgaaaacctcagtatacgctcattgataatgtcaaactcatctttcttattactgccatttatcttcgaggaacaacccccacagatcttcccctaagcagccagtagtaaaaccgcagactggataagttttacattctcaatgtagttccagagctcttcaagtagattatttgttttttcagcaagaagtctaattgtatccatgaagatcttctgtaaaacaacaagtaacacaaatctaagtgttatgtagaatttgtatgcaagcaagtagtgttgaataactttaaatgtattacttcatcttctcctatcaaagtaatgatggcttagaaacattctccaaggcaagggaaaaaacagttactaataacaatttttgtatattttattgaagaatcatagttttttgctataacaacatgcactaacacatgaatacagaagattaacaacggtaaactttactttatctaacaagtggagataaatgatgctcagcctttagtatcactaattcaatataacacctgtcttatatctatggcatgactaaaattacattttatgtcatgtgacataagaagagcttcgtacatagaagagaagcgaaacgaaccatttcaggtaaacacagcagatggataagcttgtagacataataatttaaattacgctgatagaaagattgtcctctagatacttatgcatgcaagtattcaaaactataacatggagcggaagtaggttctcaatgacatcattgccaactgtgtgtaaatcgaatggtgcaccatgacgtaaaagcaacttgat

SEQ ID NO: 6798 - DNA, 1195 bp, Zea mays
  Zm_smallRNAprecursor_2287
agaaggtatgataactatccatctgtgtgatattacacttctctttcaattttctacctgtagcgctgactcttggcattctcttttagtttatgttagattttgtttctatcgctaagtatagggcaaatgacataataatcacagatcctgttccccaagtatctgttacctttgttaacagaatttgattgatgatttgttctattatattaatcatttcatttaatcatgtaatattctaaattaacttaagtctactgaatattgttatatatgaaccttgattagcaacatgttgatcacatgcctcaaccattataggctttaaacccttttatattttgtctcttcttttgtttcatgttggattacatgtacttattattactgctattgttattgtcatatatgcactttcatagattttaccttgatgtggtttattatagttggataactgatgtctttcgactttttcaactgttatgcatccatctagcgggtgaatgatgcatttattgacatatatgtaaaattgattctcatcctttaaaaagatagtatccggtgcttactccgattattcaaggactgttcaggcaaggacatggtatgaagttttagtatcacctcagaaatcttaaccttcatggtcaataataatgctctacgatgtgtaaaagttgtattgaagggcaagccacctgagctctgtggaatgcacgccaatcctaactgcataaacctgtatgagtacttcccaattccataaaactgctgacaaattttttgtgacatgatcaagttgcttttacgtcatagtgcatcagtcgatgtaaacacagttgacaatactgtcattgagaacctacttccgctctatgttgcagttaaaaaatacttgcatgcataagtatctggatgacaatctttctttgagcgtaatttgaattattatgtctacaagcttattcatttgctgtgtttacctgaaatggtttgtttcagttctcttttatgtacgaagatctttttatgtcacatgacataaaatgtaattgtagtcatgctatagatatgagacagacgttataatggattagtgatactaaggactgaacatcatttatctccacttgttagagaaagtaaagtttggcgctgttaatcttctgtcttcatgtgttagtgc

SEQ ID NO: 6799 - DNA, 1161 bp, Zea mays
  Zm_smallRNAprecursor_2288
taagtatctggatgacaatctttctttgagcgtaatttgaattattatgtctacaagcttattcatttgctgtgtttacctgaaatggtttgtttcagttctcttttatgtacgaagatctttttatgtcacatgacataaaatgtaattgtagtcatgctatagatatgagacagacgttataatggattagtgatactaaggactgaacatcatttatctccacttgttagagaaagtaaagtttggcgctgttaatcttctgtcttcatgtgttagtgcatgttgttatagcaaaaacaaggatttttcaataaaatatacaaaaactgttgctagtaactgttttttccttggctttgaaaatgttcctaagccataattactttgataggagaaaatgaagtgatacatttaaagttattcaacactaattgtttgcatacaaattctacatgacacttagatttgtgttacttgttgttttacagaaaatatttatggatacagttagacttcttactgaaaaaataaataatcaacttgaagagctctagaactacattgagaatggaaaacttatccaatctgcggttttactactggctgatcagggaaagatctgtgggggctgttcctcgaagataaattacagtaataagaaatatgggtttgacattattaatgagcgtatactgagtttttcatttgccttgagatggaagaaaggtttaaatggaatgaccagaagcttccgaaggaaagaatgactcttgttgattacactgagttgcttgttaatataatttctcgtactggcgaacctctttctgcatatattcagtcacattcagagctacaaatttttcgttatgttgtagcttcagtggctcatacgcctgttacttaatattttaaaaatatgtgctctactattcctagttgtgttatttaaaaaaatacgtgcataaactttagcaagaagaatgttaatagttctcatgccaactgaaaaataatattatatgttgtatttgacaactttgtaatcagactattagagtttattcttttaaacaaactctacagaaatgaactttataaaagttaagacttccaccagatcaccaattgttttgcagccggtcagaatcgggttct

SEQ ID NO: 6800 - DNA, 1191 bp, Zea mays
  Zm_smallRNAprecursor_2289
accggccgccgccgccactgccatcgacgcgacggcgaggaggacgtggccgagaagacacaaggctattctcgtggccattggtgaaggaaagaaggaaggaagaatgccacgctttggttgtgttgtcgccgttaaatagattctgctttggcaagaattgtatggttctggttgcttgtagttgtagttgtggcagatcgaggaagttaaggttgagacttgaggatgggctttgtggcagatccacgtgggtcactgcttggttatgatgcttatggtcttttgatgggctgtttggatcgggttggtagtggccgttgacacacatagccgttggtttttcaaactatgcttttgtgctaagcaaggaacggccgtacctgagaatctgatatgcacgcccactggcacgcgcggggctgaattttgaaatggcaagaaaaaacgtccacattgatcaaaccgttgctgtgactactaggttgcgtttgttggcaagcagtccttctgtgcaagcgtgcaagcaaaccatctgatccattagatcgtgattcaaccgtaggtcacatttaacacttaaacccttccaccaccagctcaataatctttataaaaaactccctaacaaatcatagttgtatctgtggttggatcgtaatctaatggatcagatggtttgattgcacgcttgcacagaaggactgcttgcataacagtcgttaccgcgtttgtttgtaattataatatgtctagattattagtttaaaagttgttggattatataatcttagcatattataattctaaacaaacactccataagtctccggacgcttcatagtctgcagggatgacaacgactaagatatgcgggcagagacaaggacacactcatggtcaccagagaaaaaaagatatcattattcacatccactatccatccagcgatgaagctaaagcgaaccaaagcagggtgcaaatgacttgatggtgtatagtaataactcatagatggtgcgtatatagtgaaaatttggtctaaatcactagtttttaaaattttcgtgggtgcatgtccattcaccatcacctacatagctacgcccctgtatccatcatacgtgtaaaattattctatgcccgtcacccacaaggataatgggtatccatccatcaggtacctatgcc

SEQ ID NO: 6801 - DNA, 1189 bp, Zea mays
  Zm_smallRNAprecursor_2290
ccggccgccgccgccactgccatcgacgcgacggcgaggaggacgtggccgagaagacacaaggctattctcgtggccattggtgaaggaaagaaggaaggaagaatgccacgctttggttgtgttgtcgccgttaaatagattctgctttggcaagaattgtatggttctggttgcttgtagttgtagttgtggcagatcgaggaagttaaggttgagacttgaggatgggctttgtggcagatccacgtgggtcactgcttggttatgatgcttatggtcttttgatgggctgtttggatcgggttggtagtggccgttgacacacatagccgttggtttttcaaactatgcttttgtgctaagcaaggaacggccgtacctgagaatctgatatgcacgcccactggcacgcgcggggctgaattttgaaatggcaagaaaaaacgtccacattgatcaaaccgttgctgtgactactaggttgcgtttgttggcaagcagtccttctgtgcaagcgtgcaagcaaaccatctgatccattagatcgtgattcaaccgtaggtcacatttaacacttaaacccttccaccaccagctcaataatctttataaaaaactccctaacaaatcatagttgtatctgtggttggatcgtaatctaatggatcagatggtttgattgcacgcttgcacagaaggactgcttgcataacagtcgttaccgcgtttgtttgtaattataatatgtctagattattagtttaaaagttgttggattatataatcttagcatattataattctaaacaaacactccataagtctccggacgcttcatagtctgcagggatgacaacgactaagatatgcgggcagagacaaggacacactcatggtcaccagagaaaaaaagatatcattattcacatccactatccatccagcgatgaagctaaagcgaaccaaagcagggtgcaaatgacttgatggtgtatagtaataactcatagatggtgcgtatatagtgaaaatttggtctaaatcactagtttttaaaattttcgtgggtgcatgtccattcaccatcacctacatagctacgcccctgtatccatcatacgtgtaaaattattctatgcccgtcacccacaaggataatgggtatccatccatcaggtacctatgc

SEQ ID NO: 6802 - DNA, 1190 bp, Zea mays
  Zm_smallRNAprecursor_2291
ccggccgccgccgccactgccatcgacgcgacggcgaggaggacgtggccgagaagacacaaggctattctcgtggccattggtgaaggaaagaaggaaggaagaatgccacgctttggttgtgttgtcgccgttaaatagattctgctttggcaagaattgtatggttctggttgcttgtagttgtagttgtggcagatcgaggaagttaaggttgagacttgaggatgggctttgtggcagatccacgtgggtcactgcttggttatgatgcttatggtcttttgatgggctgtttggatcgggttggtagtggccgttgacacacatagccgttggtttttcaaactatgcttttgtgctaagcaaggaacggccgtacctgagaatctgatatgcacgcccactggcacgcgcggggctgaattttgaaatggcaagaaaaaacgtccacattgatcaaaccgttgctgtgactactaggttgcgtttgttggcaagcagtccttctgtgcaagcgtgcaagcaaaccatctgatccattagatcgtgattcaaccgtaggtcacatttaacacttaaacccttccaccaccagctcaataatctttataaaaaactccctaacaaatcatagttgtatctgtggttggatcgtaatctaatggatcagatggtttgattgcacgcttgcacagaaggactgcttgcataacagtcgttaccgcgtttgtttgtaattataatatgtctagattattagtttaaaagttgttggattatataatcttagcatattataattctaaacaaacactccataagtctccggacgcttcatagtctgcagggatgacaacgactaagatatgcgggcagagacaaggacacactcatggtcaccagagaaaaaaagatatcattattcacatccactatccatccagcgatgaagctaaagcgaaccaaagcagggtgcaaatgacttgatggtgtatagtaataactcatagatggtgcgtatatagtgaaaatttggtctaaatcactagtttttaaaattttcgtgggtgcatgtccattcaccatcacctacatagctacgcccctgtatccatcatacgtgtaaaattattctatgcccgtcacccacaaggataatgggtatccatccatcaggtacctatgcc

SEQ ID NO: 6803 - DNA, 1187 bp, Zea mays
  Zm_smallRNAprecursor_2292
cggccgccgccgccactgccatcgacgcgacggcgaggaggacgtggccgagaagacacaaggctattctcgtggccattggtgaaggaaagaaggaaggaagaatgccacgctttggttgtgttgtcgccgttaaatagattctgctttggcaagaattgtatggttctggttgcttgtagttgtagttgtggcagatcgaggaagttaaggttgagacttgaggatgggctttgtggcagatccacgtgggtcactgcttggttatgatgcttatggtcttttgatgggctgtttggatcgggttggtagtggccgttgacacacatagccgttggtttttcaaactatgcttttgtgctaagcaaggaacggccgtacctgagaatctgatatgcacgcccactggcacgcgcggggctgaattttgaaatggcaagaaaaaacgtccacattgatcaaaccgttgctgtgactactaggttgcgtttgttggcaagcagtccttctgtgcaagcgtgcaagcaaaccatctgatccattagatcgtgattcaaccgtaggtcacatttaacacttaaacccttccaccaccagctcaataatctttataaaaaactccctaacaaatcatagttgtatctgtggttggatcgtaatctaatggatcagatggtttgattgcacgcttgcacagaaggactgcttgcataacagtcgttaccgcgtttgtttgtaattataatatgtctagattattagtttaaaagttgttggattatataatcttagcatattataattctaaacaaacactccataagtctccggacgcttcatagtctgcagggatgacaacgactaagatatgcgggcagagacaaggacacactcatggtcaccagagaaaaaaagatatcattattcacatccactatccatccagcgatgaagctaaagcgaaccaaagcagggtgcaaatgacttgatggtgtatagtaataactcatagatggtgcgtatatagtgaaaatttggtctaaatcactagtttttaaaattttcgtgggtgcatgtccattcaccatcacctacatagctacgcccctgtatccatcatacgtgtaaaattattctatgcccgtcacccacaaggataatgggtatccatccatcaggtacctatg

SEQ ID NO: 6804 - DNA, 1188 bp, Zea mays
  Zm_smallRNAprecursor_2293
cggccgccgccgccactgccatcgacgcgacggcgaggaggacgtggccgagaagacacaaggctattctcgtggccattggtgaaggaaagaaggaaggaagaatgccacgctttggttgtgttgtcgccgttaaatagattctgctttggcaagaattgtatggttctggttgcttgtagttgtagttgtggcagatcgaggaagttaaggttgagacttgaggatgggctttgtggcagatccacgtgggtcactgcttggttatgatgcttatggtcttttgatgggctgtttggatcgggttggtagtggccgttgacacacatagccgttggtttttcaaactatgcttttgtgctaagcaaggaacggccgtacctgagaatctgatatgcacgcccactggcacgcgcggggctgaattttgaaatggcaagaaaaaacgtccacattgatcaaaccgttgctgtgactactaggttgcgtttgttggcaagcagtccttctgtgcaagcgtgcaagcaaaccatctgatccattagatcgtgattcaaccgtaggtcacatttaacacttaaacccttccaccaccagctcaataatctttataaaaaactccctaacaaatcatagttgtatctgtggttggatcgtaatctaatggatcagatggtttgattgcacgcttgcacagaaggactgcttgcataacagtcgttaccgcgtttgtttgtaattataatatgtctagattattagtttaaaagttgttggattatataatcttagcatattataattctaaacaaacactccataagtctccggacgcttcatagtctgcagggatgacaacgactaagatatgcgggcagagacaaggacacactcatggtcaccagagaaaaaaagatatcattattcacatccactatccatccagcgatgaagctaaagcgaaccaaagcagggtgcaaatgacttgatggtgtatagtaataactcatagatggtgcgtatatagtgaaaatttggtctaaatcactagtttttaaaattttcgtgggtgcatgtccattcaccatcacctacatagctacgcccctgtatccatcatacgtgtaaaattattctatgcccgtcacccacaaggataatgggtatccatccatcaggtacctatgc

SEQ ID NO: 6805 - DNA, 1177 bp, Zea mays
  Zm_smallRNAprecursor_2294
aataggttgcctcgcattttgccattctgaaatgtggtacttctgacccttataaggtgcaaggtacccctttctatttggataacctgaatccacaagatagtatttacctgcacaaacagataatataaagttaaatacttaagacataaattaatatcgtatgatacaaaagtacaacatacttatataccttccggtggatgggggaacctgtccgcataagttatcaaagtatcttgtaatactcttgtgtcatgtactgaacctggccaacctatgacaacaaatgtgaacctcatagcgaagtcacaaacggccattacattctgcgatgcgtaaccgtgccgaccaatatatttggcttgctccgaggccgggacagacgctggaaagtgactaccatcaattgctcctatgcaatccttgaagtgcggccaaaatctagtctctcgcaaacgaggatgaatctctatgaaatttgggtctttgggcttgattacgtcagatgacatcttatatagtgcatcaagtacttcactatacttgcgactaatagtttccaaggagtgaccaaacttattccttatctgcctaaatgattgtggaccccacatgcccacaagaaaatacctagagcttccgttgtactgacaccacggcttggaaccagaccataactttccaccaacgtatcatgcaatcgtctaaaaacagtatgccgcatgcgaaacatgtcaaagcagtcgttactattctccaaagttcgctcaacccattgaatccctgtttcaaccagtggtcttcttgaaaccccactcgacggcctcccccaaatgtctacagcatatagggcaactgcaattgtccatccatgtcatccatgtcatcaacatatgtgtgtgcatcaggttcacacatctgcatgcaaacacacaagagccacatgcctcgaataagcacaatatataagacacattcatgtatcatacctcaaacaaagttcacagattaacattgttcacaaccatacaactctgattattgaaatacatgttcaactcgaataattggaaaattgtgcgatgcagaaaacaaatagtggcgacatgtttattttataacacgactgcaccatgacaagactaataatattgacgataagactcataatagt

SEQ ID NO: 6806 - DNA, 1171 bp, Zea mays
  Zm_smallRNAprecursor_2295
cttggacatttctgctctgcccgcgcactagccatgcatgcgtgtcaggggcgcccatttttctgtccagtcgcttccagccgctgcgcgcaaatttgaatattctttttgcatcttccctctgctgtttctggttctctgaccacactggtcagaaccagctgaactggcccatgggggcggttgaactggtcctgaggaccagctcaactgcctatatatacttgactctccccttctcttctcccacttcattcactctcgcctttgtcgcttcacaacctttagagcctctccttcacacacttcaaccggttcacagtttcaccaccttttcaatcatggtgcgtcgtcgcaacccctctgtggttgagtttagcagcgactccgacgagattcaggaggaatctcccgtcccctatcctccgcctcgtcgctccctctctaagagaggacgtggctctggtcggaaggatggcgagggctcttctatgccttcgcagccgactcgcgggagacgccaaaaggttggcgcctctcgtcctcgtcgtagcacgtcttcctctgggtatgctccctgccaggaggaggatggggcgttcgacgacttcgtggaccttccggcgcctgatgctctctacgtcaccggactgcacatgcatccggcgaacgtcagccgcggtccgcatgaatctcccgtcgacttcactcagaagggaatagacacccttcagcgtctgaggtttaccaaccctactctcactcctcgtcatcctggtgtccaggaccctcggttctggaatcttttccaggctgacttctacaattctgtcattctttccaagaaacacccagtcgtccgacatagatttattgactgggagggttgtgagaatatgggagatgctgacatgtcgtcagctctcgtaaacttagagagaaaggggttacgaaacattatgaccatggaatacccctggaacgatgaggtggtagctcagttctatgccaccctctggataaagaaagtagatgaggaagccgatgggtatgattacccagtcatgtatttcttcatccagggtaactggcacaaagtcagttatcgtcgttttgcccatattctgggcttctctgatgcagacattcagggcagcaacatgcgagtgca

SEQ ID NO: 6807 - DNA, 1165 bp, Zea mays
  Zm_smallRNAprecursor_2296
taaataatggatgtacaaatttgatagtgatttcgattaccctgtgaccaaagtcatggcaacaacacgctcgtcggatctgtaatatcgtatatcacatatttaatatgttgtggtcgagacttatctgataacataacgctctagactttgttgatatgctttttgatgtggggtccctatctcgatattataatgctcttaatgaactcagacataaccttctaatttgtgacaggattacatttagtcgtattaagtttcttattctcatggggcttcggggcccaagggtttgaggtcgagtcgttctcaagtaactagatgttgttaagtgctccaagaaatagattgtcataagtacctaaatccttcatgactcatgaggtaagtgctccaagaaatagattgtcataagtacctaaatccttcatgactcatgaggtccacgaagcatgaggagccccggagacttagggggtgtttggttctgtggactgaagtttagtccgggtcacatcaagcgtttgactttcaaataggagtatgaaatatagacccaaccaacagtactagattcgtttcactttttaatcttcggctgagaaattagttttataatccgactacatttaataccccgaacggaggttcaaacattcgatgtgataggggctaaattttagcagaggcaaaccaaacccccccccccccccccctagaatcatgagtacaagaagaagtgagcaaaacagaactaaaaaaacagcagctagaatccgtggaccgtggtacagccgaagaaaaatagaaggaatacatcctattcaacttagcccataacaaagaggcctgcaagcctagccctcctccgcccggcaaatcaccctaacagaggtcgcgtacggccaagtccagaatcccgactggacgagtcccgagcggccgagcgccatcctctgctgcggcaccggcgagtcggcgaccctcctctaatccgatgttcgacgtcgcctcgtcatcctccaagacggctataccattccccatccccacgctctctgcctcggcaccctcctccaccgctatctacctctacctctactgggccctcttcatcggcgggtgcctgctgcccctgcgactgcgtacaaaatttgttttt

SEQ ID NO: 6808 - DNA, 1190 bp, Zea mays
  Zm_smallRNAprecursor_2297
accagagccagatggcctagggtcaccaggaatgggtcccggacccgggtaaggaggcggagggtgggaggatgattgacccggatccccatggtagggaggcggggcaaactcctcgcgatcatcaacatagacttcttcatcttcatcgtctgcagacataaaaggcaccccgtaggcctgctggtgccactcattgatctccgggggaggaggatggagaggcacatcaggcgaacgagggacaaaaggcatgcccatggaggaagcttgacgacgaagattgtcgtcagtctcccgctgacgccgtgccacctcatggacatcagcagaaatgttgcggcacatggagaaaaatgccgcaaccccatggaccaagcgagcacccatcccgcggccacgacctcgaccacgaccacgagcacgtggcatgggagatccacggccaggagagggacgcgaggcagcagcggggggagaggaggatggatgatggggaggctggcgaggtggctcagaggaggaggcagggcctccagaccgtgagggagcccgcttcgtacgagcagctgggttggaggaatcaacccagtagggtacgtagcgggagtgtttgacgggtttttcgaagtgggtctgggtgaccacttcgatcattttcatgataaagggtgcatgaagacaccctctgtgaggagaccaggaagcacggacgatctcttcccagatcatgtcaaacacattgatgcgggcgagactgtttggagcaaggaggaggaggaagacgcgactctccccaaggacgttcatttgatttccgcccttcgggagaacggtcatccgggacaaagaattaaggtacctgtagtacctatgcatgttagcggttgtccagaactcccgctcagtagagatatgaatgaattccgtatcttcccgcatgggcagccgaatgccatgcactcgcatgttgctgccctgaatgtctgcatcagagaagcccagaatatgggcaaaacgacgataactgactttgtgccagttaccctggatgaagaaatacatgactgggtaatcatacccatcggcttcctcatctactttctttatccagagggtggcatagaactgagctaccacctcatcgttccaggggtattccatggtcataatgttacgtaacccctttc

SEQ ID NO: 6809 - DNA, 1148 bp, Zea mays
  Zm_smallRNAprecursor_2298
atacccatcggcttcctcatctactttctttatccagagggtggcatagaactgagctaccacctcatcgttccaggggtattccatggtcataatgttacgtaacccctttctctctaagtttacgagagctgacgacatgtcagcatctcccatattctcacaaccctcccagtcaataaatctatgtcagacgactgggtgtttcttggaaagaatgacagaattgtagaagtcagcctggaaaagattccagaaccgagggtcctggacaccaggatgacgaggagtgagagtagggttggtaaacctcagacgctgaagggtgtctattcccttctgagtgaagtcaacgggaggttcatgcggaccgcgactgacgttcgccggatgcatgtgcagtccggtgacgtagagagcatcaggcgccggaaggtcgacgaagtcgtcgaaagccccatcctcctcctggtagggagcatacccagaggaagacgtgctacgacgaggacgagaggcgccaaccttttggcgtctcccgcgagtcggctgcgaaggcatagaagagccctcgccatccttccgaccagagccacgtcctctcttagagagggagcgacgaggcggaggagagggaacgggagattcctcctgaatctcgtcggagtcgctgctaaactcaaccacaaaggggttgcgacgacacaccatgattgaaaaggtggtgaaactgtgaaccggttgaagtgtgtgaaggagaggctctaaaggttgtgaagcgaccaaggcgagagtgaatgaagtgggagaagagaatgggagagtcaagttgaaagtcgcctagagggggggggggtgaataggcggaacctgaaaattaaaactttatcccccaactagatcccttgattaatggttagaacaagatatacaaatatcggagaatagaaactaagttcttgcttgaaaggagtattgctaaataatgcgggtgagataaatcaatacaactaataagttatagaataacaaagcaagaaagcttagatgaaaagagcactaactcaagttctttcttgcggagtgttgcttcacttaaatgagagtttaacttgaagcaacaccaaatgatatgagcaaagaatagt

SEQ ID NO: 6810 - DNA, 1076 bp, Zea mays
  Zm_smallRNAprecursor_2299
aatagagtgtatgtgtttttatgaagccaacacaatagttcgggtagttcgggaatacccgaacccgaacccgaaattccgggtacccgaattttcgggtattgaaaaacccgttgtaatttcgggtatcgattctcaaaacccgaaattttaaaaacccgaattacccgacccgaaaatttcgggtaacccaaacgcccacccctaataaatagagaggtatacaaccgatttgtaatcatcaacaatcgaatcaatacaacttttattcgcattttatcctaggagtagttctagtctagtttaggtttagcctctcaatcccaaattcttcgcctctcttcgactctacgccgattggaggagtctaggtcggccggcccgagcctagacaacccctaggatctctcctccctgacggggtccctcccgggagcgagatccaggccgccgccggcgacttccgccgcccctgcgtacgcgcggaccgtccggccctagggcgcggaccgtccgatcgtcaggcagagaagccctagccgcgcaccaggccgcggacagtccgcccctgcgcagagagtatcaccgcgcctcgcaccagaccgtggaccgtccggccccgcgcgcggaccgtccgcccctgtgcagagggcaccgccacggttcttcttgagtaattggcgctcccaaaaggcgtcaacatactttttggcgactctgctggggacaacacatatagacctatcaaatcggccctcaatggccggttcaaaagatagctctgaggtttccaccagcaatatcatcacaccgacatgggaagccttgccggctgaagaacagcttctgttcgaggagcgccaggagcagctgatccaagaagcaaaggcgaagttcctggctgacttcaaagtggacaggaacaacaaagtcgttcggcaacgggcgacagatctggcttcgctccgacctactacgattaccccaaatgtaagtagcaccaacgaactccaatctcttaaagcttacatagatgaacagcgagaacagatgcaaaatatcataggggttatgca

SEQ ID NO: 6811 - DNA, 1061 bp, Zea mays
  Zm_smallRNAprecursor_2300
atcattaaagcacacatgtagggaaaattatcactactaaatcaagttttatagtgcttattcaaataataatgataaagtttcaaagttggataagcgacataaaaaacaaaccaagtagcaatttatactagtgtgaagtgctaccttgaattatgcttagtttctctatgtttgcacaattgtcatcaattaccaagaaaggggagagtgaaaggtccttgctttatttcggtgaatgagtgacaatttaggtggactaatatatttttatgttgagatacacaagatttagtccacaagtacactagagtcagcaactctagccatggagatgggatcttggaagtttgtcactactaaatgatgctaagctatacatgttaaagatatacttttgtaacatataaacggattgttgatgtgatgtggcatgttagatcacactaatgaaaattcaaggagccaaccactacaggaattcacttaattcccgtcggcctgaaaccgacgggaataagccctaaaccgacgtgaattacttattcccgtcgatttagggcttattcccgtcggtttcaggccgacaggcatcccttgccggggataaggttatccccgtcggcggctgacgggaataattaattcccgtcggctatatagtggccgacgggcgtaacatattaattcccatcggttccccaggccgacgggagttattaattaattcccgtcggccctgcgtggccgacgggaattaactaggccgacgggagttagtaattaattcccgtcggttcgaccatagccgacgggaattaactgggccgacgggaattactctatactgctacaaaaacagcactaaattatgtcactatttctgcacacataacatatatcaaacataatataaatcacatataacagccacattacaaacacatatagagatacgacatccacaaacacatgcatttagacataaacacttgcatttataattaaaacatccaccaacgtgtacgacatagtattcaaacatagcatccaccaacatc

SEQ ID NO: 6812 - DNA, 1058 bp, Zea mays
  Zm_smallRNAprecursor_2301
gctgaaatgttgcggcacatggagaaaaatgccgcaaccccatggaccaagcgagcacccatcccgcggccacgacctcgaccacgaccacgagcacgtggcatgggagatccgtggccaggagagggacgcgaggcagcagcggggggagaggaggatggatgatggggaggctggcgaggtggctcagaggaggaggcagggcctccagaccgtgagggagcccgcttcgtacgagcagctgggttggaggaatcaacccagtagggtacgtagcgggagtgtttgacgggtttttcgaagtgggtctgggtgaccacttcgatcatcttcatgataaagggtgcatgaagacaccctctgtgaggagaccaggaagcacggacgatctcttcccagatcatgtcaaacacattgatgcgggcgagacagtttggagcaaggaggaggaggaagactcgactctccccaaggacgttcatttgatttccgcccttcgggagaacggtcatccgggacaaagaattaaggtacctgtagtacctatgcatgttagcggttgtccagaactcccgctcagtagagatatgaatgaattccgtctcttcccgcatgggcagccgaatgccatgcactcgcatgttgctgccctgaatatctgcatcagagaagcccagaatgtgggcaaaacgacgataactgactttgtgccagttaccctggatgaagaaatacatgattgggtaatcatacccatcggcttcctcatctactttctttatccagagggtggcatagaactgagctaccacctcatcgttccaggggtattccatggtcataatgttacgtaacccctttctctctaagtttacgagagctggcgacatgtcagcatctcccatattctcacaaccctcccagtcaataaatctatgtcggacgactgggtgtttcttggaaagaatgacagaattgtagaagtcagcctggaaaagatttcagaaccgagggtcctagacaccaggatgacgaggagtgagagtagggttggtaaa

SEQ ID NO: 6813 - DNA, 1057 bp, Zea mays
  Zm_smallRNAprecursor_2302
ctgaaatgttgcggcacatggagaaaaatgccgcaaccccatggaccaagcgagcacccatcccgcggccacgacctcgaccacgaccacgagcacgtggcatgggagatccgtggccaggagagggacgcgaggcagcagcggggggagaggaggatggatgatggggaggctggcgaggtggctcagaggaggaggcagggcctccagaccgtgagggagcccgcttcgtacgagcagctgggttggaggaatcaacccagtagggtacgtagcgggagtgtttgacgggtttttcgaagtgggtctgggtgaccacttcgatcatcttcatgataaagggtgcatgaagacaccctctgtgaggagaccaggaagcacggacgatctcttcccagatcatgtcaaacacattgatgcgggcgagacagtttggagcaaggaggaggaggaagactcgactctccccaaggacgttcatttgatttccgcccttcgggagaacggtcatccgggacaaagaattaaggtacctgtagtacctatgcatgttagcggttgtccagaactcccgctcagtagagatatgaatgaattccgtctcttcccgcatgggcagccgaatgccatgcactcgcatgttgctgccctgaatatctgcatcagagaagcccagaatgtgggcaaaacgacgataactgactttgtgccagttaccctggatgaagaaatacatgattgggtaatcatacccatcggcttcctcatctactttctttatccagagggtggcatagaactgagctaccacctcatcgttccaggggtattccatggtcataatgttacgtaacccctttctctctaagtttacgagagctggcgacatgtcagcatctcccatattctcacaaccctcccagtcaataaatctatgtcggacgactgggtgtttcttggaaagaatgacagaattgtagaagtcagcctggaaaagatttcagaaccgagggtcctagacaccaggatgacgaggagtgagagtagggttggtaaa

SEQ ID NO: 6814 - DNA, 1058 bp, Zea mays
  Zm_smallRNAprecursor_2303
ctgaaatgttgcggcacatggagaaaaatgccgcaaccccatggaccaagcgagcacccatcccgcggccacgacctcgaccacgaccacgagcacgtggcatgggagatccgtggccaggagagggacgcgaggcagcagcggggggagaggaggatggatgatggggaggctggcgaggtggctcagaggaggaggcagggcctccagaccgtgagggagcccgcttcgtacgagcagctgggttggaggaatcaacccagtagggtacgtagcgggagtgtttgacgggtttttcgaagtgggtctgggtgaccacttcgatcatcttcatgataaagggtgcatgaagacaccctctgtgaggagaccaggaagcacggacgatctcttcccagatcatgtcaaacacattgatgcgggcgagacagtttggagcaaggaggaggaggaagactcgactctccccaaggacgttcatttgatttccgcccttcgggagaacggtcatccgggacaaagaattaaggtacctgtagtacctatgcatgttagcggttgtccagaactcccgctcagtagagatatgaatgaattccgtctcttcccgcatgggcagccgaatgccatgcactcgcatgttgctgccctgaatatctgcatcagagaagcccagaatgtgggcaaaacgacgataactgactttgtgccagttaccctggatgaagaaatacatgattgggtaatcatacccatcggcttcctcatctactttctttatccagagggtggcatagaactgagctaccacctcatcgttccaggggtattccatggtcataatgttacgtaacccctttctctctaagtttacgagagctggcgacatgtcagcatctcccatattctcacaaccctcccagtcaataaatctatgtcggacgactgggtgtttcttggaaagaatgacagaattgtagaagtcagcctggaaaagatttcagaaccgagggtcctagacaccaggatgacgaggagtgagagtagggttggtaaac

SEQ ID NO: 6815 - DNA, 1171 bp, Zea mays
  Zm_smallRNAprecursor_2304
cgcatgggcagccgaatgccatgcactcgcatgttgctgccctgaatatctgcatcagagaagcccagaatgtgggcaaaacgacgataactgactttgtgccagttaccctggatgaagaaatacatgattgggtaatcatacccatcggcttcctcatctactttctttatccagagggtggcatagaactgagctaccacctcatcgttccaggggtattccatggtcataatgttacgtaacccctttctctctaagtttacgagagctggcgacatgtcagcatctcccatattctcacaaccctcccagtcaataaatctatgtcggacgactgggtgtttcttggaaagaatgacagaattgtagaagtcagcctggaaaagatttcagaaccgagggtcctagacaccaggatgacgaggagtgagagtagggttggtaaacctcagacgctgaagggtgtctattctcttctgagtgaagtcgacgggagattcatgcggaccgcggctgacgttcgccggatgcatgtgcagtccggtgacgtagagagcatcaggcgccggaaggtcgatgaagtcgtcgaacgccccatcctcctcctggcagggagcatacccagaggaagacgtgctacgacgaggacgagaggcgccaaccttttggcgtctcccgcgagtcggctgtgaaggcatagaagagccctcgccatccttccgaccagagccacgtcctctcttagagagggagcgacgaggcggaggagaggggacgggagattcctcctgaatctcgtcggagtcgctgctaaactcaatcacagagggattgcgacgacgcaccatgattgaaaaagtggtgaaactgcgaaccggttgaagtgtgtgaaggagaggctctaaaggttgtgaagcgaccaaggcgagagtgaatgaagtgggagagaagagaagggagagtcaagtatatataggcagttgagctggtcctcaggaccagttcaaccgcccccatgggccagttcagctggttctgaccagtgtggtcagagaaccagaaacagcagagggaagatgccaaaaaataaaatttctgacgtaggattctgaaaaagtgtactgcggagactccatgcgcaaaaaaaaattcagaaacaagcgtctgc

SEQ ID NO: 6816 - DNA, 1040 bp, Zea mays
  Zm_smallRNAprecursor_2305
gtggaagtgaccggacaggggcgccctgcagaaagcgaccagacgctgctgagccctgcagaaagcgaccagacgctgctgagccctgcagagagcgaccagaaagcggcagcaagaaaaaaaaatatgcgcgcccagcagaggaaatgaccggtcaaaaaaaatgctgtgcgccctgcagaaagcgaccagaaaaaaatctgcgcgtcagacactgctgcagctgacagacctgcgcgaacaggcctgcgcggtcagaccgggcagagaccggttcaaccggtccaccatgccggttcaaccgcttttaaccatgatggtcctggtaaaaactggttaaaaacagctgagctgaagttcagctgctaagttcagcgggcctcctccagctgaactagaaagttcagctggtcaagccagttgagccaaaaaaaaaatcttagcactaaaatgcattcaaattttaacattttcaccaagtttttgaaagatcatcacatagctttaaaactatcaatcaaaaatagtgaatcaaacaatttttgtgaccgttttcaagttaagttacgagaatccaagatatttaattcactcctaagaaagcaaaacctagtctcatcgaggggttttgtgaagatatcggctagttgattttcggtgctcacatgaaacaattcgatatctcctttggcttcgtggtctctcaagaaatggtgtctgatgtcaatatgtttagttctagagtgttgcacagggttgtttgcaagttttatggcactctcattgtcacacaaaagtggaattttgttaaactcacaaccaaaatctcgaagggtttgcttcttctataacaactgtgcacaacatgccccagctgctatgtactcagcttctgcagtggaaagtgcaacacaattttgtttcttggaactccatgatactaaggatcgcccaaggaattggcaagtcccagtagtgctttttcgatctactttgcaatcggcataatctgagtcagaatagccaagtaaatcgaaaag

SEQ ID NO: 6817 - DNA, 1193 bp, Zea mays
  Zm_smallRNAprecursor_2306
atactcggttttggttctgctaattttaaatccttttgactctaggatctgacgctataactctagctttctgtttaccccttcgactttcatctactagaactacatcgtcaacgaaaagcatacaccaaggggtatcttcgtgtatatcccttgtgacctcaactatcactaaggcaaatagataagggctcaaagctgaaccttgatatagtcctatgttaatcgggaaaacatttgtatcaccatcaattgttcggacgctagtcacaaccttgtcatacagctccttgatgagcgtaacatactttgttgcgactttatgcttatccaatgtccaccacatgagattcttaggtattttatcataggccttttccaagtcgataaaaaccatgtgcaagtccttcttctgctccttataccgcgtcatgacctgtcttattaagaaaattctttccatggttgacctccaggcatgaatccaaattggttcatggtgatatgcgtcattcctctcaggcgatgctcaatgactctctcccgtagcttcatagtgtggctcatgagcttaatccctcggtagttggtacaactttgaatatctcccttgttgttgaagattgatactaatgtactcctccactcatcgggcatcttgtttgatcgaaaaatatggttgaacaacttggttagccaaacgatagcaatatccccaaggtatttccacacatatattgggataccacctgggcccatcatcttgccccctttcatcctctttaaagcttctttgacctctgatttttagattctgcgtacaaagcatctatttaaatcatcaaaggagtcatccaattgggtgtccatagtctcattctcaccattgaaaagattgtcaaaatacctctgccacctttgtttgatgtcttgtcctttcgtgctacactgttgttatttcctgctgcccactgttgctgttggtgctgttgcctcttatcattgctgctgcacttggtcaactggattggtttggtgggctgggcttgcctgtcgtttctctccgatactgttgtcgcatgttgttcattacccactctaaacactgctgcttatagctaacatgacattgcctagctatgcacccaggagtgcttgacgtcttaataaccttggttgaaaatatttgtata

SEQ ID NO: 6818 - DNA, 1042 bp, Zea mays
  Zm_smallRNAprecursor_2307
ccaaacgaaaaaggagaatcggtccctatagccactgcacgtattgtcatattcttaggccaggccaatttaaaacagatcagggcaatttcgcgtagagattgaccttgtagccaacggtcattccagaacctggtttttctgaccttttccaattacttatcgcattgtttaatagtttttgtacccatggttggtttgcggtgtgtattcagatgaatatgcatgggacgattcagtgtggacaatgtcaagcagaaatattgtatatagttcagagatgttggacgcacgtgttcagatgattgattcaactacgtactggtccactccagaacaggtccaaattccaactgaacgagaaagaagcgtaaatccaaaccttagaaatatgctgatagttttgagaagaatcaaacgaatggttcatttacgtacattgagtggtctaaataataaccgagaggaaaaaaaactccagctagctttgtactccctccgtttctttttattagtcgccggatagtacaaatttgcactatccggcgactaataaaaagaaacggagggagtacacgtgattgggcagaacgacaaagaaaaaaatcagttgttgacaaatcaaacaccagatgtccatagcttagctatagtttgagtactccaaggaacatttgacaaggacaccatttcagaccttggtgtgtgcgtgtgtgtgtgtttcccaatactaactgcatcatggagccatactagaaaaatacatgcataaaatcacacaattaataaggaagttgcgtaacacctgtgagggcaatcaaagactggtatatatataatagtaaataaaagtatacattaccgaaaccctaacacgtgtctccacctccccctcacggcgattgtccgccaacgaccagctgacagctgactggctggaggagctagttgatttgatgtgcactgcagtacgtatgcacaggcacatgcaatatgcatcacacatgacaggagctagcagagatcgacgtcgacacgacga

SEQ ID NO: 6819 - DNA, 1034 bp, Zea mays
  Zm_smallRNAprecursor_2308
acgaaaaaggagaatcggtccctatagccactgcacgtattgtcatattcttaggccaggccaatttaaaacagatcagggcaatttcgcgtagagattgaccttgtagccaacggtcattccagaacctggtttttctgaccttttccaattacttatcgcattgtttaatagtttttgtacccatggttggtttgcggtgtgtattcagatgaatatgcatgggacgattcagtgtggacaatgtcaagcagaaatattgtatatagttcagagatgttggacgcacgtgttcagatgattgattcaactacgtactggtccactccagaacaggtccaaattccaactgaacgagaaagaagcgtaaatccaaaccttagaaatatgctgatagttttgagaagaatcaaacgaatggttcatttacgtacattgagtggtctaaataataaccgagaggaaaaaaaactccagctagctttgtactccctccgtttctttttattagtcgccggatagtacaaatttgcactatccggcgactaataaaaagaaacggagggagtacacgtgattgggcagaacgacaaagaaaaaaatcagttgttgacaaatcaaacaccagatgtccatagcttagctatagtttgagtactccaaggaacatttgacaaggacaccatttcagaccttggtgtgtgcgtgtgtgtgtgtttcccaatactaactgcatcatggagccatactagaaaaatacatgcataaaatcacacaattaataaggaagttgcgtaacacctgtgagggcaatcaaagactggtatatatataatagtaaataaaagtatacattaccgaaaccctaacacgtgtctccacctccccctcacggcgattgtccgccaacgaccagctgacagctgactggctggaggagctagttgatttgatgtgcactgcagtacgtatgcacaggcacatgcaatatgcatcacacatgacaggagctagcagagatcgacgtcgacacg

SEQ ID NO: 6820 - DNA, 1071 bp, Zea mays
  Zm_smallRNAprecursor_2309
gaggtggctcatcagaagaggcagggcctccaaaccctgagggagcccacttcgtacgagcagctaggttggtggaatcaacccaatagggtacgtagcgggagtgtttgacaggttttttgaagtgagtctgggtgaccacttcgatcatcttcataataaagggtgcatgaagacaccccttgagaggagaccaggaagcacgaaggatctcttcccagatcatgtcaaacacattgatgcgggcgagactgttgggagcaaggaggagaaggaagacccgactctccccaaggacgttcatttgattcccgcccttcgggagaacggtcatcctggacaaagagttaaggtacctgtagtacctatgcatgttggcggtcgtccagaactcccgatccatagagacatgaataaattcagtctcttcccgcatgggcaaccgaatgtcatgaactcgcatgttgctgccttgaatatcagcatcagagaagcccaaaatatgggcaaaacgacggtagctgactttgtgcaagttcccctggataaagaaatacatgactgggtaatcatacccatcagcttcttcatctactttcttgacctagagggtggcatagaactgagctatcacctcgtcattctaggggtattctattgtcataatattttttaacccctctctctccaggttacggagagctgacgtcatgtcagcatctcccatattctcacatccttcccagtcaataaaccgatgcctaacgactgggtgtttcttggtcaagatgacagaattataaaaatcagcctagaaaagattccagaacagagggtcctggacactaggatgacgaggtgtgagagtggggttagtgaaccttagacgttgaagggcgtccaccctctttagagagaagtcgaacgaaggttcattagggccccgggatacattcaccggatgcatgtgcaggccggtgatgtagggagcgtcagacggcggaagatcaacgacgtcgtcgaatgctccatcctcctcctggcaaggagcgtatcctaaggaggaggtgc

SEQ ID NO: 6821 - DNA, 1202 bp, Zea mays
  Zm_smallRNAprecursor_2310
cgaggttcctatgcagttagctagcatcaaaacaattagccagttgcctataattcagaattagttacaaaacatttaagctctaagctctaatttatcttttctaattgcagaagcaatataagtaggagatgcttggttagacgtcacggcaaaaactttgatttacgaaatggaccgatttgccggtgctggtgtatgctagtcgtggtgtaaagttgtatgaacaatgagatcataatttcttaattttatttattatgtttgactaaaatttatgtattctaaattttgaaggttaattactccatgttcatcgcagtgattgactcaagagatgtatgatcgtagatgggatctttttctcaaagttcggtgtagtagtaaccgacgtcactacagtaaacggagaaacgtccgacggccaaaaccgtcggacataaggaataaaccgtcggaaatagattatttccgacggcaaagccttatctccgacggctttaagccgtcggagataactcgtcggaaatagtgcaatgttcgacggcagccgtcggacataagctatctccgacggctgcgtgtgcccgtcgggagataacaaatcccaaccgttttaccggtcggaatgtgggccccacaggattaagtccgacggctaccactaggccgtcggacataagcatcccttatgtccgacggtagttaatgccgtcggacataaccatgtgttatgtccgacggctaccactaggccgtcggacataacaaattacagaatttacacaaaattctgttttttaaaaaatctgacatttacaaaacaaaaacagattcatgcacatatacacattcacattcacaatcacaaatatacacattctaataagtattcacaatcacaaatattctcacataaataataacattcacaaatttaacatcaacatataggttcgacggttgttgcaaactgaaattgtgtctcacaaacaagtgttgcaaagtgtttcataaataaacatcacgacacatcaatcatatccatcgtctggatggttcgagtagccacctcctccggctggactctgcgtgttgaataggttgttgacccacgaatgtgttgtgtcgtcttgcccagacccatctccaggtgcggcaactgaagcgggtggtgtctgaaatccctataacacaagcac

SEQ ID NO: 6822 - DNA, 1065 bp, Zea mays
  Zm_smallRNAprecursor_2311
gttgtctgccattcaagtttggtcgcgtcttcatcaactttgttagacgcaccggtgcagaccacatccatactaggctgcccgttgtctgccattcaagctggttccatcaataaagggatatactgttagtctgatatactggttccatcaataagggaacttggagaaaaggtgattcaaaagaaatcgagcccaaacccccctacggggcaggatcgggtcgggaagcaagctcgcagatagaagggcactttccaatgcagttagacggagaaggcatggctgcgatgttataatgctgaaggaccccaagaagagattatgccctatagtctaccacctctcgttatttgtgggcttcaccgagggcgggaaacattaggtgacatcaaacgacctttgggctggggacgtctgcgagcttgttaaggggccagacgatggtgagccggtgtactctgtccggatgtgtggtcacaaaatttaaagccgccccgacttcatctgtgcgcttctcttctcttatgtcggctactaagatcacttagcaccccacctaagagaagagaagcacacacatgcagccggggcggcttttaattttgtgaccacactgttagtgcttgctctcagcagcaaggaggccaacaagggtgaacagtggcgacaacagggttacgtgctctggggcaatagctctgttaatctcgcctctcacgggcactgtgcgggggtatttattggtatccaagtgcccagcgccttgtgttaaggacgcatgtgccctcagacacctagtttatccccggaatattcccataaagcagggttacaagctgtaattacaagtatgcctttacaaattaggcccgtaacacaaaggcagccacgcagggcccgttacaatgggccggatcacatgtgggcctcgggactgaatgaagccgagccgcgggaaggcgttgccgcaggccttcgtcaaagtgccgaatcgagcgaagggtgtccctacctgctttgtctctgtcagaccagcgactgtggcggaggcccagagcgaag

SEQ ID NO: 6823 - DNA, 1165 bp, Zea mays
  Zm_smallRNAprecursor_2312
cgattaatgtgacctttaaatattcatataaatatatgaatatttaaagtagccattgattcgtaatattcttgtgctataaatatttagcggaccaagatattgaaacatatacggcttcaaatataaatatctatacaaatatatggccaacaaacagtcaccatataatgtgatttatatgcatacacctgttaatcgttatatttatttagctagatgaatagatagcagaaaacatgacacgtgcaaatgactaattgtcgataaaaatgtaaataaagcacatataaaacgtaatttaattttatctaagttaatatatgtagataaatatagtaagatagcgctatttaaaacagcaataacaacaaaaaaaataaaatatagataataaataaatatattaaaataaaaaaaataataacataagaaagggcatgggcacttgggcaacatcggcgcagcgccctcttagggggtgtttggttaccccaaactaaaatttagcccctgtcatatcgaatgtttgaacctccgttccgggtattaaatgtagtcggattataaaactaatttctcagccgaagattaaaagacgagacgaatctagtctagttagttgggtctatatttcatactcctatttgaaagtcaaatgcttgatgtgacccggactaaactttagtccctacaaccaaacacccccttaccagaagattctctggcgtgcatgactaaataaagagaaataaaaaaagagaaaaatatcagaatatatggttaacttttccacgttcacgaatcacgagcgcaagcccgccagcgtgtttcttgccgcacaaatgtttgaacgcttccccacgcaaccggcgaagcagaaagcacacctcctaacgcacgtctccgtgcccatgaacgcacgtctgcagttttagtgcttgcttttcccgccccgcgcgcaatacgacatacacttttttcccgctcactcgttcaagccgctgttttcaccgtctataaataaatgtccaccgacagataagcgggccgaaacaaaaaaaacacagaactgccgtcaggctgatgtgttcactcgacgatttcgaaaaggcaaaaaccatccctaggctgctactgcgccgatacaaaaaacaaaaaaaag

SEQ ID NO: 6824 - DNA, 1063 bp, Zea mays
  Zm_smallRNAprecursor_2313
aagatctacacacatgcaaagcaaatcaatttcttccttttcttttcttcagaaactgggataactttttggaagagatcgaacagtatatagattcagggagcagatcaaggattatatatatagctagtatgtgtacatatcaaaagggcaagaaaagtacaaaaaagcatcggatctccattatatatatacaacagctatataacaaccacagaagaacagtaagcacgcacatggtaaaattaaaatagcctggcagctgctatggatgtatgcatcagatgcctaatatatatgcaagataataattaataagcagctcaagcaaagacagatcaagagttcgagacagcaggttggaaaataaaatacagatcatatgaagtaaaaccttgacttgagatacgaatgatgaagctgcatgggtaaagtaaacaaggaaaggatcggagggagcacccttcagtccaagcaaagacggtgcgagatcgaagcttttacctcccgcttcattcactcatctgcgaagctcgtttccatggccgtttgcttggcatgtgggtgaatgagtcggcagctaatccgaccctagcaccgcccctgagtggactgaaggacgctctcttccatccggccggcgaccatcgatcacaaccatgacgccgcgcccggcggcaaatatattaacaagaaatgaaatcaaaagagagaggaagaacaaacatgatgcgcagctgcgctagctagtgcttgatctgtctgaccacctcatggcgcgcagtgtttagttttctccctggatcttgcgaagaaggcgatggattttcgatggttgcaaggaggagcgaccgagaaagggtttatataatatgtagacggcaaggcactggacaaggccattaaatagggtcaagtaagcattataagatgtgtaacttaacagtgtgagaagaaacaagaggggagaggagacacagggccagtcaaaggggcccaaaggccaaaccctaacaggataccgcccaaaaacaatgcactgatagcgtggtagaggcctcca

SEQ ID NO: 6825 - DNA, 1063 bp, Zea mays; identical to SEQ ID NO: 6824
  Zm_smallRNAprecursor_2314

SEQ ID NO: 6826 - DNA, 1064 bp, Zea mays
  Zm_smallRNAprecursor_2315
aagatctacacacatgcaaagcaaatcaatttcttccttttcttttcttcagaaactgggataactttttggaagagatcgaacagtatatagattcagggagcagatcaaggattatatatatagctagtatgtgtacatatcaaaagggcaagaaaagtacaaaaaagcatcggatctccattatatatatacaacagctatataacaaccacagaagaacagtaagcacgcacatggtaaaattaaaatagcctggcagctgctatggatgtatgcatcagatgcctaatatatatgcaagataataattaataagcagctcaagcaaagacagatcaagagttcgagacagcaggttggaaaataaaatacagatcatatgaagtaaaaccttgacttgagatacgaatgatgaagctgcatgggtaaagtaaacaaggaaaggatcggagggagcacccttcagtccaagcaaagacggtgcgagatcgaagcttttacctcccgcttcattcactcatctgcgaagctcgtttccatggccgtttgcttggcatgtgggtgaatgagtcggcagctaatccgaccctagcaccgcccctgagtggactgaaggacgctctcttccatccggccggcgaccatcgatcacaaccatgacgccgcgcccggcggcaaatatattaacaagaaatgaaatcaaaagagagaggaagaacaaacatgatgcgcagctgcgctagctagtgcttgatctgtctgaccacctcatggcgcgcagtgtttagttttctccctggatcttgcgaagaaggcgatggattttcgatggttgcaaggaggagcgaccgagaaagggtttatataatatgtagacggcaaggcactggacaaggccattaaatagggtcaagtaagcattataagatgtgtaacttaacagtgtgagaagaaacaagaggggagaggagacacagggccagtcaaaggggcccaaaggccaaaccctaacaggataccgcccaaaaacaatgcactgatagcgtggtagaggcctccat

SEQ ID NO: 6827 - DNA, 1126 bp, Zea mays
  Zm_smallRNAprecursor_2316
cataagaccattgcactcaaacaaagatccaaatcaaacatttcaatcaatcaccatcacatggttgttatttattaataggataacttaaaaagagtatcaacgtctaacgcgaagtataacttattacatcatgactcaaaactcctaaagcagcctagtgacggatccgggctctccatagcgcagcctcttgcggggaggagacaacgccatggcggggacctgagcttcgggcggatccagtccttacagttgggcttctagggctgcaatcctggcgtgggcattctccagctccaagtgcaccctgtagagatccagggtggcattgtccaggtcggtgttgagaccggccactacaccagctagggtgttgaggcgatcctcaccagcttcacttgggacgatgttggtctggcttcctccacgcagacgctgaggaagatgcctgaacctcgtgttctgcaactgctgccggtaggtgtggctgagcgaccacagggtccgacgggcagcatcattgaccgaggcagcgtaggtggacagtggtgtcagggaccgagacagagtcctgaatcccctgtcccctgcatccatcaccctgacgtggatgcgagtgatgtagtagcaagcccggggaggcttgctcactcgccttgtttcgtacagggggcggacgtaggtgcctagcgcgtgcagcacttcttgcagcaggttggggaagtacctcgtctcgaacattgatgtgtaatgttcgacaacaggagcaaaccccatgaagttgtcctgctgggcgtagtcagcttcctcgtggacgtgttcgtctccaccttcttcgtcgtcatcatcctcgtcatcgtcgtctccagagtcgtcgggatcgtctcctccaggtgcaggtgcttggaaggctggtgcagacggtgctgacgtcgatgacccagctgcgaaggccagggactctgccaacggggtgggcgtcggcagctgttcctccgagctatcctctaggttgactacattctccactcagataggagggagatccgccggaatttcctcgactaccactgggtagaccgggatctgccggggctgaggggcatagctggtgttgatgcgg

SEQ ID NO: 6828 - DNA, 1171 bp, Zea mays
  Zm_smallRNAprecursor_2317
aacaagctcaaaagagatgtcgttagtaatacaagcaccaatttcccttttataacactttgaatatatataaagtaggcagttactaaaacaaggaaaccttattatatgaactaaatttctcttaatattccatgcttaattttaacaaattaaacatgaatgataaattgattaagttcaaaggctaattttaaatcatgtcatggtgagtatttaataaaattaatccaaatgtacaagagagaatacatcacatagttttggattgttcttctttatacgtttaattgcatagtccatttgagaaactcattctcatgctgtgaaactacatagatcacttaggtaaaaacattagtttcacaactctagtcatatagagaattccccttttgataagtgctttaagaatttgaatttcttacttagcaccttattcattcacgaacacggggtttttatcttttatgtctagatcatggcaataatagagtaatcaaattgaaatgtgccaagaaatacttacaaccaatttaagaatttggattgccatatgtaataaagaagattatgcaatctgctatatgataaccccaattttgatcatttttggtcttgatcttcaacttggagtaccaagataagtgccaaaatatttctcaacaaatatccttgtaccccttcactttccatgattatagatcaattcaaaaccaaactatggtctctcaaacaacttataagatttatcctatatgagagccttccaatcaaagtgactttcaatatttcaaatacttgtcacttatgacagattctgtatactccaaagaaacattcataaatttcgatgtacagatcctatgaccacgaagattggtggagatgtgctttaataagtctgctaatatctgtaaaaagttgagacacatttgacttcatatgtgctgccagccacaacatctcccacaataggtacatgctgaaaactgatgtgtttgtgctgacaagattgacttaatcaagaagtttcacttatccaatgattatgacatttgcacagactttgctatcatatgcatagagcaagtaaactgaatttcaagccaatacaaatagatttgatcactcaaacatggctatgagcacagccttgtcagattttcat

SEQ ID NO: 6829 - DNA, 1128 bp, Zea mays
  Zm_smallRNAprecursor_2318
ccataactgtttaagcataggatatgttgccaaaaaagcatagaggtggatcatgtttctcgcctttgttcccgttcttttcttcgggtaccgaagcatcggaagctcacgctcatctccatcgatctcctgtccatggtgaggatcactggcgccttggccgctcttgttagttgcgctcctgctcggcctccgccggcagcaactctgggcaccggagccgcagaagccaacaccaaacgcggacgaacggaggagcacttttgcagggctgactgaaaccggaaagttgaattaaatgatgcggatgttttacagcagtcattacaatagaattgttgtaaaccctattgcagggacctgcggtgtttattagtactggtgcaaagacagccaaattagtgtaggacttgtactgagaaaagaatgcaggaaaaaaaattatacaaaaccataacgagagagagaaagagagaggataggtggatgggagacggtgaggagccagggaagaggcagtgcaggggagggagcaacaacgcctgagtgtgtttgtggtgagtccctccattttgtgagcgagcaaacagaaatcaaatttggaattctgttgatggccccctacccatgctctgcctcgtccctgtctccgatcaaacccaacccacctctcgctctccttacctgtgtgtgtctgtgctaacgctaaaggtaccaactccatggaacattggagatctatatatacacgcacgcagcaaagaattaacttgccgcagcgcagtgcagtacagtaccgctagagaagcaggcctcgctggctttgtttcgtcagtacaactcgtactgcaatgcaacacacccaaaccatgtgagacgcccggctgcccccgccagtacgtaccgcaagcagcggccatgccgtacatcttcctcctcccggtttgtcaaaggcacgtcaccaatccggcaaactgcatcaagtctcccattttgatttctgtcactgtttcaacgaatatgtacctgcctcaccaaattactgtgacacatatgaattcagatggatacgtagacatccaaatatatattacaaataaggtagatacgtagacgtcctaatcagtt

SEQ ID NO: 6830 - DNA, 1129 bp, Zea mays
  Zm_smallRNAprecursor_2319
ccataactgtttaagcataggatatgttgccaaaaaagcatagaggtggatcatgtttctcgcctttgttcccgttcttttcttcgggtaccgaagcatcggaagctcacgctcatctccatcgatctcctgtccatggtgaggatcactggcgccttggccgctcttgttagttgcgctcctgctcggcctccgccggcagcaactctgggcaccggagccgcagaagccaacaccaaacgcggacgaacggaggagcacttttgcagggctgactgaaaccggaaagttgaattaaatgatgcggatgttttacagcagtcattacaatagaattgttgtaaaccctattgcagggacctgcggtgtttattagtactggtgcaaagacagccaaattagtgtaggacttgtactgagaaaagaatgcaggaaaaaaaattatacaaaaccataacgagagagagaaagagagaggataggtggatgggagacggtgaggagccagggaagaggcagtgcaggggagggagcaacaacgcctgagtgtgtttgtggtgagtccctccattttgtgagcgagcaaacagaaatcaaatttggaattctgttgatggccccctacccatgctctgcctcgtccctgtctccgatcaaacccaacccacctctcgctctccttacctgtgtgtgtctgtgctaacgctaaaggtaccaactccatggaacattggagatctatatatacacgcacgcagcaaagaattaacttgccgcagcgcagtgcagtacagtaccgctagagaagcaggcctcgctggctttgtttcgtcagtacaactcgtactgcaatgcaacacacccaaaccatgtgagacgcccggctgcccccgccagtacgtaccgcaagcagcggccatgccgtacatcttcctcctcccggtttgtcaaaggcacgtcaccaatccggcaaactgcatcaagtctcccattttgatttctgtcactgtttcaacgaatatgtacctgcctcaccaaattactgtgacacatatgaattcagatggatacgtagacatccaaatatatattacaaataaggtagatacgtagacgtcctaatcagttc

SEQ ID NO: 6831 - DNA, 1124 bp, Zea mays
  Zm_smallRNAprecursor_2320
taactgtttaagcataggatatgttgccaaaaaagcatagaggtggatcatgtttctcgcctttgttcccgttcttttcttcgggtaccgaagcatcggaagctcacgctcatctccatcgatctcctgtccatggtgaggatcactggcgccttggccgctcttgttagttgcgctcctgctcggcctccgccggcagcaactctgggcaccggagccgcagaagccaacaccaaacgcggacgaacggaggagcacttttgcagggctgactgaaaccggaaagttgaattaaatgatgcggatgttttacagcagtcattacaatagaattgttgtaaaccctattgcagggacctgcggtgtttattagtactggtgcaaagacagccaaattagtgtaggacttgtactgagaaaagaatgcaggaaaaaaaattatacaaaaccataacgagagagagaaagagagaggataggtggatgggagacggtgaggagccagggaagaggcagtgcaggggagggagcaacaacgcctgagtgtgtttgtggtgagtccctccattttgtgagcgagcaaacagaaatcaaatttggaattctgttgatggccccctacccatgctctgcctcgtccctgtctccgatcaaacccaacccacctctcgctctccttacctgtgtgtgtctgtgctaacgctaaaggtaccaactccatggaacattggagatctatatatacacgcacgcagcaaagaattaacttgccgcagcgcagtgcagtacagtaccgctagagaagcaggcctcgctggctttgtttcgtcagtacaactcgtactgcaatgcaacacacccaaaccatgtgagacgcccggctgcccccgccagtacgtaccgcaagcagcggccatgccgtacatcttcctcctcccggtttgtcaaaggcacgtcaccaatccggcaaactgcatcaagtctcccattttgatttctgtcactgtttcaacgaatatgtacctgcctcaccaaattactgtgacacatatgaattcagatggatacgtagacatccaaatatatattacaaataaggtagatacgtagacgtcctaatcagt

SEQ ID NO: 6832 - DNA, 1124 bp, Zea mays; identical to SEQ ID NO: 6831
  Zm_smallRNAprecursor_2321

SEQ ID NO: 6833 - DNA, 1124 bp, Zea mays; identical to SEQ ID NO: 6831
  Zm_smallRNAprecursor_2322

SEQ ID NO: 6834 - DNA, 1124 bp, Zea mays; identical to SEQ ID NO: 6831
  Zm_smallRNAprecursor_2323

SEQ ID NO: 6835 - DNA, 1125 bp, Zea mays
  Zm_smallRNAprecursor_2324
taactgtttaagcataggatatgttgccaaaaaagcatagaggtggatcatgtttctcgcctttgttcccgttcttttcttcgggtaccgaagcatcggaagctcacgctcatctccatcgatctcctgtccatggtgaggatcactggcgccttggccgctcttgttagttgcgctcctgctcggcctccgccggcagcaactctgggcaccggagccgcagaagccaacaccaaacgcggacgaacggaggagcacttttgcagggctgactgaaaccggaaagttgaattaaatgatgcggatgttttacagcagtcattacaatagaattgttgtaaaccctattgcagggacctgcggtgtttattagtactggtgcaaagacagccaaattagtgtaggacttgtactgagaaaagaatgcaggaaaaaaaattatacaaaaccataacgagagagagaaagagagaggataggtggatgggagacggtgaggagccagggaagaggcagtgcaggggagggagcaacaacgcctgagtgtgtttgtggtgagtccctccattttgtgagcgagcaaacagaaatcaaatttggaattctgttgatggccccctacccatgctctgcctcgtccctgtctccgatcaaacccaacccacctctcgctctccttacctgtgtgtgtctgtgctaacgctaaaggtaccaactccatggaacattggagatctatatatacacgcacgcagcaaagaattaacttgccgcagcgcagtgcagtacagtaccgctagagaagcaggcctcgctggctttgtttcgtcagtacaactcgtactgcaatgcaacacacccaaaccatgtgagacgcccggctgcccccgccagtacgtaccgcaagcagcggccatgccgtacatcttcctcctcccggtttgtcaaaggcacgtcaccaatccggcaaactgcatcaagtctcccattttgatttctgtcactgtttcaacgaatatgtacctgcctcaccaaattactgtgacacatatgaattcagatggatacgtagacatccaaatatatattacaaataaggtagatacgtagacgtcctaatcagtt

SEQ ID NO: 6836 - DNA, 1123 bp, Zea mays
  Zm_smallRNAprecursor_2325
aactgtttaagcataggatatgttgccaaaaaagcatagaggtggatcatgtttctcgcctttgttcccgttcttttcttcgggtaccgaagcatcggaagctcacgctcatctccatcgatctcctgtccatggtgaggatcactggcgccttggccgctcttgttagttgcgctcctgctcggcctccgccggcagcaactctgggcaccggagccgcagaagccaacaccaaacgcggacgaacggaggagcacttttgcagggctgactgaaaccggaaagttgaattaaatgatgcggatgttttacagcagtcattacaatagaattgttgtaaaccctattgcagggacctgcggtgtttattagtactggtgcaaagacagccaaattagtgtaggacttgtactgagaaaagaatgcaggaaaaaaaattatacaaaaccataacgagagagagaaagagagaggataggtggatgggagacggtgaggagccagggaagaggcagtgcaggggagggagcaacaacgcctgagtgtgtttgtggtgagtccctccattttgtgagcgagcaaacagaaatcaaatttggaattctgttgatggccccctacccatgctctgcctcgtccctgtctccgatcaaacccaacccacctctcgctctccttacctgtgtgtgtctgtgctaacgctaaaggtaccaactccatggaacattggagatctatatatacacgcacgcagcaaagaattaacttgccgcagcgcagtgcagtacagtaccgctagagaagcaggcctcgctggctttgtttcgtcagtacaactcgtactgcaatgcaacacacccaaaccatgtgagacgcccggctgcccccgccagtacgtaccgcaagcagcggccatgccgtacatcttcctcctcccggtttgtcaaaggcacgtcaccaatccggcaaactgcatcaagtctcccattttgatttctgtcactgtttcaacgaatatgtacctgcctcaccaaattactgtgacacatatgaattcagatggatacgtagacatccaaatatatattacaaataaggtagatacgtagacgtcctaatcagt

SEQ ID NO: 6837 - DNA, 1123 bp, Zea mays; identical to SEQ ID NO: 6836
  Zm_smallRNAprecursor_2326

SEQ ID NO: 6838 - DNA, 1142 bp, Zea mays
  Zm_smallRNAprecursor_2327
caaaaggcatgcccatggaggaagcttgacgacgaagattgtcgtcagtctcccgctgacgccgtgccacctcatggacatcagcagaaatgttgcggcacatggagaaaaatgccgcaagcccatggaccaagcgagcacccatcccgcggccacgacctcgaccacgaccacgagcacgtggcatgggagagccgcggccaggagagggacgcgaggcagcagcggggggagaggaggatggatgatggggtggctggcgaggtggctcagtggaggaggcagggcctccagaccgtgagggagcccgcttcgtacgagcagctgggttggaggaatcaacccagtagggtacgtagtgggagtgtttgacgggttttttgaagtgggtctgggtgaccacttcgatcatcttcatgataaagggtgcatgaagacaccctctgtgaggagaccaggaagcacggacgatctcttcccagatcatgtcaaacacattgatgcgggcgagactgtttggagcaaggaggaggaggaggactcgactctccccaaggacgttcatttgattaccgccctttgggagaacggtcatccgggacaaagaattaaggtacctgtagtacctatgcatgttagcggttgtccagaactcccgctcagtagagacatgaatgaattttgtctcttcccgcatgggcagccgaatgtcatgcactcgcatgttgctgccctgaatgtctgcatcagagaagaccagaatatgggcaaaacgacgataactgactttgtgccagttaccgtggatgaagaaatacatgactgggtaatcatacccatcggcttcctcatctactttctttatccagagggtggcatagaactgagctaccacctcatcgttccaggggtattccatggtcataatgttacgtaacccctttctctctaagtttacgagagctgacgacatgtcagcatctcccatattctcacaaccctcccagtcaataaatctatgtcgaacgactgggtgtttcttggaaagaatgacagaattgtagaagtcagcctggaaaagattccagaaccgagggtcctggacaccaggatgacgaggaatgagagtagggttggtaaac

SEQ ID NO: 6839 - DNA, 1058 bp, Zea mays
  Zm_smallRNAprecursor_2328
gcagaaatgttgcggcacatggagaaaaatgccgcaagcccatggaccaagcgagcacccatcccgcggccacgacctcgaccacgaccacgagcacgtggcatgggagagccgcggccaggagagggacgcgaggcagcagcggggggagaggaggatggatgatggggtggctggcgaggtggctcagtggaggaggcagggcctccagaccgtgagggagcccgcttcgtacgagcagctgggttggaggaatcaacccagtagggtacgtagtgggagtgtttgacgggttttttgaagtgggtctgggtgaccacttcgatcatcttcatgataaagggtgcatgaagacaccctctgtgaggagaccaggaagcacggacgatctcttcccagatcatgtcaaacacattgatgcgggcgagactgtttggagcaaggaggaggaggaggactcgactctccccaaggacgttcatttgattaccgccctttgggagaacggtcatccgggacaaagaattaaggtacctgtagtacctatgcatgttagcggttgtccagaactcccgctcagtagagacatgaatgaattttgtctcttcccgcatgggcagccgaatgtcatgcactcgcatgttgctgccctgaatgtctgcatcagagaagaccagaatatgggcaaaacgacgataactgactttgtgccagttaccgtggatgaagaaatacatgactgggtaatcatacccatcggcttcctcatctactttctttatccagagggtggcatagaactgagctaccacctcatcgttccaggggtattccatggtcataatgttacgtaacccctttctctctaagtttacgagagctgacgacatgtcagcatctcccatattctcacaaccctcccagtcaataaatctatgtcgaacgactgggtgtttcttggaaagaatgacagaattgtagaagtcagcctggaaaagattccagaaccgagggtcctggacaccaggatgacgaggaatgagagtagggttggtaaa

SEQ ID NO: 6840 - DNA, 1057 bp, Zea mays
  Zm_smallRNAprecursor_2329
cagaaatgttgcggcacatggagaaaaatgccgcaagcccatggaccaagcgagcacccatcccgcggccacgacctcgaccacgaccacgagcacgtggcatgggagagccgcggccaggagagggacgcgaggcagcagcggggggagaggaggatggatgatggggtggctggcgaggtggctcagtggaggaggcagggcctccagaccgtgagggagcccgcttcgtacgagcagctgggttggaggaatcaacccagtagggtacgtagtgggagtgtttgacgggttttttgaagtgggtctgggtgaccacttcgatcatcttcatgataaagggtgcatgaagacaccctctgtgaggagaccaggaagcacggacgatctcttcccagatcatgtcaaacacattgatgcgggcgagactgtttggagcaaggaggaggaggaggactcgactctccccaaggacgttcatttgattaccgccctttgggagaacggtcatccgggacaaagaattaaggtacctgtagtacctatgcatgttagcggttgtccagaactcccgctcagtagagacatgaatgaattttgtctcttcccgcatgggcagccgaatgtcatgcactcgcatgttgctgccctgaatgtctgcatcagagaagaccagaatatgggcaaaacgacgataactgactttgtgccagttaccgtggatgaagaaatacatgactgggtaatcatacccatcggcttcctcatctactttctttatccagagggtggcatagaactgagctaccacctcatcgttccaggggtattccatggtcataatgttacgtaacccctttctctctaagtttacgagagctgacgacatgtcagcatctcccatattctcacaaccctcccagtcaataaatctatgtcgaacgactgggtgtttcttggaaagaatgacagaattgtagaagtcagcctggaaaagattccagaaccgagggtcctggacaccaggatgacgaggaatgagagtagggttggtaaa

SEQ ID NO: 6841 - DNA, 1058 bp, Zea mays
  Zm_smallRNAprecursor_2330
cagaaatgttgcggcacatggagaaaaatgccgcaagcccatggaccaagcgagcacccatcccgcggccacgacctcgaccacgaccacgagcacgtggcatgggagagccgcggccaggagagggacgcgaggcagcagcggggggagaggaggatggatgatggggtggctggcgaggtggctcagtggaggaggcagggcctccagaccgtgagggagcccgcttcgtacgagcagctgggttggaggaatcaacccagtagggtacgtagtgggagtgtttgacgggttttttgaagtgggtctgggtgaccacttcgatcatcttcatgataaagggtgcatgaagacaccctctgtgaggagaccaggaagcacggacgatctcttcccagatcatgtcaaacacattgatgcgggcgagactgtttggagcaaggaggaggaggaggactcgactctccccaaggacgttcatttgattaccgccctttgggagaacggtcatccgggacaaagaattaaggtacctgtagtacctatgcatgttagcggttgtccagaactcccgctcagtagagacatgaatgaattttgtctcttcccgcatgggcagccgaatgtcatgcactcgcatgttgctgccctgaatgtctgcatcagagaagaccagaatatgggcaaaacgacgataactgactttgtgccagttaccgtggatgaagaaatacatgactgggtaatcatacccatcggcttcctcatctactttctttatccagagggtggcatagaactgagctaccacctcatcgttccaggggtattccatggtcataatgttacgtaacccctttctctctaagtttacgagagctgacgacatgtcagcatctcccatattctcacaaccctcccagtcaataaatctatgtcgaacgactgggtgtttcttggaaagaatgacagaattgtagaagtcagcctggaaaagattccagaaccgagggtcctggacaccaggatgacgaggaatgagagtagggttggtaaac

SEQ ID NO: 6842 - DNA, 1040 bp, Zea mays
  Zm_smallRNAprecursor_2331
ggggaagtgaccgcacaggggaaaaatggcgcgcctgacacacaaacaaacaaaaaaaggtggcgcgaaatgaccggtcagaaaaaaaaaaggttactggcacgctggcaaggcagtggcgaagcgaccggacacaaaaatgctgcgcgacaaaagaaaaaggtgcagcgcgacaaaaagggcaggtgacagacctgcgaccggtcaaaaaggtgctgcgcgactgaaaaaattgcaggtgacagacctgcgcagacaggccggtcagagaccggttcaaccggtccactatgccggttcaaccggttttaaccaggatggtcctggtaaaaactggttaaaaacagctgagctgaagttcagctgctaagttcagctggcctcctccagctgaactagaaagttcagctggtcaagccagttgaacccaaaagaaatcttagcactaaaatgcattcaaattttaacattttcaccaagtttttgaaagatcatcacatagctttaaaactatcaatcaaaaacagtgaatcaaacaatttttgtgaccgttttcaagttaagttacgagaatccaagatatttaattcactcctaagaaagcaaaacctagtctcatcgaggggttttgtgaagatatcggctagttgattttcggtgctcacatgaaacaattcgatatctcctttggcttcgtggtctctcaagaaatggtgtctgatgtcaatatgtttagttctagagtgttgcacagggttgtttgcaagttttatggcactctcattgtcacacaaaagtggaattttgttaaactcacaaccaaaatctcgaagggtttgcttcatccataacaattgtgcacaacatgccccagctgctatgtacacagcttctgcagtggaaagtgcaacacaattttgtttcttggaactccatgatactaaggatcgcccaaggaattggcaagtcccagtagtactttttcgatctactttgcaaccggcataatctgagtcagaatagccaagtaaatcgaaaag

SEQ ID NO: 6843 - DNA, 1040 bp, Zea mays
  Zm_smallRNAprecursor_2332
cagaacaaataaaaaaagtggcgcgcactgacgctgctgagcggcagcaagcagaaaaaaaataatctgcgcgcccagcagaggaagtgaccggtcaataaggaaaagaagaaaaaaaaatgctgcgcgccctgcaggatgcgaccggattaaaaaaaatttgcacgccaggctgccagcagagatggaagcgaccagtcaataaagaaaaagatgctccgcgactgaaaaggctgcagctgacagacctgcgcggacagaccggtcagagaccggttcaaccggtccactatgccggttcaaccggttttaaccaggatggtcctggtaaaatctggttaaaaaacagctgagctgaagttcagctccgaagttcagctggcctcctccagctgaactagaaagttcagctggtcaagccagttgagccaaaaaaattttagcactaaaattcattcgaattttaacattttcaccaagtttttgaaagatcatcacaaagctttaaaactatcaatcaaaaatagtgaatcaaacaatttttgtgaccgttttcaagttaagttacgagaatccaagatatttaattcgctcctaagaaagcaaaacctagtctcatcgaggggttttgtgaagatatcggctagttgattttcggtgctcacatgaaacaattcgatatctcctttggcttcatggtctctcaagaaatggtgtctgatgtcaatatgtttagttctagagtgttgcacagggttgtttgcaagttttatggcactctcattgtcacacaaaagtggaattttgttaaactcacaaccaaaatctctaagggtttgtttcatccataacaactgtgcacaacatgccccagctgctatgtactcagcttctgcagtggaaagtgcaacacaattttgtttcttggaactccatgatactaaggatcgcccaaggaattggcaagtcccagtagtgctttttcgatctactttgcaaccagcataatctgagtcagaatagccaagtaaatcgaaaag

SEQ ID NO: 6844 - DNA, 1172 bp, Zea mays
  Zm_smallRNAprecursor_2333
atctaagattgcaattcttccatgtttccgcagtagcatattgttcccatggagctagggtccaaaataggaatcaacaagtgtttccacgactctaccgcccggccaatcctgttccactgaatcccctccctttttcatggccacatatctttacggctaaggagtgggaaatctttctcctgttacacaaatgaaatgtttcatttcatccgggaaaagccacctctttctccacaaacaatgtctttgtcatttgatccaggagccttccgttagataggaacagctttgctaaatactgagaactctcggatagagtattagaatgaaaagaccattaattatataaggaagagcccagggttctagcccattcccattcctaaatcaataattcgtagtgcttttgcctttcttgcgtactcctggtgaaccagttgctagccatatgtttaggaggcttttttctccaggtactggtactaagccgctttgccatctcttcatcttcatctgcaaagaattctcgacgtgaaaacacagagacaaaggcctgatctttgaataggaaaaagaatggatccgaaggtcccaaatcaattggcttattcgaaaaaagccttcttctttgaaagatatatctcgtgtctggtactgcattgttccactctgcaagaagtccgaatcagtctcttgcacctccccctttttatgataaatataccagaaataattcgaataaatagcagtctctgacaactcatcctctttaatctgcttggacccgctccaatacccataggaaaatccccagtcatattcagcgtacctgtccctgcaatcaaatagattgtcccaagggccccatattctaggagcccaagttatgctattgaaaattcgttcctctagcagttccggtttgaccattccgttccctttttcaaactccacttcttttcatatagcatccctaatcaaagagagaacaatatccatttcaaaacatttctaacggattccttggttcggaccgacgaagtaatggcactcgattattatcaacccgactgcaatctttttctgtcggtaaggattgcaccagagcaccttctacttcctaataggccatgaactatagatagagagatcattctgggcgagtccat

SEQ ID NO: 6845 - DNA, 1076 bp, Zea mays
  Zm_smallRNAprecursor_2334
tagctgacgattttttttttgctctccacaaaccctcctcttggttaaattcgctcgctcgtattggatgatatacaagaatacaagatgcatggtggtcgctagctagctaagtagcttttggcgcgcgcaccgatctcatcgttcatttatgaggtgtttggtttgatgaatcagtctatcaaaaatgaagtggtgtattatggattcattcctcaaatttggtgggatgactccatttcacatattagtactaaacaaataactatgaggaatgaggtgatgatggattaactcactccattccacaaaccaaataaaaaagtgaggagtgagaagatgatggactacatcattcctcaaaccaaacactctattagtttcctcgctctccttggcaatgcatagctctgcgcgccgtattacttattacagcgatgtcggcgggtggcaagcactacagtaaactaacaaaaatccgacggtcaatttatctccgacggctgtctacgatgccgtcggacatagcgttatgtccgacggccaccaagcactctcggaaatatcgccttatctccgacggctaccctgacagccgtcggacataagcttatgtccgacggcctcgtacgtagccgtcggaggtaatgttttttaacacggcaagcccggcgcgcggttcattttcatgcgcgctcgctctctcctctctttctttctgcccgtagccgccgccgccgtgctgtcaccgccggtcgccgccgccgccccgcccacccgccgcccgccccatcaccgcccagcgccgtcaccgcccggcgccgtctccgcccggcgccgccgccgccccgtcaccgcccgtcgccgccgccgccccgctcgcccgccgtccacacccgccgcccgccccccgtcgacacccgctgccggccgccactgccctgcccactgctaagtaagtatttttatttttattttgtagttttcactgtttttattaaattattagtatgttaaataatgtttatcttattatatccgagggcctaaatttgattatatggcgaaatttggtt

SEQ ID NO: 6846 - DNA, 1040 bp, Zea mays
  Zm_smallRNAprecursor_2335
ggtttgcgacattcttctccatgtgccgcaacatttctgctgatgtccatgaggtggcacggcgtcagcgggagactgacgacaatcttcgtcgtcaagcttccaccatgggcatgccttttgtccctcgctcgcctgacgtgcctctccatcctcctcccccggagatcaatgagtggcaccagcaggcctacggggtgccatttatgtctgcagacgatgaagaagaagaagcctatgttgatgatcgcgaggagtttgccctgcctccctaccatggggatccgggtcaatcatcctctcaccctccgcctccctacccgggtccgggacccattcatggtgaccctaggccatccggctctggttaccatcaccaccctccacctcctcctgatcatcgtacatcttcggcatctgttttttctacggctgatgagccacctcgggactccacatttgaggaggacgtgatgaggaccctcttccctaactacacttcataccctccatcatatcctccgtcatatcctcctcctggaggatattgattcatgtatccttgtctctctctctgtttttggtacttgttgctaaaaagggggagaaaatcctacctctagtttgtggttctttcggttttcttttggattatttttgttttggccactgttgtggcttgtatcctcttaccattgtatgaaataaaactgttgggttgttattcaaagtaatatgatggtcttctggccatcatcttttgtcctatcagtttgtaatgactactctgctatgaagtaaaaatgatgtgtatttagagatagtcatgtgcatcacaactcatgttatgacattcttgcacccctcggatgattgtatttagtatggtttttgtcactatctctaaatgtgttgctcacatgacatattatgtcaaaacgttggattcacaatcgtgcacacatttagggggagccatctacatacaatcattcaaaagaaattttatattgcaaatgtatatcttcttgaccttaatt

SEQ ID NO: 6847 - DNA, 1120 bp, Zea mays
  Zm_smallRNAprecursor_2336
tactggtattatatattcccgttgcaacgcacgggcattcagctagtaattttagaagtttttggagatgctgtgtaagttgattcatattggaccaagagactgcccaagacagtgaacacaacaattcttccttgccgattgaaccctggtacggtaagtaatttacatcatggtacaaactggaaccagtgcgcgctcacgtgcatccgaacacctagatatccgcagcggtggccggtgggcggtggcgcctccaccccctcacttgccgggcacaaagttggtggcataggcccatgcgttgttgttgacggggtcggcgaggtggtcggcgaggttctcgagcgggcccttgccggtgacgatggcctggacgaagaacccgaacatggagaacatggcgaggcggccgttcttgagctccttcaccttgagctccgcgaaggcctcagggtcgtcggcgaggccgagcgggtcgaagctgccgccggggtagagcgggtcgacgacctctccgagcgggccgccggcgacgcggtacccctcgatggcgcccatgagcacgacctggcaggcccagatggcgaggatgctctgcgcgtggatcaggctcgggttgccgaggtagtccagcccaccctcgctgaagatctgcgacccggccttgaaccacacggcctcgccgaacttgacgccgttgcgggcgagcagctccgggaacacgcagcccaacgcgcccagcatggcccagcgggagtggatgacctccagctcccggttcttggcgaacgtctccgggtccgccgacagccccgcggtgtcccagccgtagtcgcccgggaactcgcccgtcaggtagctcgggggcgcgccggacagcgggcccaggtagagcacgcggtcggggccgtaccacgggctgccggagctcgccgccggctttgccttcgccgccgtcttgcgcatcgtcacgcgggcctcgccgaagagagacgacggcacgttcactgccttgccggcgaaggctgtggaggagagggccatggtgctgctcgccattgcgctgcttctgcttgcactggttttatgtgatggcgaggagtgtgaagacttgaga

SEQ ID NO: 6848 - DNA, 1224 bp, Zea mays
  Zm_smallRNAprecursor_2337
aattattagcaagtgaagagtcagggatattcccgagaaaagttttgctgagaccacaatcttcacaagcttcttttggagctacagtgccattccattcttgtaactgacgaccaataatagaaaagcatggctgagctaatgttgtccaaatcatcatcaggttctgttcagaaggacaacctttgcatgcataacgaaccatcctgtctatgtcctcgtggatatgaagattagtatctgtaaatacattttctgagatcaaacttgattggttgttgcaatcagaaatatgtttatccccattcttcagtcttgccatgttgatttctctagcttcagcaagcaatgtgtaacgcacccactggaccagtccgccaaagcccaccatcaccagcgtcgggcgttcatgcgctcgcgcgcagcctattcagacgggcacctcgctctcaaaacctaggctaagagaggagggaggcccgcccttataagtgcaggtggtactaacccagggcgtgcataccggtcccttacatcccacccccctaagaggcccaaagctctcccaggcagcagcggcaatgtaggctccgataccatttgtaacgcacccactggaccagtccgccaaagcccaccatcactagcgtcgggcgttcatgcgctcgcgcgcagcctattcagacgggcacctcgctctcaaaacctaggctaagagaggagggaggcccgcccttataagtgcaacacggcccccttggctaggtgaggtggtactaacccagggcgtgcataccggtcccttacacaatgctgcaattgaaacacagacgagaacattgaatattaaaaatatgcaaaactttgatgactcgaggcaactcaggctcagcatactgtaatgtaatacaaatcacatgtatcttgttgagctgttatcgacaataccttttggcctcattctccttttgtccaattgtttgaaggaggagctgcgatgatcaagtgatctgtagtaattattggcaataatatttgagcatgctttattcaaagataattgtgcctgttccaaatcttctatcttctggtttaaacgagactctagaataacaagagctatacgggtatcagttttctgtgacaaagcatcaagcatgtcgagcccatgttcatcatataactgttcgatgcacctcctatgtaaggctttgcacaggaaaa

SEQ ID NO: 6849 - DNA, 1051 bp, Zea mays
  Zm_smallRNAprecursor_2338
gatatgaagattagtatctgtaaatacattttctgagatcaaacttgattggttgttgcaatcagaaatatgtttatccccattcttcagtcttgccatgttgatttctctagcttcagcaagcaatgtgtaacgcacccactggaccagtccgccaaagcccaccatcaccagcgtcgggcgttcatgcgctcgcgcgcagcctattcagacgggcacctcgctctcaaaacctaggctaagagaggagggaggcccgcccttataagtgcaggtggtactaacccagggcgtgcataccggtcccttacatcccacccccctaagaggcccaaagctctcccaggcagcagcggcaatgtaggctccgataccatttgtaacgcacccactggaccagtccgccaaagcccaccatcactagcgtcgggcgttcatgcgctcgcgcgcagcctattcagacgggcacctcgctctcaaaacctaggctaagagaggagggaggcccgcccttataagtgcaacacggcccccttggctaggtgaggtggtactaacccagggcgtgcataccggtcccttacacaatgctgcaattgaaacacagacgagaacattgaatattaaaaatatgcaaaactttgatgactcgaggcaactcaggctcagcatactgtaatgtaatacaaatcacatgtatcttgttgagctgttatcgacaataccttttggcctcattctccttttgtccaattgtttgaaggaggagctgcgatgatcaagtgatctgtagtaattattggcaataatatttgagcatgctttattcaaagataattgtgcctgttccaaatcttctatcttctggtttaaacgagactctagaataacaagagctatacgggtatcagttttctgtgacaaagcatcaagcatgtcgagcccatgttcatcatataactgttcgatgcacctcctatgtaaggctttgcacaggaaaaaaacaaaggaaaagaaacaacagttagtcaatttgaacaaaaaacttgag

SEQ ID NO: 6850 - DNA, 1174 bp, Zea mays
  Zm_smallRNAprecursor_2339
atatatatatagtttatctattaagagccctgggctctatataactgtagagagccccagcccacgtccgatcactttttacgcaagcgaacagatttatcgtaaacggaaacccattttagcgtaaacagagtaacaaccacgagccctacatgtttacgctattccattcttccgtttatacataatagtgatttagcataactactccagccgacccacgttccagaaataaaggaatgggcccactaccccacttcccacgcggtcaaacacttctataccctaacccccgcgcggtcaaccatcctggccgactcgccgcgtttcttcagcggtcgcctgggcgattcttgttcatccgccgccgccagcccgtttcgccgtcctccatcgccgcacgccctcaacattaatcgccgccgccgttgacagcatcgtcgagccgctgccgttgtcaatcttgcgcgccccgcgtcacattggctcgcgtccgcggtcgctatgtcgtccggattccaaggtgctcgagttgattttttaattttatgctttacaatgcaacttcctaatctctttccccactccggcagtgtgaatcgctttcatttgtctccgcgcgaactcaaccctaataggcgccgccgttgacagtgtcgtcgagccggccgctgctgtcaatcctccgccaccgcgtcctataggtatttcacatgcccaccaacggtcttcattgatcttactgttcttgtgcgattatggttcagttatttatcatagagctttaggtttgataaaggttcacggacctgttcttttagactcattgtatgctcaaattgtgtgggtgaagatatatgcaatgatgtgaattatacatacctttatgaagtaggggttgatattttgatgtggaaacaagtgtagtggggaggttgaattatgtaccgtgatagaccggacaggcccttgggcttccttgtatgggtaactttctgcattgataattctactgtttctcataatgtagtctagggcctcggagcatgatccatgtttgcatccaaagttcctgaggttgtttccatctattatgtgttgctcagaaagttttattaactccttgtttcgtatgaagtgagctgcctatatgagaccggtgacaccaaatgcc

SEQ ID NO: 6851 - DNA, 1116 bp, Zea mays
  Zm_smallRNAprecursor_2340
tggccatatgtgcttacggcgctgcgaatttttgcgaacacctgttttttgctcacataggtcttgctgacagaatcatttacaaaaaataccgagttttttctattataacacttgttttaacaggtttctcccttatagtatttttaatgtgaccttctctatagtagtatttacaagtgctattactctttaaaatagtattctcacctctttttattatttcattttcctttatttttcccttctcctaaacttactgtattgcccccaatccccatcacatctgttcgttcgtttcttgatagcattcggggttcgtgctgggcatttggtgtcaccggtctcatagaggcagctcacttcatacgaaacaaggagttaataaaactttctgagcaacacctgatagatggaaacaacctcaggaactttggatgcaaacatggatcatgctccgaggccctagattacattatgagaaacggtggaattatcaatgcagaaagttacccatacaaggaagcctaagggcctgtccggtctatcacggtacatagcaattcgctactgtaacttatatgcataattgctgagcgcacactattagacctgagcttgtaatttgttctttaggtttgtgctgggcatttggtgtcaccggtctcatagaggcagctcacttcatacgaaacaaggagttaataaaactttctgagcaacacctgatagatggaaacaacctcaggaagaaacccttacttcacaacttgtccatttctgtaggactatagccttcaaaaaggaaaaaacaaaagggaatggaatctgcctgggcaatgttatctagtcatctgttagtcaagcttattgcttccttggtgccaatcggttataaactactaattgcaactaatcgtcttatcggtgtcctccccattataagtctaggctaggtttgtcactgcttcattctgaggctgtgactcaatttgtccatacttttgttactttattctaaagatatctatgttatcatcttataggacctagcgccccttttcgtggcggtggtgctccttttggtacagatgtcccatttgtaccaccaggtcc

SEQ ID NO: 6852 - DNA, 1206 bp, Zea mays
  Zm_smallRNAprecursor_2341
tccatttctgtaggactatagccttcaaaaaggaaaaaacaaaagggaatggaatctgcctgggcaatgttatctagtcatctgttagtcaagcttattgcttccttggtgccaatcggttataaactactaattgcaactaatcgtcttatcggtgtcctccccattataagtctaggctaggtttgtcactgcttcattctgaggctgtgactcaatttgtccatacttttgttactttattctaaagatatctatgttatcatcttataggacctagcgccccttttcgtggcggtggtgctccttttggtacagatgtcccatttgtaccaccaggtcctgacatgctcccgacatttgtcaattggagtacctatggagctgtgacaccaatacaagatcagggaggctgtggtaagcatgcaatgtcactacctattagcaattcgctactataacttatatgcatagttgttgagcacacactattagacctgagcttgtaatttgttctttaggttcatgctgggcatttggtgtcaccggtctcatagaggcaactcacttcatacgaaacaaggagttaataaaactttctgagcaacacctgatagatggaaacaacctcaggaactttggatgcaaacatggatcatgctccgaggccctagactacattatgagaaacggtggaattatcaatgcagaaagttacccatacaaggaagcccaagggcctgtccggtctatcacggtacataattcaacctcccaccacacttgtttccacatcaaaatatcaacccctacttcataaaggtatgtataattcacatcattgcatatatcttcacccacacaatttgagcatacaatgagtccaaaagaacaggtccgtgaatctttatcaaacctaaaggctctatgataaataactgaaccataatcgcacaagaacagtaagatcaatgaagaccgttggtgggcatgtgaaatacctataggacgcggtggcggaggattgacagcagcggccggctcgacgacactgtcaacggcggcgccgattagggttgagttcgtgcggagacaaatgaaggcgattcacactgccggagtggggaaggagattaggaagttgcattgtaaagcataaaattaaaaaaatcaactcgagcaccttggaatccggacgacatagcg

SEQ ID NO: 6853 - DNA, 1067 bp, Zea mays
  Zm_smallRNAprecursor_2342
tatatatatatatatatatatatatatatatatataggctatgtagttattactggtattttactcttattatttgagctccttatatgccaatatgcacttcatgaaggggacttagctatgccggtgcaaataatgtagggagcttttgaaacgtggttcttttttcataaatattatagtaaatttataggaatgaatttacttttgaaacgtgagaaaaaaatacatgaatcatgaaaaaaattctaggctccaatggaggccataaaggttcaaattaaattcccactgtcttacagaaatactaccgaggtgctagataaacattatattacaaataatatgcaatacgttcaattcttctttttctaccgactaacataattcgtggaaaggtttctgccgtgctttttattttataaaaaaaacttgaactcgagaaatgatgaaaaaatttcggtcaaacactatatatatagagcctgtttagttcgcggctaactgtgccacactttgcctaagattagtcgtccgaattgaagaactaatcttaggcagaaaagttaggcaaagtgtgacaagttagctagtaaaccaaacaggcccgtagtctacacgcgaagtaagaaatgattggcagtttggcacggtgatcgatctacacactacagggctagccgctgctgctgcactgaacgagacaagatgacagtcggcaccaaatccgggatgacggatttcgcgaggtgcgcacatccatgtcgtagtatcgtaacaaacagatcgtctgcagctgcgcagctgttgggtctcagaaaaatattgccacaatggctaggtgcctaggtgaattgaatagtacagccctagctcaacgcatactatctgtcattactcattactttactgggtaatcccactcttgcaggatcgttctcgagatatcgatccatgcacacgaaccaagaaatgattagcagcgagtaccgtagtcaggagcatgtatgttagtattggtagctgttagtaatctaaaggcgatcaattaattagatagttattgt

SEQ ID NO: 6854 - DNA, 1136 bp, Zea mays
  Zm_smallRNAprecursor_2343
gtggaaggagagcgtcggccatcggtgggttcaccctccgggcgcccgctagacggccgccgctctaggcgccggcgcagggagcatccaagtgcgggaaggcgcgcacgagcgcggagaagctactggtgacttggtgaggcgtcggcttcggccgcctctccgctgtgcttcttcgtcggggacggggagggtgtggtggagatgttgctggctgacggatgccgtctggcgtcgccgtggacggagagatttgggtagcggaaatgatgctacacgagaaagcccatgagactgtcacgggtgactgatgactgggccagagtttggattagcggatccgatgcccccccccccccccccaatttgcaaattagcaacaagaactactgctgcctccagcaaattaccaaaaaggcacctcaataaaaaactgtcatttaggctatctttagcggcaacgactgttgtgcaagcagtatttctgtgcaagcgtgcaagcaaaccatctgatccgttagatcgtgatccaaccgtaggtcacatttaatacttaaacccttccaccactggctcaataatctttataaaaaaacccctaacaaactatggttgtatctgtggttggatcacgatctaacggatcagatggtttacttgcacgcttgcacagaaggattgcttgcacagcagtcgttgccatctttagcggtcttagttcagctttctaatccaacttcgttgtcaaaaatttaaaatcccaatcaaatggatgtcaacaaaatatattcctgaaaacacaacagtttaactttctgatctttgggcttgttctttattaggttggatagccctcaacaagcttttcgaaaagtccaagatcaccgtagagttcgagtcaatagttatagcattttttgtgaagcccgttgtatagcgacagtgtcatgtagacaagcggtagtgtcggacatgtacagctccaaacggctagttttgaacccaatggataattttggacctaggggtatgtatacccatctcatgcccaggggcctgctggtttccagaatatataaaactcatccaaagcatttgtgagcccactctaactactctctttgtaagagtgaata

SEQ ID NO: 6855 - DNA, 1139 bp, Zea mays
  Zm_smallRNAprecursor_2344
agcaaggtgagggctcccacaacctcagctttgtgttctttgtgatcaggaagacgaaaatattcatcatctccctaccagttttgtgtttgctagaaatttctggtacatgatcttctcaggtttgggattggcaataagaactcctaatctgtccgaaaaatcttttgcagggtggtggagagcacccaaacacctgacaaaacctatgagaaagggtgtaaagtcgctggtgaccttaggtgcttggtcgatctggaagcacagaaatgatgtagcttttgaaggtgcccagccttgcttggagacagctctttgatcttttgaagatgagcaccaaaccaccaactgtggtgcttagtgggagttaaaagcttgaaagctttaggtcaagttcttcgagcaggctagttgttaatagtttaggaagtgatcaggtcctgcctaaagggtgtgtgagggaacatatctcgtgcttaaaagggtacgatattcacatgcacattttaaatctagagcatccatcttacattcaacggtaggagctaattttacaaacaacccctcttggctctcgccatgggaaggaggtagaagagttttttttataaaattggtgctgctgttagatatgagatggatgtctcagatttaaaatgtacacgtgagcatcaatccctttgagcaccagatatgttctcttgttaaaaactgtttgtatcgaaacagccccttctagtttaccaaaaaatggaccacttggtaagaagctggtggccgcaatgtaattaaatgaaagaagcacaacataaagcagaacgttggacacaaagaaaatgcattagtaaaacaaactggaacgtatataacaaagtctaacttggcaggtaaaaaaacttttaccactaacctgaattttctgtattcacttcctcaagaatctctgcaatgtattccttggatgaactatgtatactgtttatcttcactttcaatttcgcactttcatcctccagtgaacttttttcattcagtaagagaactaaatcctcatttgaacttttgagcatattggcttgaaaccccatagattcattgatgaatttttccctgatgacacagaacatcaacagtaagac

SEQ ID NO: 6856 - DNA, 1094 bp, Zea mays
  Zm_smallRNAprecursor_2345
tcggcatctgcatagccaactatttgtagggaattagatcttctgtacgtaagcatgagacctttagtaccttgaaggtaccttagagccttcttgactgctttccagtgttctatgcctggattcttctgatagcgtccaagcatcccggtggtaaaagctaagtcagggcgagtacatacttgagcatacataatgcttccgatagctgaagcatatggtactgacttcatcttgtttttctcatactgattcttgggacactgatattccccaaactcatcacccttgactattggaccaggcgaggcattacacttgtgcatattatacctctttagtacattttctatatatgacttctgtgagagtcctaatactcccttttgtctgtctctgtgaatttctattccaagaacataggaggcttctcccatgtctttcatatcaaaattcgaggaaagaaacccttttgtttccgctagtagatccttatcactactagctaagagtatgtcatcgacatacagaacaaggaagatatactttccttttctaaattttgcataaatgcaattgtctttcttgttttcctcgaaaccaaactttcttatagtctgatcaaacttgatgtaccactgtttggaggcctgtttaaatccataaatggacctcctcaagtgacatcccatgtgttctttaccgctcacaacaaaaccctttggttgtgccatgaacacattttcttctaactctccatttaggaatgccgtctttacatccatctgatggagctctagatcaaaatgagcaactagtgccattatgatcctgaatgaatcttttgttgagacaggtgagaaggtttcatggtagtcaatgtcttctctctgtgtgaaccctttggccacaagtctagccttgtatctttctatgttccctctggagtcacgctttgtcttgtagacccatttacagcctactgttttggctccatggggaatgacatctaagtcccaaactttattcattctcatggattctaattcatcttccatggctgataaccatttggatgaatttgcacttctcat

SEQ ID NO: 6857 - DNA, 1051 bp, Zea mays
  Zm_smallRNAprecursor_2346
acccatggagctgttgttgacgatggttgtccttgagaccccagctcgaacatcttgtgggcctctgcgatttcgctctgcatggtcgtcaattccttcacctgagtggagaggttgctcaactccactctcagatcgcccacatccgcttcgatgtgcggcctccaacttgacagatctctcaccgctgctgtattcgcttccagagccgatttgatggactcgttctggctttgcatggcttgcagaagttttgataagtcggcgatgctctgctccatggcttccgactgagtttgtgaacgcgtcttgatttgcggacgccgcaagtatcccggagggtccgccaggatcagaaacggactctgaataccacttgtaacgcacccactgggccagtccgcccaaagcccaccatcgccagcgtcggacgttcatgcgctcgtgtgcagcctatttaggcgtgcacctcgctctcaaaacctaggctgagagaggagggaggcccgcccttataagtgcaacacggcccccttggctaggcgaggtggtactaacccagggcgtgcataccggtcccttacatcccaccccctaagaggccctctcctaggcagcagcggcaatgtaggctccgataccaattgtaagaacactgatttaggggtggaggtatgccgctcccggcatacgatttcctctcacgaagcactggaattagagtaattgtgtggaacgtacaacggctgagccgccaggagatccggacgcagccggccaacaggattctattctccacacctcctaggttcctctctatccctttttaaccccttctcacgagttcaacaaaaataaaataacactgttggagactcctagtgggtccattctggcccattcactcttgggttgggcttcaccccacgacgaggcctgttatcttcatcggattcttttatattcatgacaggtcaggactcgaattcggtctctagctagcttgcaggtaatgtacgcgggtggaccacggtaaccggggcaatgaaag

SEQ ID NO: 6858 - DNA, 1153 bp, Zea mays
  Zm_smallRNAprecursor_2347
tgaaaaaactattagcgggccttcaagaaaaatgcttggaatttagcaacaaatgtattcaacgactaagaaaaattttccactcagttggagccagcagtgagaaattcaccccatcagctgaagatttaccaaagaccttcgaacatattgagggtgaaatcgatgagcttgacgaagttatggccgggcacggtgacttctgtgcctgggtagcttctcggggcactgctgcagctttcctaaaagctggctgcgatcatggaaaaattgtcaataggcccaatttcactttatcaccatcaatcctagatgacattcctgatctcgcccgaagtatttccaatagatttataaagatgacatggacaaaaggcgggccagaaaaggctggagacgaagctcggagtcatcttgaaccagtaagaagtcataccttgtgcctacctcttccttcaagctcgatttttacttacaacaacttaattcatgtaggatgacgaagccgaagccgatggttaaaaagaatgacgccgaagctgaagtcccttgaagattaaataggagtagactgtagacagacttaagaaacttttgagataacttttgtaaatgtaactaaacttgtctttaatgaattttgttcataccttgtaatatgctcttatccttccattaatgtatgagaggtgctttgatgtggacgaaattatctttttgagccgaaggcgaaaaaaaacaccttcccttcttttcgtacagagcgaagcatagaaaacaacatttccctttcttccgaagctctcctttttgtacaacatttcccttttttttctttttgccgaagcaaccagttatgccatgatgatgattatcctacatatgcctggatgaatgtttatgaatgcaaatgctatgatgtaatgtgatgtgcaaatgaatgtccaaacacatatttgtagccatactcacagccattatttccttagaaacaatcacacatcagctctgcattcccttaggaacgactttggagcttcttcgccttttactttcggcgaaagcagcgttgacttttcgctgtaagctctgcattcccttaggaacgactttggagcttcttcgccttttactttcggcggaatcagcgttg

SEQ ID NO: 6859 - DNA, 1149 bp, Zea mays
  Zm_smallRNAprecursor_2348
tttggctttgcatgacgacatgcgggtggaaaatcttttatttggtcaacagcaggggtgcgcatgcagaaattttttttattttattttttcttcttgttcttgtctggtcacatcagctctgctgcgcgcgcagactttctttatttattttctctgtccagttccttctcctcgcgccatgcatattttctttctttcttgcctcgctcaagtgcagggagcgcagacattttttttgagcagtttttttggtcgctgcgcagcaaaaccagctgaactgggccatgggggcagttgaactggtcctgaggaccagctcaactgcctatatatatttgacactctctccttctcttttcccacttcattcactctcgccttggtcgcttcacaacctttagagcctctccttcacacacttcaaccgcttcacagtttcaccaccttttcaatcatggtgcgtcgccgcaacccctctgtggttgagtttagcagcgactccgacgagattcaggaggaatctcccatcccctctcctccgcctcgtcgctccctctctaagagaggacgtggctctggtcggatgcctggcgagggctcttccttgccctcgcagccgactcgcgggagacgccaaaaggttggcgcctctcgtcctcgtcgtagcacgtcttcctcagggtatgctccctgccaagaggaggatggggctttcgacgacttcgtcgaccttccggcgcctgatgctctctacgtcaccggactgcacatgcatccggcgaacgtcagccgcggtccgcatgaatctcccctcgacttcactcagaaggggatagaaacccttcagcgtcttaggtttaccaaccctactctcactcctcgtcatcctggtgtccaggaccctcggttctggaatcttttccaggctgacttctacaattctgtcattcttaccaagaaacacccagtcgtccgacatagatttattgactgggagggttgtgagaatatgggagatgttgacatgtcgtcagctctcgttcacttagagagaaaggggttacgtaacattatgaccatggaatacccctggaacgatgaggtggtagctcagttctatgccaccctctggataaagaaagtaga

SEQ ID NO: 6860 - DNA, 1190 bp, Zea mays
  Zm_smallRNAprecursor_2349
agctctcgttcacttagagagaaaggggttacgtaacattatgaccatggaatacccctggaacgatgaggtggtagctcagttctatgccaccctctggataaagaaagtagatgaggaagccgatgggtatgattacccagtcatttatttcttcatccagggtaactggcacaaagtcagttatcgtcgttttgcccatattctgggcttctctgatgcagacattcagggcagcaacatgcgagtgcatggcattcggctgcccaggcgggaagagacggaattcattcatgtctctactgagcgggagttctggacaaccgctaacatgcataggtactataggtaccttaattccttgtcccggatgaccgttctcccaaagggcggtaatcaaatgaacgtccttggggagagtcgagtcctcctcctcctccttgctccaaacagtctcgcccgcatcaatgtgtttgacatgatctgggaggagatcgtccgtgcttcctggtctcctcacagagggtgtcttcatgcaccctttatcatgaagatgatcgaagtggtcacccagacccacttcgaaaaacccgtcaaacactcccgctacgtaccctactgggttgattcctccaacccagctgctcgtacaaagcgggttccctcacggtctggaggccctgcctcctcctctgagccacctcgccagcctcctcaccatccttcctcctctccccccgctgctgcctcgcgtccctctcctggccgcgggatctcccatgccacgtgctagtggtcgtggtcgaggtcgtggccgcgggatgggtgctcgcttgctccatgggcttgcggcatttttctccgcgtgccgcaacatttctgctgatgtccatgaggtggcacggcgtcagcgggagactgacgacaatcttcgtcgtcaagcctcctccatgggcatgccttttgtccctcgttcgcctgatgtgcctctccatcctcctcccccggagatcaatgagtggtaccagcaggcctacggggtgccttttatgcctgcagacgatgaagatgaagaagtctttgttgatgatcgcgaggagtttgccccgcctccctaccatggggatccgggtcaatcatcctcccaccctccgcctccttacccgggtccgggacccattcctggtgac

SEQ ID NO: 6861 - DNA, 1097 bp, Zea mays
  Zm_smallRNAprecursor_2350
cccagtcatttatttcttcatccagggtaactggcacaaagtcagttatcgtcgttttgcccatattctgggcttctctgatgcagacattcagggcagcaacatgcgagtgcatggcattcggctgcccaggcgggaagagacggaattcattcatgtctctactgagcgggagttctggacaaccgctaacatgcataggtactataggtaccttaattccttgtcccggatgaccgttctcccaaagggcggtaatcaaatgaacgtccttggggagagtcgagtcctcctcctcctccttgctccaaacagtctcgcccgcatcaatgtgtttgacatgatctgggaggagatcgtccgtgcttcctggtctcctcacagagggtgtcttcatgcaccctttatcatgaagatgatcgaagtggtcacccagacccacttcgaaaaacccgtcaaacactcccgctacgtaccctactgggttgattcctccaacccagctgctcgtacaaagcgggttccctcacggtctggaggccctgcctcctcctctgagccacctcgccagcctcctcaccatccttcctcctctccccccgctgctgcctcgcgtccctctcctggccgcgggatctcccatgccacgtgctagtggtcgtggtcgaggtcgtggccgcgggatgggtgctcgcttgctccatgggcttgcggcatttttctccgcgtgccgcaacatttctgctgatgtccatgaggtggcacggcgtcagcgggagactgacgacaatcttcgtcgtcaagcctcctccatgggcatgccttttgtccctcgttcgcctgatgtgcctctccatcctcctcccccggagatcaatgagtggtaccagcaggcctacggggtgccttttatgcctgcagacgatgaagatgaagaagtctttgttgatgatcgcgaggagtttgccccgcctccctaccatggggatccgggtcaatcatcctcccaccctccgcctccttacccgggtccgggacccattcctggtgaccctaggccatccggctctggttaccaccctccacctcctcctgat

SEQ ID NO: 6862 - DNA, 1174 bp, Zea mays
  Zm_smallRNAprecursor_2351
ttggtttaccaacatcctctttatgaatatgttctcatgtgtgctctgtgtcagctccagcttagtggtagttctgtcttctgtgaggtgtgaattaaccaaatatttgttcacttcccaatttgctattttttttgttacaatgtcatgagtggtattttttagggcactctaggtgctatagatatacaacattgcctttgttagatctctgttgtgtgtttttcatctgtttgcaggctgcatcctttctattcacggttttagttctactattctctaatccaataaggatttcgcaggcgaatatttagtctttcctgtcttgtctgttaatttagaaccttatcaaataaagcattcttttttggtttgtcccaccatcccacccaatgaagtgataggattcttttcaataaaatcctatgtagtcataagttttttttttcattcccatagcttctcctttagaggttagatttgaggcaacgactgttatgcaagcagtccttctgtgcaagcgtgcaagcaaaccatataatccaccacagatacaaccatggtttgttaggggtttttttataaagattattgagctggtggtggaagggtttaagtgttaaatgtgacctacggttggatcgcgatctaatggatcagatggtttgcttgcacgcttgcacagaaggactgcttgcatagcagtcgttgcctagatttgatgggtgtagttgaaatcttgctactggtatagcatatgcactgcagtacatcagggtatcgtattacactgataaacatgttctcaggtgtgctttgtttgactgtgcagagccagctttgtggtagttctgtgaagtgtgaattagcaaaatatttgttgttaactttcaaacttggtgttcattagttacaacgtcatgattgatactttttaggacattcttggtgctatagaaccgtgcctttgttaggtttttgttgtgtgttttccctctggttggatgcttgcagcctttctcttcattgtttttgttccactattattaatcgtttttgttaaaatcttgctatcagtgtagcatctgtacattacatcagggtatcacatattacatggattggaatctcatgtgtagaccatgtagtgttttgccctcttggttaagtctgt

SEQ ID NO: 6863 - DNA, 1175 bp, Zea mays
  Zm_smallRNAprecursor_2352
ttggtttaccaacatcctctttatgaatatgttctcatgtgtgctctgtgtcagctccagcttagtggtagttctgtcttctgtgaggtgtgaattaaccaaatatttgttcacttcccaatttgctattttttttgttacaatgtcatgagtggtattttttagggcactctaggtgctatagatatacaacattgcctttgttagatctctgttgtgtgtttttcatctgtttgcaggctgcatcctttctattcacggttttagttctactattctctaatccaataaggatttcgcaggcgaatatttagtctttcctgtcttgtctgttaatttagaaccttatcaaataaagcattcttttttggtttgtcccaccatcccacccaatgaagtgataggattcttttcaataaaatcctatgtagtcataagttttttttttcattcccatagcttctcctttagaggttagatttgaggcaacgactgttatgcaagcagtccttctgtgcaagcgtgcaagcaaaccatataatccaccacagatacaaccatggtttgttaggggtttttttataaagattattgagctggtggtggaagggtttaagtgttaaatgtgacctacggttggatcgcgatctaatggatcagatggtttgcttgcacgcttgcacagaaggactgcttgcatagcagtcgttgcctagatttgatgggtgtagttgaaatcttgctactggtatagcatatgcactgcagtacatcagggtatcgtattacactgataaacatgttctcaggtgtgctttgtttgactgtgcagagccagctttgtggtagttctgtgaagtgtgaattagcaaaatatttgttgttaactttcaaacttggtgttcattagttacaacgtcatgattgatactttttaggacattcttggtgctatagaaccgtgcctttgttaggtttttgttgtgtgttttccctctggttggatgcttgcagcctttctcttcattgtttttgttccactattattaatcgtttttgttaaaatcttgctatcagtgtagcatctgtacattacatcagggtatcacatattacatggattggaatctcatgtgtagaccatgtagtgttttgccctcttggttaagtctgtt

SEQ ID NO: 6864 - DNA, 1172 bp, Zea mays
  Zm_smallRNAprecursor_2353
tggtttaccaacatcctctttatgaatatgttctcatgtgtgctctgtgtcagctccagcttagtggtagttctgtcttctgtgaggtgtgaattaaccaaatatttgttcacttcccaatttgctattttttttgttacaatgtcatgagtggtattttttagggcactctaggtgctatagatatacaacattgcctttgttagatctctgttgtgtgtttttcatctgtttgcaggctgcatcctttctattcacggttttagttctactattctctaatccaataaggatttcgcaggcgaatatttagtctttcctgtcttgtctgttaatttagaaccttatcaaataaagcattcttttttggtttgtcccaccatcccacccaatgaagtgataggattcttttcaataaaatcctatgtagtcataagttttttttttcattcccatagcttctcctttagaggttagatttgaggcaacgactgttatgcaagcagtccttctgtgcaagcgtgcaagcaaaccatataatccaccacagatacaaccatggtttgttaggggtttttttataaagattattgagctggtggtggaagggtttaagtgttaaatgtgacctacggttggatcgcgatctaatggatcagatggtttgcttgcacgcttgcacagaaggactgcttgcatagcagtcgttgcctagatttgatgggtgtagttgaaatcttgctactggtatagcatatgcactgcagtacatcagggtatcgtattacactgataaacatgttctcaggtgtgctttgtttgactgtgcagagccagctttgtggtagttctgtgaagtgtgaattagcaaaatatttgttgttaactttcaaacttggtgttcattagttacaacgtcatgattgatactttttaggacattcttggtgctatagaaccgtgcctttgttaggtttttgttgtgtgttttccctctggttggatgcttgcagcctttctcttcattgtttttgttccactattattaatcgtttttgttaaaatcttgctatcagtgtagcatctgtacattacatcagggtatcacatattacatggattggaatctcatgtgtagaccatgtagtgttttgccctcttggttaagtctg

SEQ ID NO: 6865 - DNA, 1173 bp, Zea mays
  Zm_smallRNAprecursor_2354
tggtttaccaacatcctctttatgaatatgttctcatgtgtgctctgtgtcagctccagcttagtggtagttctgtcttctgtgaggtgtgaattaaccaaatatttgttcacttcccaatttgctattttttttgttacaatgtcatgagtggtattttttagggcactctaggtgctatagatatacaacattgcctttgttagatctctgttgtgtgtttttcatctgtttgcaggctgcatcctttctattcacggttttagttctactattctctaatccaataaggatttcgcaggcgaatatttagtctttcctgtcttgtctgttaatttagaaccttatcaaataaagcattcttttttggtttgtcccaccatcccacccaatgaagtgataggattcttttcaataaaatcctatgtagtcataagttttttttttcattcccatagcttctcctttagaggttagatttgaggcaacgactgttatgcaagcagtccttctgtgcaagcgtgcaagcaaaccatataatccaccacagatacaaccatggtttgttaggggtttttttataaagattattgagctggtggtggaagggtttaagtgttaaatgtgacctacggttggatcgcgatctaatggatcagatggtttgcttgcacgcttgcacagaaggactgcttgcatagcagtcgttgcctagatttgatgggtgtagttgaaatcttgctactggtatagcatatgcactgcagtacatcagggtatcgtattacactgataaacatgttctcaggtgtgctttgtttgactgtgcagagccagctttgtggtagttctgtgaagtgtgaattagcaaaatatttgttgttaactttcaaacttggtgttcattagttacaacgtcatgattgatactttttaggacattcttggtgctatagaaccgtgcctttgttaggtttttgttgtgtgttttccctctggttggatgcttgcagcctttctcttcattgtttttgttccactattattaatcgtttttgttaaaatcttgctatcagtgtagcatctgtacattacatcagggtatcacatattacatggattggaatctcatgtgtagaccatgtagtgttttgccctcttggttaagtctgt

SEQ ID NO: 6866 - DNA, 1171 bp, Zea mays
  Zm_smallRNAprecursor_2355
ggtttaccaacatcctctttatgaatatgttctcatgtgtgctctgtgtcagctccagcttagtggtagttctgtcttctgtgaggtgtgaattaaccaaatatttgttcacttcccaatttgctattttttttgttacaatgtcatgagtggtattttttagggcactctaggtgctatagatatacaacattgcctttgttagatctctgttgtgtgtttttcatctgtttgcaggctgcatcctttctattcacggttttagttctactattctctaatccaataaggatttcgcaggcgaatatttagtctttcctgtcttgtctgttaatttagaaccttatcaaataaagcattcttttttggtttgtcccaccatcccacccaatgaagtgataggattcttttcaataaaatcctatgtagtcataagttttttttttcattcccatagcttctcctttagaggttagatttgaggcaacgactgttatgcaagcagtccttctgtgcaagcgtgcaagcaaaccatataatccaccacagatacaaccatggtttgttaggggtttttttataaagattattgagctggtggtggaagggtttaagtgttaaatgtgacctacggttggatcgcgatctaatggatcagatggtttgcttgcacgcttgcacagaaggactgcttgcatagcagtcgttgcctagatttgatgggtgtagttgaaatcttgctactggtatagcatatgcactgcagtacatcagggtatcgtattacactgataaacatgttctcaggtgtgctttgtttgactgtgcagagccagctttgtggtagttctgtgaagtgtgaattagcaaaatatttgttgttaactttcaaacttggtgttcattagttacaacgtcatgattgatactttttaggacattcttggtgctatagaaccgtgcctttgttaggtttttgttgtgtgttttccctctggttggatgcttgcagcctttctcttcattgtttttgttccactattattaatcgtttttgttaaaatcttgctatcagtgtagcatctgtacattacatcagggtatcacatattacatggattggaatctcatgtgtagaccatgtagtgttttgccctcttggttaagtctg

SEQ ID NO: 6867 - DNA, 1040 bp, Zea mays
  Zm_smallRNAprecursor_2356
ggtttgcggcgtttttctccatgtgccgcaacatttctgctgatgtccatgaggtggcacggcgtcagcgggagactgacgacaatcttcgtcgtcaagcttccaccatgggtatgccatttgtccctcgctcgcctgacgtgcctctccatcctcctcccccggagatcaatgagtggcaccagcaggcctacggggtgccatttatgtctgcagacgatgaagaagaagaagcctatgttgatgatcgcgaggagtttgccccgcctccctaccatggggatccgggtcaatcatcctctcaccctccgcctccctacccgggtccgggacccattcctggtgaccctaggccatccggctctggttaccatcaccaccctccacctcctcctgatcatcgtacatcttcggcatctgttttttctacggctgatgagccacctcgggactccacatttgaggaggacgtgatgaggaccctcttccctgactacacttcataccctccatcatatcctccgtcatatcctcctcctggaggatattgattcatgtatcctgatctccctcttcgtttttggtacttgttgccaaaaagggggagaaaatccaacttctagtttgtggttccttcggttttcttttggattattttttgttttggccactgttgtggcttgtatccttttaccattgtatgaaataaaactgttgggttgttattcaaagtaatatgatggtcttctggccatcatcttttgccctatcagtttgtaatgattactttgctatgaagtaaaaatggtgtgtatttagagatagtcatgtgcatcacaactcctattatgacactcttgcacccctcagatggttgtattcagtatggtttttgtcactatctctaaatgtgttgctcacatgacatattatgtcaaaacattggattcacaatcgtgcacacatttagggggagccatctacatacaatcattcaaaagaatttttctattgcaaatgtatatctttttgaccttaat

SEQ ID NO: 6868 - DNA, 1167 bp, Zea mays
  Zm_smallRNAprecursor_2357
agagatcacgaacacgcggaggtacctgcaagttaattcatgctaaggattagactggggaggcgatcaaagaagttgaaaaagaaccaacaaatattcactctaggtgattttggcttacatttttattcaaccccgagcagttatatatatgtaattctctatccttatgtggcttgagtttgtattatattgagatctcggaaggatcgatgcatttcaacaatcgtatgtgacgtcgtgagccaccaaataaatgagcttgttcaaattccattaattcatccatcagcatacatgtatttctttaagagtagtatggataaaagaatacacatgaaacatgtcttactatgtcaaacatatccatacatcaaacgtgacgccaccgtaggcacgtctatattacaacgtttcataaacgaaattaatatgcctctgatgttgaattacaaattgttagtgacagatcgagcagttattcactttcccattctctaatatagtcatcgccgtcctcttcattcatcattcatgccaaaggtaccgatgttagttggtacctcggacatttgcagttctatggtgtgaatatggtgtaaggtgaaggacagagataatactccattcgttattggtcggcgactgctctgttgagtagtagaacgaagaggacgacactgtgtattacatggtcgtcttgtaggattcatcgtcgtgcagctggtcaccggttccaaatatctttgcaagtaggtgttggagccggtttatttccaaaattctggtcaacagtatcgctactgtaaacgcaaatattaatataagccagcataatacacacaacatatgtaatgcatatagttggtttttgtttgcagcgtaaagacaaaataaaatttggtgtatgcatggattagagcaagcagacgatcaaaagaacttgaataagagccaacaaatattcactctaggtgattttggcttatatttttttattcaatcccacgcagttacatataaaaaagacaatgactatacacacgctaactttgtggggagatgtactcagtaataattttaaaaaaacacagcagaaaatgccagaattgaggaggagaagaatcagtaaaagactctcaaaaggctgagtaaaatagacctcat

SEQ ID NO: 6869 - DNA, 1167 bp, Zea mays; identical to SEQ ID NO: 6868
  Zm_smallRNAprecursor_2358

SEQ ID NO: 6870 - DNA, 1166 bp, Zea mays
  Zm_smallRNAprecursor_2359
gagatcacgaacacgcggaggtacctgcaagttaattcatgctaaggattagactggggaggcgatcaaagaagttgaaaaagaaccaacaaatattcactctaggtgattttggcttacatttttattcaaccccgagcagttatatatatgtaattctctatccttatgtggcttgagtttgtattatattgagatctcggaaggatcgatgcatttcaacaatcgtatgtgacgtcgtgagccaccaaataaatgagcttgttcaaattccattaattcatccatcagcatacatgtatttctttaagagtagtatggataaaagaatacacatgaaacatgtcttactatgtcaaacatatccatacatcaaacgtgacgccaccgtaggcacgtctatattacaacgtttcataaacgaaattaatatgcctctgatgttgaattacaaattgttagtgacagatcgagcagttattcactttcccattctctaatatagtcatcgccgtcctcttcattcatcattcatgccaaaggtaccgatgttagttggtacctcggacatttgcagttctatggtgtgaatatggtgtaaggtgaaggacagagataatactccattcgttattggtcggcgactgctctgttgagtagtagaacgaagaggacgacactgtgtattacatggtcgtcttgtaggattcatcgtcgtgcagctggtcaccggttccaaatatctttgcaagtaggtgttggagccggtttatttccaaaattctggtcaacagtatcgctactgtaaacgcaaatattaatataagccagcataatacacacaacatatgtaatgcatatagttggtttttgtttgcagcgtaaagacaaaataaaatttggtgtatgcatggattagagcaagcagacgatcaaaagaacttgaataagagccaacaaatattcactctaggtgattttggcttatatttttttattcaatcccacgcagttacatataaaaaagacaatgactatacacacgctaactttgtggggagatgtactcagtaataattttaaaaaaacacagcagaaaatgccagaattgaggaggagaagaatcagtaaaagactctcaaaaggctgagtaaaatagacctcat

SEQ ID NO: 6871 - DNA, 1166 bp, Zea mays; identical to SEQ ID NO: 6870
  Zm_smallRNAprecursor_2360

SEQ ID NO: 6872 - DNA, 1164 bp, Zea mays
  Zm_smallRNAprecursor_2361
tggggaggcgatcaaagaagttgaaaaagaaccaacaaatattcactctaggtgattttggcttacatttttattcaaccccgagcagttatatatatgtaattctctatccttatgtggcttgagtttgtattatattgagatctcggaaggatcgatgcatttcaacaatcgtatgtgacgtcgtgagccaccaaataaatgagcttgttcaaattccattaattcatccatcagcatacatgtatttctttaagagtagtatggataaaagaatacacatgaaacatgtcttactatgtcaaacatatccatacatcaaacgtgacgccaccgtaggcacgtctatattacaacgtttcataaacgaaattaatatgcctctgatgttgaattacaaattgttagtgacagatcgagcagttattcactttcccattctctaatatagtcatcgccgtcctcttcattcatcattcatgccaaaggtaccgatgttagttggtacctcggacatttgcagttctatggtgtgaatatggtgtaaggtgaaggacagagataatactccattcgttattggtcggcgactgctctgttgagtagtagaacgaagaggacgacactgtgtattacatggtcgtcttgtaggattcatcgtcgtgcagctggtcaccggttccaaatatctttgcaagtaggtgttggagccggtttatttccaaaattctggtcaacagtatcgctactgtaaacgcaaatattaatataagccagcataatacacacaacatatgtaatgcatatagttggtttttgtttgcagcgtaaagacaaaataaaatttggtgtatgcatggattagagcaagcagacgatcaaaagaacttgaataagagccaacaaatattcactctaggtgattttggcttatatttttttattcaatcccacgcagttacatataaaaaagacaatgactatacacacgctaactttgtggggagatgtactcagtaataattttaaaaaaacacagcagaaaatgccagaattgaggaggagaagaatcagtaaaagactctcaaaaggctgagtaaaatagacctcatcctccggtatgaatatcagacctcccggtatgacaaatcaacccaacagttt

SEQ ID NO: 6873 - DNA, 1032 bp, Zea mays
  Zm_smallRNAprecursor_2362
tcaagtattgtaatttcctgaaacgatttttagtttaggatggagggagtacaagcaaatcaaattttattttttttaaagaaacattgtttttgaacggctttgttgttcctagacaaacgatgcgtggtaaattaaactttttaacgaaattgagaataggagagatgaaaaacaaaatatgaaccaccaaaattcagaacagtaattttttggaagaaagataaacaatgaactgaaaagaaaagaaacaaaataaaaatatgtagctgaaattcaaaatggggaaagtatataaaaatggtgaagtttaaaaagatagaattatatatataacaaaacaaaacgctttggaagaaagataaacaatgaactgaaaaggaacaaaataaagatatgtagctgaaattcaaaatgggggaagtatataaaaaagctgaaatttaaaaggagagaattacatatatataacaaaacaaaacgcgccaggtaggggtcgaacctacggccttctgcttaggaaacagacgctctatccactgagctacaggcgctttgtgttggttctaacgttcggaacgttatagtactatattgtgaaattaaatttataatttaatacatacataacgttcggaacgttatagtactctattgtggaattaaattcataatttaatatatacatctctaaaagctaatttttttgatacatgaattataatataaacttatgcaatatattcatgaatttgtttcatacctaataaactatggatagaatccatacctttcatagtttaaaaatttccagagccctaggttataataaatgatagatttaactgattaaattttttgattagacttaaattattttaggaaatggattgtaacatagatttaattctaatctatactaatccagagctagattgatgtaagtgaacaagactggtttgcttccagcaagtttaggatcgctagggaagtaaagcatgcccacgaggcaccacacgcagccccacattt

SEQ ID NO: 6874 - DNA, 1137 bp, Zea mays
  Zm_smallRNAprecursor_2363
catccaacaaaggtgagccaaaagatggttccagtgggcatcatgagacagaatccaggcactcggagaagcactaacgaccgtccgagagctgagagggcaaaagcatgtgaggcaccttggctttgtcagcactcagcaccgggtcagctctcgcgactattgccggcgcccggcgatggtacagcaactgtgggtgggggaaacagtaccctaggctgccagtacacgagcaaccatgaacgcaaatgggctatcatatatattccatcgatcgaacctataggctacctgtacacgagcaaccaggaacgccgatgggttatcatacactacagtaaacgcagaaacgtccgacggccaaagccgtcggacataaggaataaaccgtcggaaatagattatttccgacggtaaagccttatctccgacggcttcaagccgtcggagataactcgtcgaaaatagtgctatgtccgacggcggccgtcggacatacgttatctccgacggctgcctatgcccgtcggagataacaaatcccaaccgttttaccggtcgggatgtgggccccacagtattaagtccgacggctcccactaggccgtcggacataagcatctcttatgtccgacggtagttaatgccgtcggacataagcatctcttatgtccgacggctaccattaggccgtcggacataacaaattacagaatttacacaaaattctgttttttaaaaaatctgacatttacaaaacaaaaacagattcatgcacatatacaaattcacattcacaatcacaaatatacacattctaataagtattcacaatcacaaatattctcacataaatattaacattcacaaatttaacatcaacatataggttcgacggttgttgcaaaatgaaattgtgtctcacaaacaagtgttgcaaagtgtttcataaaaaaacatcacgacacatcaatcatatccatcgtctggatggttcgagtagccacctcctccggctggactctgcgtgttgaaaatggtgttcacccacgaatttgttgtgtcgtcctgaccagacccatctccaggtgcggcaactgaagcgggtggtgtctgaaatccctataacacaagcac

SEQ ID NO: 6875 - DNA, 1142 bp, Zea mays
  Zm_smallRNAprecursor_2364
acaaaaggcatgcccatggaggaagcttgacgacgaagattgtcgtcagtctcccgctgacgcgtgccacctcatggacatcagcagaaatgttgcggcacatggagaaaaatgtcgcaaacccatggaccaagcgagcacccatcccgcggccacgacctcgaccacgaccacgagcacgtggcatgggagatctacggccaggagagggacgcgaggtagcagcggggggagaggaggatggatgaagaggaggctggcgaggtggctcagtggaggaggcagggcctccagaccgagagggagcccgcttcgtacgagcagctgggttggaggaatcaacccagtagggtacgtagcgggagtgtttgacgggtttttcgaagtgggtctgggtgaccacttcgatcatcttcatgataaagggtgcatgaagacaccctctgagaggagaccaggaagcacggacgatctcttcccagatcatgtcaaacacattgatgcgggcgagactgtttggagcaaggaggaggaggaagactcgactctccccaaggacgttcatttgattaccgcccttcgggagaacggtcatccgggacaaagaattaaggtacctgtagtacctatgcatgttagcggttgtccagaactcccgctcagtagagacatgaatgaattccgtctcttcccgcatgggcagccgaatgtcatgcactcgcatgttgctgccctgaatatctgcatcagagaagcccagaatatgggcaaaacgacgataactgactttgtgccagttaccctggatgaagaaatacatgactgggtaatcatacccatcggcttcctcatctactttctttatccagagggtggcatagaactgagctaccacctcgtcgttccaggggtattccatggtcataatgtttcgtaacccctttctctctaagttttcgagagctgacgtcatgtcagcatctcccatattctcacaaccctcccagtcaataaacctatgtctgacgactgggtgtttcttggaaagaatgacagaattgtagaagtcagcctggaaaagattccagaaccgagggtcctggacaccaggatgacgaggagtgagagtagggttggtgaac

SEQ ID NO: 6876 - DNA, 1058 bp, Zea mays
  Zm_smallRNAprecursor_2365
gcagaaatgttgcggcacatggagaaaaatgtcgcaaacccatggaccaagcgagcacccatcccgcggccacgacctcgaccacgaccacgagcacgtggcatgggagatctacggccaggagagggacgcgaggtagcagcggggggagaggaggatggatgaagaggaggctggcgaggtggctcagtggaggaggcagggcctccagaccgagagggagcccgcttcgtacgagcagctgggttggaggaatcaacccagtagggtacgtagcgggagtgtttgacgggtttttcgaagtgggtctgggtgaccacttcgatcatcttcatgataaagggtgcatgaagacaccctctgagaggagaccaggaagcacggacgatctcttcccagatcatgtcaaacacattgatgcgggcgagactgtttggagcaaggaggaggaggaagactcgactctccccaaggacgttcatttgattaccgcccttcgggagaacggtcatccgggacaaagaattaaggtacctgtagtacctatgcatgttagcggttgtccagaactcccgctcagtagagacatgaatgaattccgtctcttcccgcatgggcagccgaatgtcatgcactcgcatgttgctgccctgaatatctgcatcagagaagcccagaatatgggcaaaacgacgataactgactttgtgccagttaccctggatgaagaaatacatgactgggtaatcatacccatcggcttcctcatctactttctttatccagagggtggcatagaactgagctaccacctcgtcgttccaggggtattccatggtcataatgtttcgtaacccctttctctctaagttttcgagagctgacgtcatgtcagcatctcccatattctcacaaccctcccagtcaataaacctatgtctgacgactgggtgtttcttggaaagaatgacagaattgtagaagtcagcctggaaaagattccagaaccgagggtcctggacaccaggatgacgaggagtgagagtagggttggtgaa

SEQ ID NO: 6877 - DNA, 1057 bp, Zea mays
  Zm_smallRNAprecursor_2366
cagaaatgttgcggcacatggagaaaaatgtcgcaaacccatggaccaagcgagcacccatcccgcggccacgacctcgaccacgaccacgagcacgtggcatgggagatctacggccaggagagggacgcgaggtagcagcggggggagaggaggatggatgaagaggaggctggcgaggtggctcagtggaggaggcagggcctccagaccgagagggagcccgcttcgtacgagcagctgggttggaggaatcaacccagtagggtacgtagcgggagtgtttgacgggtttttcgaagtgggtctgggtgaccacttcgatcatcttcatgataaagggtgcatgaagacaccctctgagaggagaccaggaagcacggacgatctcttcccagatcatgtcaaacacattgatgcgggcgagactgtttggagcaaggaggaggaggaagactcgactctccccaaggacgttcatttgattaccgcccttcgggagaacggtcatccgggacaaagaattaaggtacctgtagtacctatgcatgttagcggttgtccagaactcccgctcagtagagacatgaatgaattccgtctcttcccgcatgggcagccgaatgtcatgcactcgcatgttgctgccctgaatatctgcatcagagaagcccagaatatgggcaaaacgacgataactgactttgtgccagttaccctggatgaagaaatacatgactgggtaatcatacccatcggcttcctcatctactttctttatccagagggtggcatagaactgagctaccacctcgtcgttccaggggtattccatggtcataatgtttcgtaacccctttctctctaagttttcgagagctgacgtcatgtcagcatctcccatattctcacaaccctcccagtcaataaacctatgtctgacgactgggtgtttcttggaaagaatgacagaattgtagaagtcagcctggaaaagattccagaaccgagggtcctggacaccaggatgacgaggagtgagagtagggttggtgaa

SEQ ID NO: 6878 - DNA, 1058 bp, Zea mays
  Zm_smallRNAprecursor_2367
cagaaatgttgcggcacatggagaaaaatgtcgcaaacccatggaccaagcgagcacccatcccgcggccacgacctcgaccacgaccacgagcacgtggcatgggagatctacggccaggagagggacgcgaggtagcagcggggggagaggaggatggatgaagaggaggctggcgaggtggctcagtggaggaggcagggcctccagaccgagagggagcccgcttcgtacgagcagctgggttggaggaatcaacccagtagggtacgtagcgggagtgtttgacgggtttttcgaagtgggtctgggtgaccacttcgatcatcttcatgataaagggtgcatgaagacaccctctgagaggagaccaggaagcacggacgatctcttcccagatcatgtcaaacacattgatgcgggcgagactgtttggagcaaggaggaggaggaagactcgactctccccaaggacgttcatttgattaccgcccttcgggagaacggtcatccgggacaaagaattaaggtacctgtagtacctatgcatgttagcggttgtccagaactcccgctcagtagagacatgaatgaattccgtctcttcccgcatgggcagccgaatgtcatgcactcgcatgttgctgccctgaatatctgcatcagagaagcccagaatatgggcaaaacgacgataactgactttgtgccagttaccctggatgaagaaatacatgactgggtaatcatacccatcggcttcctcatctactttctttatccagagggtggcatagaactgagctaccacctcgtcgttccaggggtattccatggtcataatgtttcgtaacccctttctctctaagttttcgagagctgacgtcatgtcagcatctcccatattctcacaaccctcccagtcaataaacctatgtctgacgactgggtgtttcttggaaagaatgacagaattgtagaagtcagcctggaaaagattccagaaccgagggtcctggacaccaggatgacgaggagtgagagtagggttggtgaac

SEQ ID NO: 6879 - DNA, 1171 bp, Zea mays
  Zm_smallRNAprecursor_2368
cgcatgggcagccgaatgtcatgcactcgcatgttgctgccctgaatatctgcatcagagaagcccagaatatgggcaaaacgacgataactgactttgtgccagttaccctggatgaagaaatacatgactgggtaatcatacccatcggcttcctcatctactttctttatccagagggtggcatagaactgagctaccacctcgtcgttccaggggtattccatggtcataatgtttcgtaacccctttctctctaagttttcgagagctgacgtcatgtcagcatctcccatattctcacaaccctcccagtcaataaacctatgtctgacgactgggtgtttcttggaaagaatgacagaattgtagaagtcagcctggaaaagattccagaaccgagggtcctggacaccaggatgacgaggagtgagagtagggttggtgaacctcaggcgctgaagggtgtctattcccttcagagtgaagtcgacgggagattcatgcggaccgcggctgacgttcgccggatgcatgtgcagtccggtgacgtagagagcatcaagcgtcggaaggtcgacgaagtcgtcgaaagccccatcctcctcctggcagggagcatacccagaggaagacgtgctacgacgaggacgagaggcaccaaccttgtggcgtctcccgcgagtcggctgcgagggcatggaagagccctcaccatccatccgaccagagccacgtcctctcttagagagggagcgacgaggcggaggagaggggacgggagattcctcctgaatctcgtccgagtcgctgctaaactcaatcacagaagggttgcggcgacgcaccatgattgaaaaagtggtgaaacggtgaactggttgaggtgtgtgaaagagaggctctaaatgttgtgaagcgactaaggcgagagtggatgaagtgggagaagagaaggggagtgtcaaatatatataggcagttgagctggtcctcaggaccggttcaaccgcccccatgggccagttcagctggttctgaccagtgtggtcagagagccagaaacagcagagggaagatgctaaaaattcaaattactgacgcaggattctgaaaaagtgtactgcagagattccatgcaaaaaaacaaaaccaagtgtctgcgcagatg

SEQ ID NO: 6880 - DNA, 1057 bp, Zea mays
  Zm_smallRNAprecursor_2369
gagagacagatcacatactgtagtattactatgacaatctagattaccaactgtagagttgactaataatcgcgctacacacagcatacagctagctagcattcagctatctggaatattttgcaaaaaaaaaaactaatcataaagtttctattctctatcatagccgtctataaataaaagaatcaactgctaggatcaacggcgaaaccgtatatacatatatatgactccctcccgttacgaagggaagcggtgaacagacatccgggcccacagcccactggctgtagctgtgctcgggtgtggtcgtcgggccggcgcccaacgttttcgcgtgtcacgatggcgtcggcagcggcggcgtccgtaatccaagacgtcacgcggggtttcttttagagaaaattcctttaatgccatccaaacttataccaatcccttcaatgccatcagattttatagcttcccttcaatgccatcaaatttaaattctaatcccttaaatgccattgccgttagtttcaagttaacgccgttagttatatttaaagcaaatccctccaatgccatcaaaatctataccgatcccttcaatgccactagaaattggttcgatctatttgagttttaaaaatttcagaatagaaaattttttgaacccaaaaattttgaaacgcaaatataccacattgattttaaaatttatctccatctgttatcattagtgtttgttgttagtttgaaaaaatattaggaatcaaatagaccgaacagatatagcggagtaatttttggtgtttacaaaataatatgtactgcagtttttaaaaagtgtggaattggtacatatttttttattctagaatttttaaaatccaaatagtttaaaccaatttctagtggcattgaagagattgatatagattttgatggcattagagagatttgctttaaatagaactaacggcgttaacttgaaactaacggcaatggcatttaagggattagaatttaaatttgatggcattgaagggaagctataaaacctgatgac

SEQ ID NO: 6881 - DNA, 1040 bp, Zea mays
  Zm_smallRNAprecursor_2370
ggtttgcggcatttttctccatgtgccgcaacatttctgctgatgtccatgaggtggcacggcgtccgcgggagactgacgacaatcttcgtcgtcaagcttccaccaagggtatgccatttgtccctcgctcgcctgacgtgcctctccatcctcctcccccggagatcaatgagtggcaccatcaggcctacggggtgccatttatgtctgcagacgatgaagaagaagaagcctatgttgacgatcgcgaggagtttgccccgcctccctaccatggggatccaggtcaatcatcctctcaccctctgcctccctacccgggtctgggacccattcctggtgaccctaggccatccggctctggttaccatcaccaccctccacctcctcctgatcatcgtacatcttcggcatctgttttttctgcggctgatgagccacctcgggactccacatttgaggaggaagtgatgaggaccctcttccctgattacacttcataccctccatcatatcctctgtcatatcctcctcctggaggatattgattcatgtatccttgtctctctctctccgtttttggtacttgttgccaaaaagggggagaaaatccaacctctagtttgtggttctttctagtttgtggttctttcggttttcttttggattatttttgttttgggccactgttgtggcttgtatccttttaccattgtaagaaataaaactgttgggttgttattcaaagtaatatgatggtcttctggccatcatcttttgtcctatcagtttgtaatgattactttgctattaagtaaaaatgatgtgcatttagagatagtcatgtgcatcacaactcctgttatgacactcttgcacccctcggatgattgtatttagtatggtttttctcactttctctaaatgtgttgctcacatgacatattatgtcaaaacattggattcacaatcgtgcacacatttaggggagccatctacatacaatcattcaaaagaaattttctattgaaaatgta

SEQ ID NO: 6882 - DNA, 1171 bp, Zea mays
  Zm_smallRNAprecursor_2371
agctcaaaagagatgtcgttagtaatacacacaccgctttcccttttataacactttgaatatataaagtaggcagttacttaaacaaggaaaccttattatatgaactaaaattctcttaatcttcaatgcttaattttaacaaattaaacatgcatgataaattgattaagttcaaaggctaattttaaatcatatcatggtgagtatttaatgtagaagaaataaatccaaatgtacaagagagaatacatcacatagttttggattgttcttctttatacgtttaatttcatagtccatttgagaaactcattctcatgctgtgaaactacatagatcacttaggtaaaaaaattagtttcacaactctagtcatatagagaattcccctttagataagtgcttaagaatttgaatttcttacttagcaccttattcattcacgaacacggggttttttcccttttatgtctagatcatggcaataatagagtaatcaaattgaaatgtgccaagaaatacttacaaccaatttaagcatttggattgccatatgtaagaaagaagattatgcaatcggttatatgataacctcaactttgatcatctttggtcttgatcttcaacttggagtaccaagataagtgccaaaatatttctcaacaaatatccttgtaccccttcactttccatgattatagatcaattcaaaaccaaactatggtctctcaaacaacttatgtgatttatcctatatgagagccttccaatcaaagtgactttcaatatttcaaatacttgtcacttatgacagattctgtatactccaaagaaacatccataaattttgatgtacagatcctatgaccacgaaaattggtgaagatgtgctttaataagtctgctaacagctgtaaaaagttgagactcatttgacttcatatgtgctgccagccacaacatctcccacaataggtacatgctgaaaactgctgtgtttgtgctgacaagattgacttaatcaagaagtttcacttatccaatgattatgaaatttgcacagactttgctatcatatgcatagagcaagtaaactgaatttcaagccaatccaaatagatttgatcactcaaacatggttatgagcacagccttgtcagattttcaa

SEQ ID NO: 6883 - DNA, 1094 bp, Zea mays
  Zm_smallRNAprecursor_2372
tcggcatctgcatagccaactatttgtagggaattagatcttctgtacgtaagcatgagacctttagtaccttgaaggtaccttagagccttcttgactgctttccagtgttctatgcctggattcttctgatagcgtccaagcatcccggtggtaaaagctaagtcagggcgagtacatacttgagcatacataatgcttccgatagctgaagcatatggtactgacttcatcttgtttttctcatactgattcttgggacactgatattccccaaacttatcacccttgactattggaccaggcgaggcattacacttgtgcatattatacctctttagtacattttctatatatgacttctgtgagagtcctagtactcccttttgtctgtctctgcgaatttctattccaagaacataagaggcttctcccatgtctttcatatcaaaattcgaggaaagaaacccttttgtttccgctagtagatccttatcactactagctaagagtatgtcatcgacatacagaacaaggaagatatactttcctttcttaaattttgcataaatgcaattgtcttccttgttttcctcgaaaccaaactttcttatagtctgatcaaacttgatgtaccactgtctggaggcctgttttaatccataaatggacctcctcaagtgacatcccatgtgttctttaccgctcacaacaaaaccctttggttgtgccatgaacacattttcttctaactctccatttaggaatgctgtctttacatccatctgatggagctctagatcaaaatgagcaactagtgccattatgatcctgaatgaatcttttgttgagacaggtgagaaggtttcatggtagtcaatgccttctctctgtgtgaaccctttggccacaagtctagccttgtatctttctatgttccctctggagtcacgctttgtcttgtagacccatttacagcctactattttggctccatggggaatgacttctaagtcccaaactttgttcattctcatggattctaattcatcttccatggctgataaccatttggatgaatttgcacttctcat

SEQ ID NO: 6884 - DNA, 1142 bp, Zea mays
  Zm_smallRNAprecursor_2373
cgcatgttgacttgaaccatccagaaagggtcacggaacttgtcctcgaggcggaagcaaatgacatctggatcaaccaagctcaccacaggaaaacttggcatcactcgtgggaggcgactcttggcagtgtcgttgtaaagattgaagaactcgctggctcccatggtcaagttgacatccttctcccatctaccttggtggatatcaaccaaagtccatgtttctatggtgaagggataaggagaagggtgctctttggtaataatgcagacgagcttaatgatgccaccatcacagacactgagacgccgaaaggaatcaggttcaccgtccttgtacacacggccagtcttcaaagccttagatgggagtggtatataacggagcctgctgttgttgttgctgccagcgaggacatcaatgagcagcataccatggtagtagtcaacccagcacaagcacctctcgccaatagtgacgacggcatcagtcttaaacgagtagaggctgatcttcatatcggcagggatctgcagcttctcaacactccatttcatttcagcatcagaggcagaagggggatggtgcagcaagcagagttggacctcctggttgaaacggtaggtgagatccgccaccgtgaattcacccttgtctccatggcagaggatgcccatatcttcttcaatcatggtccgctgttgctggcgccggtgcggttgtaaccacttatccaactcggggtcggtgcgtccaccgccgaagcaaaggggaacccgggtgaagcaagggggaagccgagtaagggacggcggcgacgaggaggacgagtagacaaagtaatcatcaggaaagtagatcattcggctccagaaacagggatcgtcgaaggggacagacacccggaatagaatggagttgtggtgggcggcgatgacgacaggctccttcatgcagtcaatggctggaatgctggtccagtggacgtagagacgggacaccgcgggggggtccgcgatccggagggaggcacggatcggccggccgacgcactcgtgggcgagcgccgaggtcgtagcgtccccgcaccgcttccggctgcggtggacgatgcggtcgaggatcagccagctatggtc

SEQ ID NO: 6885 - DNA, 1142 bp, Zea mays; identical to SEQ ID NO: 6884
  Zm_smallRNAprecursor_2374

SEQ ID NO: 6886 - DNA, 1098 bp, Zea mays
  Zm_smallRNAprecursor_2375
gaattggcacaggtgcaataagctagttgcaatagaaaatactaaaattattgctactttgtgtacaacataaattacaaaatacatgtgaatctgtgaactaagctatcataaaaaaaataaaaaaaagtaaatcaaattgcaacttgtaacatatgacagtagtaacagtaaacataaaacaattactacttgtgtaattggaagagtaagttgcaagggcaaaaattgaatgtgtgtgttgagcttacagctacgaagatcccgcatccactgatgggtgcgttgatgcctttctccgcaaaatcttttttataaagacgagcaactatgctgagcctgtcaactaccgctttgcaccagttcttgttggccatgttctggatgtcctgagtatactttacaccatcaatcctgatgcgagtgtctgtgttggagaatagcagacactgaaatgcagccatgaaaaaggctctcaggcccagctccccggttagaatcctcttctgcagtcgatcagtgataacagatagattgataccagatatgtgtctataagagttgccacaaatttgctctcccagctcgtcccgcaaggcacgagcatctgcatcagacatggggggcgggtcacggccaacgtttggtaactgcaaaacacaccaaacactgtgcttagtgattggaatctcttttccaccaccaatctctaatttcattgtctctgggttaagcttccgcatcagccagctgagcaattttttggacaataagtgtggcttgaatctcaacaggccgccaaaccccttagcaactacttcacctttcaattcatcggatagagcattcacaagctttatgaacttcccaggtgagcattgtatagctcacgtcttagttttacccttattctcatcgccaccaacaataacaacattgtcgtcgccagaaccatcaccggcaggagcaaactctgggtcttgttcatcatcactttcttcatcttgaataggagacaaggggactttcaaccttaacctcttcctcctttccttcaattcatttttatctaattcctttctcttgttttgtacacga

SEQ ID NO: 6887 - DNA, 1070 bp, Zea mays
  Zm_smallRNAprecursor_2376
caacttttatcacttctttatttcagttatactaacggaggagaatactggcgagtatggagtaaagatagagactcaaggccgggtcgttgcgctccaggttaaaacagagtttgcgcgtgtccccgcacccagcagcactcccaatgatttcgatctggtcgtcctctttgccacatctgaaggggtaaccagaagccgagaaaacgaaattgaaaagcgtccttgtgtgtcgatggtgcgctgatcggagccgcgcggactgacatgcacacggagtcactcaaaaacgagtgagggctgtgcagcgggaagtgtgaggagcggggacgttgccgtcgcaggtccaagacgagtggacgttcagagttgagagcagacagcagagtgtgagaaagcgacggatctatctacggatccgtcaggtcagacgtttcctttttccactgtcggcccgcgcaaactatctacagaaaattcctggtatgccatcagattttatactcatcccttgtgtgccactgagtggcatataggtatattttttggtgtctatgacatgtggggccagtggcatacaaggaatgagtatattttccagtggcatacagggaattggcccaactatctacggatcgcgatgtccgctttgcattgcatgcaaagaactccctgttttgccgcttttatgggccaacagtgttgcttcgccggaacaagtagaaccaatgggcctaatattctgtacaggccgttttacaaaagccattagcccgttaggtcattgctgtatgcatcttgacgcccataaatcatgggctaggcttgtatatatccaattctttttagtattttgttaatctgccttataaaaaattcttgttaatctgttgagggtactactgatggccacgcacaatatcctttgcactggatactacttgtcaaaaagtctttcacataattgtcctagctcgtacatgattaccacaaatgtcggaatgaatgtcttcgagtaattgatgctttccctcactggtcaacgcacatctcattacaattcacgaggc

SEQ ID NO: 6888 - DNA, 1133 bp, Zea mays
  Zm_smallRNAprecursor_2377
tcgagttttcgggtgccgatcttgctgctgatcccggaggacttggaatttcctcttgagatggcctttttcttcctcttttgctctttccacttgcatggctttgttggagaggtgagagaaactgaggaagtcttggctggccaggatggtcttgagttctggcctgagtcccttcaggaagcgggccatcttcttgacttcggtactgacgtcatctggcgcataccgggctaattccatgaacatgtgcacatattcgctgacggatcttccgtcttgagtcagttcccggaattcgtcttccttgagctgaacggtcccttagggcacatggtgctcccggaaagctatttcaaactccacccaggtagcatctctgatggtgacattgaaggtatcccaccaggctaaggccatcctggagagttgatgagcagccagttgaacacgctgattttctgggcatccgatggcttctagctttcttttaatcgtgcgcagccaatcgtcagcatcgaggggattgctagatccagcaaacatgggaggcttgagcctcaggaaatcccccatcatgtcttgcggtcttccaccattcggacgttgattttccagacttcgagtgaggacctcgatgagtcgggtttggttggctagaacttgggctagatctaagggtagttctggaggtgcggggaggtgggtctcactttcctctctaccggcttccctttcaactctcaggggaaaccctgctccaatcccgaaggtggtaggcgtggttttatctgaagccatctgccagggagagagagtcactattatgcacatgccaattgttttcaatcgagtcattttattcattacaccaatacattacaagcatatggctactacaagtcgtactacatgcgagcgttctctgaggtactaccgaactctttttcccaaattccttaagatggtcatcaaggctagctagggacatatcctcgatgctgaacttggccgttgtcagcctcaccctggtgggtggcacaacagtcggagcagggcgagcggcgctattttcctgtcaggtcggtcagtgaaagggcgaagtgactgcggtcacttcgaccttgccgact

SEQ ID NO: 6889 - DNA, 1081 bp, Zea mays
  Zm_smallRNAprecursor_2378
ctttggcttcagtactccgcgactaaacttcatagcggtagatgaagctttcgaggtcggtacatgtacgtcacgggaaggaattcacccgtgtggagtcacgggttggtctgcgatagtagctcgctagacgcccgatcccggcgtacgtacgctctgtgaaacgatgggtcgtcacgagcgaccggagtgactcacatgcatcggccgacggatccgcgcctacctgaaacgtgcgcacccgtctagtaggcagtagcccatgattagggatggcaacgggtttaaaacccgtgggtatagaaattacaaacccgtacccacgagattgatgttaaactcgtacccgcacccgctatccgcgacgagtagcgtatgttacccaaacctgctactcgtggcccacgggtttatggcacccgcatacataggccgtgtttggtttccgcagattttttttaaatctgcatgttcatgttacccaagaaaacccaactttggcttgattctacagattttgtttctacgagcgcagaatctaaggcacagaataaactctgtttggatccataatatatttttaaaatctaccgtaaaccaaacacgcccatatatatgcgggtacacccacgggcacagtacccataagttgtcatattatatatttatatatatatatatatatacatatatatatatatatacatatacatatatatatatatatatatacacgcgtgcgcaggtatgcgagtttatggacacgagtataacattttcatatccacgagaaaaaacccgtcgggttgagaatcaaactcgtaccgtatccacgggtataaactcacatccaaatctgcactctatagggtttttacccgcgggcacgtggctaaaatgtgcccgttgctgtccctaccgatgatgcgccgctcccgcgcgagtgttcttccgcgtcgggcgcgctcgaaaaagtgagatgcggacgggagctggtctctgctctgaccggtctccttgtcgcccaggcgcgcgaccgtggcgtaccggtggcggtggtgggggtcacccccggcatgca

SEQ ID NO: 6890 - DNA, 1133 bp, Zea mays; identical to SEQ ID NO: 6888
  Zm_smallRNAprecursor_2379

SEQ ID NO: 6891 - DNA, 1049 bp, Zea mays
  Zm_smallRNAprecursor_2380
gacgatgcaactccacctcccatcaagatttattttggagttaaataattgttatctagttcctagtatgagtcgaaacattatgtctccttcatgtttgatgaaggatggttattcatttgcgagtgaaaacaatggttgtgtgatctctaagaatgacatgtttgtggcttttgcatccattatgaatgggttattcattttaaatcttgatgatgcacctatctgtaatattagtgctaaaaggcctcggtctaatgatttaagtcctacctacatgtgccactgtcgtttgggtcatataagtgagaatcgcatgaagaagcttcattctgatgggcttttaacttcgtttgattttgaatcatacgagacatgtgaagcttgcttacttggtaagatgaccaaggcgcccttcacgggtttaccggagaggacattagatttattggaactcatacatactgatgtgtgcggaccaatgagtacgacagctaggggatgattccaatacttcataatcttcactgatgattttagtagatatgggtatgtctacttaatggaacacaagtctgaatccttagaaaagttcaaagagtttcagaatgaagtagaaaatcagcgtggcaagaaaattaaagcactgcgatcggatcgtggaggtgaatatttgagtcatgagtttagcaatcatctaaggagttgtggaattgttccacagcttacgccgcctggaacgcctcagaggaatggcgtgtttgagcgacgtaatcggactttattggatatggttcgatcaatgatgagccagtcggacctacctttgtcgttttggggatacgctatagaaacaacagctttcacactaaatagggtaccgtctaagtccgtagttaagacaccatatgagatgtggactgggaagactcctagtttgtcttttctgaagatttggggttgtgaggtttacgtcaagcgacttcagtcggataaactcactccaaaatcggacaagtgcatgttcgtgggatatccaaaggaaactt

SEQ ID NO: 6892 - DNA, 1108 bp, Zea mays
  Zm_smallRNAprecursor_2381
tcgtcgcgggtcttgaggcgacagggcgcgcggggctgggtgcgcgctgggacggggtggcgcgaggtgtggggcggggttggtccgggtgaagcttcaccctagatgacaaataactatatatatatatatataacacgggttcgcgggtatgtatactatttttccatacccgcaagaaaaccctgtcgggatgagaatcaaactcacacttgtactcgtagaaacaaactcacattcaaacccgtatcctatagggtttttacccacgggcacacgggtaaaatgtgcatgttgccatccctacgccacactagcgtagactatcaggtttccttacatgcatggcaaataatagtgcagtcttgcaaatgctcagtgcttgcgtaattggtagtcccacatgttccccttactaaagtttagttcgtgtcacattgatatttgaaagttaattacaagtattaaatatagtttaattacaaaattaattacacagataaagactaaacgatgagataaatttattaagcctaatcaattcataagtagcaaatactgactgtagcaccacatatgcgaatcatggaataattagacttaataggtttaccttcttgtttagtcctcatttgtgtaattagctttataattaaactatatttaatactcataattgaagttcgaatatccaacatggtgacgtggcgacatgacacagactaagctttagacagggaaccaaatacccactaaggccctgtttggttgggtagggattgcagggattgaggggattaaatccctttatattcaattttgactagcaaaggacttaatctcctccaatccccctcaatccacccctaaccgaacaagccctaaagtgctactctactttgcgtcgtgactattgaaactcaaccgcccgttgcagtctgcacataaagatatgctaaccgtccctcgttcatagttgtgtttagtttaaagatgtctggaatgggagggttctattccatgtttttgggttaggaacttgggatggttcttgttgtagttaggtgctatttggttctatctactgaaatttagtccatgtcaaata

SEQ ID NO: 6893 - DNA, 1108 bp, Zea mays; identical to SEQ ID NO: 6892
  Zm_smallRNAprecursor_2382

SEQ ID NO: 6894 - DNA, 1109 bp, Zea mays
  Zm_smallRNAprecursor_2383
tcgtcgcgggtcttgaggcgacagggcgcgcggggctgggtgcgcgctgggacggggtggcgcgaggtgtggggcggggttggtccgggtgaagcttcaccctagatgacaaataactatatatatatatatataacacgggttcgcgggtatgtatactatttttccatacccgcaagaaaaccctgtcgggatgagaatcaaactcacacttgtactcgtagaaacaaactcacattcaaacccgtatcctatagggtttttacccacgggcacacgggtaaaatgtgcatgttgccatccctacgccacactagcgtagactatcaggtttccttacatgcatggcaaataatagtgcagtcttgcaaatgctcagtgcttgcgtaattggtagtcccacatgttccccttactaaagtttagttcgtgtcacattgatatttgaaagttaattacaagtattaaatatagtttaattacaaaattaattacacagataaagactaaacgatgagataaatttattaagcctaatcaattcataagtagcaaatactgactgtagcaccacatatgcgaatcatggaataattagacttaataggtttaccttcttgtttagtcctcatttgtgtaattagctttataattaaactatatttaatactcataattgaagttcgaatatccaacatggtgacgtggcgacatgacacagactaagctttagacagggaaccaaatacccactaaggccctgtttggttgggtagggattgcagggattgaggggattaaatccctttatattcaattttgactagcaaaggacttaatctcctccaatccccctcaatccacccctaaccgaacaagccctaaagtgctactctactttgcgtcgtgactattgaaactcaaccgcccgttgcagtctgcacataaagatatgctaaccgtccctcgttcatagttgtgtttagtttaaagatgtctggaatgggagggttctattccatgtttttgggttaggaacttgggatggttcttgttgtagttaggtgctatttggttctatctactgaaatttagtccatgtcaaatag

SEQ ID NO: 6895 - DNA, 1067 bp, Zea mays
  Zm_smallRNAprecursor_2384
tcagtacacctgcatctcagtgtgtaccttctacacctgagtacttttttcctcctgtggaacatcttaaggacaattcatgtggactacaggcagaatgtacatggaagtcctacattctactttgtccaggcaatccagcctcattgtctgttggctatctcttctctactgtattaaagcaccagttttcctggttccatggtttccaccgtcgccgtgtcctccacatttaaattgtaaaaatgttaaaattatgtacaaatggggattcgaactaggttgttggctctaaacccatattcacatccacctagccaacataacacacatgtctttatgttttatattctatatttaagcataaatggaaaccgtagcaatgtacggacacttgctagttgtacatttatgtctcatgtagccccccttcctaaatcatggttgaggacagtcctttgtatatgaattagtagatgtagggcctgtttggttcgtggctaactgtgccacactttgcctaaggttagacgttcgaattgaagaactaaccttaggcagaaaagttaggcaaagtgtgacaagttaggcagtgaaccaaacaggcctgtaggctggaatgctggagcatacaagttgctactggttctatcttaacatttagaaattctcaaacaaaacctgcaacaacaagaacaacaacaaagcattttagtcctaggcaagttggggtaggctagagtcgaaacccaacagaagctataagtcaagtttcaggcacgtggatagctgttcccatgcactcctaattctctaacaaaacctgaccatatccaaattggagattcaatccttttcttttggttgaccatctaattttcatttttcaatttccacatctatgttacattttagtttatgtatttggcaaatctttgagtattagatagattgacatgttctctatttataagctattaacgctacttagaaaatgatgcaggtacacaggtctatccaaattcttagggacaaacaggagttagctgaagctcagaaggaattgg

SEQ ID NO: 6896 - DNA, 1165 bp, Zea mays
  Zm_smallRNAprecursor_2385
tgatgcacttgttaaaccgccttcaggtactcaaccatgctatcacatatgctcatgctaggtgggctagattcatgtgcctatgaaccttcaactgaattttgttgttcgaatgctacaggacttcgcgtccagagaaggaacatcagccatgggggatctggccagcgcgaacctgccatagcccatagtctctgtgcccttcttgttgattcaggcattccccactgattcttggtccacatgccttcaaagtttcatttcatcctcctgtttctttttttttccgtcttccccatcttttgtaaagtagtagtgttcgttgtttggccatgcgctgtataatccattcttttacattgactgatgagtcagattgagtatgtaccaagtaccttgacatgatataccaagccaattgagccagttcttgtaccctcgagtctcttcaagcaaactgtcgggcatttgaaataagggggtgtttggtttgcccctgctaaaatttagcccctatcacatcgaatgtttgaacctccgttcggggtattaaatgtagtcggattataaaactaatttctcagccgaagattaaaaagtgagacgaatctagtacagttggttggatctatatttcatactcctacttgaaagtcaaacgcttgatgtgacccggactaaactttagtccacagaaccaaacaccccttatccctgttttgacctgtcttcggaacttgacttcttggtaagtataagtagttcgtcgttttgcaatggtggcgggcgaaccgcgcggagccaaaggaaaattttaaattttgccgaggcggaaacgatacgcggttccctgccgttgcgtcagagtcagacgacccgtcagcgtcactgcgtcagtagtccaaaatttcggagctccagatgacccaggcgtataggagaaggaaaggaaaaggagaagtctgattgatgggcacaccagagtggcagaggtactaatctctcaacacttcctgctttattgattttggaccccaacaataacaggtattaattcctccaagtttcctgcttcattaattttggaccaaaaaaaaaagttcagacctagtgctgcttatttgagctttgcatgcttatcttggccaaaatggtcatctaccag

SEQ ID NO: 6897 - DNA, 1052 bp, Zea mays
  Zm_smallRNAprecursor_2386
atgtcttctgcaggatctccaggctcccgtggcactgttcttcctgcgcctccagtttcccccggggttctcacgtccctccacgtgcgggaactgcgccctgcgcggctccctcttcaccgaccggggtgcccgcctccgaccgcctccgcgccacgcgcgggcacgcctggcgggacagaccgcgccacgcgcggcctcttcaccgaccggggtagaatgcattcttgacttctagctggtgaacaggctattgacgggagagcgccagagagagtactgtgcgaacagttgcacgtttgacgacaggactgaaggtttcggcgaagtcaatgccagggcgctgggtgaagcccagttgcgtccgaagccttctggcggagggcacgtctgcctgggcgtcacgccaaaagacactcccaacacccccccgcggggcgagggacgtggcgtctggccccccgcgccgcagggcgaggtgggccgaagcaggggctggtatgcacgccctgggttagtaccacctcgcctagccaaaggggccgtgttgcacttataagggcgggcctccctcctctctcagcctaggttttgagagtgaggtgcccgtctgaataggctgcgcacgagctcattagcgagagcttgtaacccgagcgggggcattaagggtggtgcggatgtttagcgacgactattctgggcctgggactcggtggttgacatacacggggcaagtgccctggccgccaatccaataatcatttcccagccatcctctttcagctacacctacattgatgccaacaaatttggtttgggtcgtgaagcaaaatttggtgtagtacgtatctaatggcatatttttctctccaacagtgagcaagctactgattcaaacatctatgtttgaattttctcttcgcaaaaaaaaaagaccgtgagaggcgagagctcatggctttgcaagtgtaaagagcaccaacattgacatggatacttgagcttcttgcctgaaccagtaagggcttgtttggttagctcttaattca

SEQ ID NO: 6898 - DNA, 1061 bp, Zea mays
  Zm_smallRNAprecursor_2387
cattaaagcacacatgtagggaaaattatcactactaaatcaagttttatagtgcttattcaaataataatgataaagtttcaaagttggataagcgacataaaaaacaaaccaagtagcaatttatactagtgtgaagtgctaccttgaattatgcttagtttctctatgtttgcacaattgtcatcaattaccaagaaaggggagagtgaaaggtccttgctttatttcggtgaatgagtgacaatttaggtggactaatatatttttatgttgagatacacaagatttagtccacaagtacactagagtcagcaactctagccatggagatgggatcttggaagtttgtcactactaaatgatgctaagctatacatgttaaagatatacttttgtaacatataaacggattgttgatgtgatgtggcatgttagatcacactaatgaaaattcaaggagccaaccactacaggaattcacttaattcccgtcggcctgaaaccgacgggaataagccctaaaccgacgtgaattacttattcccgtcgatttagggcttattcccgtcggtttcaggccgacaggcatcccttgccggggataaggttatccccgtcggcggctgacgggaataattaattcccgtcggctatatagtggccgacgggcgtaacatattaattcccatcggttccccaggccgacgggagttattaattaattcccgtcggccctgcgtggccgacgggaattaactaggccgacgggagttagtaattaattcccgtcggttcgaccatagccgacgggaattaactgggccgacgggaattactctatactgctacaaaaacagcactaaattatgtcactatttctgcacacataacatatatcaaacataatataaatcacatataacagccacattacaaacacatatagagatacgacatccacaaacacatgcatttagacataaacacttgcatttataattaaaacatccaccaacgtgtacgacatagtattcaaacatagcatccaccaacatcaa

SEQ ID NO: 6899 - DNA, 1186 bp, Zea mays
  Zm_smallRNAprecursor_2388
tttgctgcaacgcgtatacacatttatttattacctaaacaacacagtaaaggaaagctaacggtgaaataattaaatatagtaggagtagaaatggaattgatcaccttccgaacaggcggccctctccaccccaccctccccccggcttctataaaagtagcccttcgtctccgtcccttcaacccatgaacagcaaagcaagggccgaatagtatattagtataggccagttccctcactccccagattccccttttcatagcacctctatacctcttcttctcgtcgtcactctatcccgcatctgctgttctttatttctatacatacatatatactatcatcggttatttgcttctctattctgtccgagtactttacggtgttccgcacatagatctcgtggccggctgttttgcgctttcgcttgcgtttcttggccctgctggtgttgaccggtccgaacgggggcagatcgatgctttgggtttgaagcggagctcctatcattccaatgaagggtcgttccgaagggctggttccgctgctcgttcatggttcccactatcctatctcatcatgtgtatatatgtaatccatgggggagggtttctctcgtctttgagataggcttgtggtttgcatgaccgaggagctgcaccgcccccttgctggccgctctttggattgaagggagctctgcatcctgatccacccctccatttttttttgcttgttgcgtccttcctgggacctgagatccgaggctcgtggtggctcactgtagcctcgctacactgttttcttctcctctcctgtgctatttgctgtttctcctaagattctttaggccgtgcttatccgtgctggagtttaacgaagcagcacgttgctgctgctggtgctgccctcatgccctggtggtcgactggtatcggtacccgtacttgcgtcgctttattataccctatcttcgccggtgaggtttccggccgttcggtacaggtagtctatgtcaaacactcgttttatttcttgtcatactatattcttctgcttcctgttcgtaccggcggcgtgtgcctttgcggtggcgctcctggatctgggtgcagcgagcgcccgtcagcttctccctccccatgccacctcgtcaacgccccccggcacctggcagattcgc

SEQ ID NO: 6900 - DNA, 1179 bp, Zea mays
  Zm_smallRNAprecursor_2389
ataagcttcccttggcccctttataaagccacccctcctccttcgcccaccaacatcagtccacagcaagaaatgaatccttcctctaatcctctcccatggcgcttctccgtctgtcccctagagcctagcttggccgcccagatgcatgcatgcatgcatgagtcaagcacaagcatcgtcttcccatgctactcgcgtgaatatgaatcgatgcttatctcgcatcaatcaatcgacgctcttccgtctcttctatcaatcaacgttctctagtgaaagaaccgacccttgagtggtatatgtattgttgcggcctgcgacgagttgagcagctaagctatgttgctaccttttgtttttatctacggagatcttttattagcgctatgacaactggacaagtggttgtttgtttgtgctgcagatgctggtgttctaggatgcagtttgattcactagacctgatcccctagactagacggtctggtcttaaggcggtgctcccttcaaaccaataaacggtcgatctgatgggtggtacagctgctcgttcatggttcccactgtcccatctcatcagagagagagaagatcgtgagagagcgagagatgcttgagatgggcttgtggtttgcatgaccgaggagctgcctcgtccccttcgttgaccgctgtttggattgaagggagctctgcatcttgctcccatgactttcttcccagatttatgtttgctatttttttactttgttgtaacttatatacgtgaacgttttattcaatttctccatgttttagtagggtatgacggtatgtatgtatgtatatcctacaaatacagcggatcatataggctagctagcagcagcgtctgttcattgtttcattttagtggtgttagcaatactattgcacagccttccaaacagataaagaacaactgattcgttacaatctgaggagtttgggtgagatagggatcacaaggttgaggaactgggctatacgtagtacattgaagtgaagttgggagtcttgagaagaagaaactgaagaaacatagtagctaggactagatcactaggagatgggttgccaacttgccattctctgaataaaattctcgatgcccctcctcttcttttgtaccatcggagttcctagtttctatttgca

SEQ ID NO: 6901 - DNA, 1179 bp, Zea mays
  Zm_smallRNAprecursor_2390
ataagcttcccttggcccctttataaagccacccctcctccttcgcccaccaacatcagtccacagcaagaaatgaatccttcctctaatcctctcccatggtgcttctccgtccgtcccctagagcctagcttggccgcccagatgcatgcatgcatgcatgagtcaagcacaagcatcgtcttcccatgctactcgcgtgaatatgaatcgatgcttatctcgcatcaatcaatcgacgctcttccgtctcttctatcaatcaacgttctctagtgaaagaaccggcccttgagtggtatatgtattgctgcggcctgcgacgagttgagcagctaagctatgttgctatcttttgtttttatcttcggagatcttttattagcgctatgacaactggacaagtggttgtttgtttgtgctgcagatgctggtgttctaggatgcagtttgattcactagacctgatcccctagactagacggtctggtcttaaggcggtgctcccttcaaaccaataaacggtcgatctgatgggtggtacaactgctcgttcatggttcccactgtcccatctcatcagagagagagaagatcgtgagagagcgagagatgcttgagatgggcttgtggtttgcatgaccgaggagctgcatcgtccccttcgttgaccgctgtttggattgaagggagctctgcatcttgctcccatgactttcttcccagatttatgtttgctatttttttactttgttgtaacttatatacgtgaacgttttattcaatttctccatgttttagtagggtatgacggtatgtatgtatgtatatcctgcaaatacagcggatcgtataggctagcaagcagcagcgtctgttcattgtttcattttagcggtgttagcaatacgattgcacagccttccaaacagataaagaacaactgattcgttacaatctgaggagtttgggcgagataggaagcacaaggttgaggaactgggctatacgtagtacattgaagtgaagttgggagtcttgagaagaagaaactgaagaaacatagtagctaggactaggtcactaggagatgggttgccaacttgccattctctgaataaaattctcgatgcccctcctcgtcttttgtaccatcggagttcctagtttctatttgca

SEQ ID NO: 6902 - DNA, 1161 bp, Zea mays
  Zm_smallRNAprecursor_2391
aagcttcccttggcccctttataaagccacccctcctccttcgcccaccaacatcagtccacagcaagaaatgaatccttcctctaatcctctcccatggcgcttctccgtccgtcccctagagcctagcttggccgcccacatgcatgcatgcatgcatgcatgagtcaagcacaagcatcgtcttcccatgctactcgcgtgaatatgaatcgatgcttatctcgcatcaatcaatcgacgctcttccgtctcttctatcaatcaacgttctctagtgaaagaaccggcccttgagtggtatatgtattgttgcggcctgcgacgagttgagcagctaagctatgttgctatcttttgtttttatcttcggagatcttttattagctatgacaactggacaagtggttgtttgtttgtgctgcagatgctggtgttctaggatgcagtttgattcactagacctgatcccctagactagacggtctggtcttaaggcggtgctcccttcaaaccaataaacggtcgatctgatgggtggtacagctgctcgttcatggttcccactgtcccatctcatcagagagagagagagatgcttgagatgggcttgtggtttgcatgaccgaggagctgcacgtccccttcgttgaccgctgtttggattgaagggagctctgcatcttggtcccaagactttcttcccagatttatgtttgctatttttttactttgttgtaacttatatacgtgaacgttttaattcaatttctccatgttttagtagggtatgtatgtatgtatgtacatcctgcaaatacagcgggtcgtataggctagcaagcagcagtgtctgttcattgtttcattttaacggtgttagcaatacgattgcacagccttccaaacagcaactgattcgttacaatctgaggaggagtttggggagataggaagcacaaggttgaggaactgggctataccctatacgtagtacattgaagtgaagttgggagtcttgagaagaagaaactgaagaaacatagtactccaatagtactccattcgtttcgttttagttgtcgctggatagtgcaaaattgaactatacaacgccaactaaaaagaaatggagggagtaactaggactaggtcacttgg

SEQ ID NO: 6903 - DNA, 1190 bp, Zea mays
  Zm_smallRNAprecursor_2392
ggtaactagagtcggatggcctagggtcaccaggaatgggtcccggaccagggtaaggaggcggagggtgggaggatgattgacccggatccccatggtagggaggcggggcaaactcctcgcgatcatcaacatagacttcttcatcttcatcgtctgccgacataaaaggcaccccgtaggcctgctggtgccactcattgatctccgggggaggaggatgaagaggcacatcaggcgaacgagggacggcatgcccatggaggaagcttgacgacgaagattgtcgtcagtctcccgctgacgccgtgccacctcatggacatcagctgaaatgttgcggcacatggagaaaaatgccgcaaccccatggaccaagcgagcacccatcccgcggccacgacctcgaccacgaccacgagcacgtggcatgggagatccgtggccaggagagggacgcgaggcagcagcggggggagaggaggatggatgatggggaggctggcgaggtggctcagaggaggaggcagggcctccagaccgtgagggagcccgcttcgtacgagcagctgggttggaggaatcaacccagtagggtacgtagcgggagtgtttgacgggtttttcgaagtgggtctgggtgaccacttcgatcatcttcatgataaagggtgcatgaagacaccctctgtgaggagaccaggaagcacggacgatctcttcccagatcatgtcaaacacattgatgcgggcgagacagtttggagcaaggaggaggaggaagactcgactctccccaaggacgttcatttgatttccgcccttcgggagaacggtcatccgggacaaagaattaaggtacctgtagtacctatgcatgttagcggttgtccagaactcccgctcagtagagatatgaatgaattccgtctcttcccgcatgggcagccgaatgccatgcactcgcatgttgctgccctgaatatctgcatcagagaagcccagaatgtgggcaaaacgacgataactgactttgtgccagttaccctggatgaagaaatacatgattgggtaatcatacccatcggcttcctcatctactttctttatccagagggtggcatagaactgagctaccacctcatcgttccaggggtattccatggtcataatgttacgtaacccctttc

SEQ ID NO: 6904 - DNA, 1068 bp, Zea mays
  Zm_smallRNAprecursor_2393
gaatgaattccgtctcttcccgcatgggcagccgaatgccatgcactcgcatgttgctgccctgaatatctgcatcagagaagcccagaatgtgggcaaaacgacgataactgactttgtgccagttaccctggatgaagaaatacatgattgggtaatcatacccatcggcttcctcatctactttctttatccagagggtggcatagaactgagctaccacctcatcgttccaggggtattccatggtcataatgttacgtaacccctttctctctaagtttacgagagctggcgacatgtcagcatctcccatattctcacaaccctcccagtcaataaatctatgtcggacgactgggtgtttcttggaaagaatgacagaattgtagaagtcagcctggaaaagatttcagaaccgagggtcctagacaccaggatgacgaggagtgagagtagggttggtaaacctcagacgctgaagggtgtctattctcttctgagtgaagtcgacgggagattcatgcggaccgcggctgacgttcgccggatgcatgtgcagtccggtgacgtagagagcatcaggcgccggaaggtcgatgaagtcgtcgaacgccccatcctcctcctggcagggagcatacccagaggaagacgtgctacgacgaggacgagaggcgccaaccttttggcgtctcccgcgagtcggctgtgaaggcatagaagagccctcgccatccttccgaccagagccacgtcctctcttagagagggagcgacgaggcggaggagaggggacgggagattcctcctgaatctcgtcggagtcgctgctaaactcaatcacagagggattgcgacgacgcaccatgattgaaaaagtggtgaaactgcgaaccggttgaagtgtgtgaaggagaggctctaaaggttgtgaagcgaccaaggcgagagtgaatgaagtgggagagaagagaagggagagtcaagtatatataggcagttgagctggtcctcaggaccagttcaaccgcccccatgggccagttcagctggttctgaccagtg

SEQ ID NO: 6905 - DNA, 1148 bp, Zea mays
  Zm_smallRNAprecursor_2394
atacccatcggcttcctcatctactttctttatccagagggtggcatagaactgagctaccacctcatcgttccaggggtattccatggtcataatgttacgtaacccctttctctctaagtttacgagagctggcgacatgtcagcatctcccatattctcacaaccctcccagtcaataaatctatgtcggacgactgggtgtttcttggaaagaatgacagaattgtagaagtcagcctggaaaagatttcagaaccgagggtcctagacaccaggatgacgaggagtgagagtagggttggtaaacctcagacgctgaagggtgtctattctcttctgagtgaagtcgacgggagattcatgcggaccgcggctgacgttcgccggatgcatgtgcagtccggtgacgtagagagcatcaggcgccggaaggtcgatgaagtcgtcgaacgccccatcctcctcctggcagggagcatacccagaggaagacgtgctacgacgaggacgagaggcgccaaccttttggcgtctcccgcgagtcggctgtgaaggcatagaagagccctcgccatccttccgaccagagccacgtcctctcttagagagggagcgacgaggcggaggagaggggacgggagattcctcctgaatctcgtcggagtcgctgctaaactcaatcacagagggattgcgacgacgcaccatgattgaaaaagtggtgaaactgcgaaccggttgaagtgtgtgaaggagaggctctaaaggttgtgaagcgaccaaggcgagagtgaatgaagtgggagagaagagaagggagagtcaagtatatataggcagttgagctggtcctcaggaccagttcaaccgcccccatgggccagttcagctggttctgaccagtgtggtcagagaaccagaaacagcagagggaagatgccaaaaaataaaatttctgacgtaggattctgaaaaagtgtactgcggagactccatgcgcaaaaaaaaattcagaaacaagcgtctgcgcagatgagaccggacggcaaaagaaaaaaaactgcgcaaaagaaaagttctgcgcgccctgtatccctcacactgctgcacggaagtgacaacaaaaattgtttccttgctgcgcg

SEQ ID NO: 6906 - DNA, 1097 bp, Zea mays
  Zm_smallRNAprecursor_2395
gagtgagagtagggttggtaaacctcagacgctgaagggtgtctattctcttctgagtgaagtcgacgggagattcatgcggaccgcggctgacgttcgccggatgcatgtgcagtccggtgacgtagagagcatcaggcgccggaaggtcgatgaagtcgtcgaacgccccatcctcctcctggcagggagcatacccagaggaagacgtgctacgacgaggacgagaggcgccaaccttttggcgtctcccgcgagtcggctgtgaaggcatagaagagccctcgccatccttccgaccagagccacgtcctctcttagagagggagcgacgaggcggaggagaggggacgggagattcctcctgaatctcgtcggagtcgctgctaaactcaatcacagagggattgcgacgacgcaccatgattgaaaaagtggtgaaactgcgaaccggttgaagtgtgtgaaggagaggctctaaaggttgtgaagcgaccaaggcgagagtgaatgaagtgggagagaagagaagggagagtcaagtatatataggcagttgagctggtcctcaggaccagttcaaccgcccccatgggccagttcagctggttctgaccagtgtggtcagagaaccagaaacagcagagggaagatgccaaaaaataaaatttctgacgtaggattctgaaaaagtgtactgcggagactccatgcgcaaaaaaaaattcagaaacaagcgtctgcgcagatgagaccggacggcaaaagaaaaaaaactgcgcaaaagaaaagttctgcgcgccctgtatccctcacactgctgcacggaagtgacaacaaaaattgtttccttgctgcgcgggtgacacagcgactggtcacaaggcagtagtgtggggcaaaaaaaatgtgcgcgcagctgcagagaagaggtgaccggacagaacaaataaaaaaaatttcctgcatgcgcacccctgctgttgatcggacagcacaaataaaaagttcctgcatgcgcacccctgctgttgaccgaactccaaaaaaaactgtgcgcgcaaggacgctagagcacagcggatactgcatggcgc

SEQ ID NO: 6907 - DNA, 1172 bp, Zea mays
  Zm_smallRNAprecursor_2396
gatcagctcatcgctgcaccaactcgcaccctgcgcgcccaaccaccaggtctcgtctatactttttgaaccccctgcagaagtcgagttctgggtatgcagcccccctgcacggccaaagagggtcgtctccttcattcgggcaactgccttggtgctagacagacccaacataagaacgggctggttcctccttcacctttcatccaacgtgaagtccgcagttcagctctttccttgggatccaggaggacaggaggacatagctgcagttcaaatttatattttagttccacaattattttgtattttcgtcttaaataataaagttaagccgagatgtaaaaggcttaaccttaagtcgtgtcatgtaagtctatggcagctcgaggacaagctggtcctcaagggagggggagatgtcatgggcatcatagggagcgagacgcaacagccaggctaggataaggctagagaataagattgagatgagctgggataaggctagagaataagattgggatgagagaattgtggagagttggttagtataagataagtccaagaaagtaggagttagttgagagtttgtaggagaagttggttagccatagggctatttataagccgcatagcagcagggaataaatcaagcaagatcattatcaaaccaatctctctcccttgcaatgaccctctcaagcgtctagggctgctaccctagaaccaagcctgcggcagaggggtataacctcgccggagaagacagctatccccatggaccgaaggtccatgacatatccgtatatatacttcagactacaagcatgtaaaaaaaaaacagtacttgcaatacagatcctatattagatatttgaaggggaaaaacataccctggcactgaaagtctgagcaaaagttactgagaaatcatattgccaatgaatctatgctgatgattctttttagcccaaggtgcagccattgtgatttagacacccatagaaaaaagaactgtttttctttctttcaacccataaacctatatggacagcatcccctgctcagattatagaacaaagacctggaagcagactatctatgaacattgaatagtcttgaacgatgatccaattttagatgcttccctgccatacttgccgagtcatctt

SEQ ID NO: 6908 - DNA, 1042 bp, Zea mays
  Zm_smallRNAprecursor_2397
aaacgaaaaaggagaatcggtccctatagccactgcacgtattgtcatattcttaggccaggccaatttaaaacagatcagggcaatttcgcgtagagattgaccttgtagccaacggtcattccagaacctggtttttctgaccttttccaattacttatcgcattgtttaatagtttttgtacccatggttggtttgcggtgtgtattcagatgaatatgcatgggacgattcagtgtggacaatgtcaagcagaaatattgtatatagttcagagatgttggacgcacgtgttcagatgattgattcaactacgtactggtccactccagaacaggtccaaattccaactgaacgagaaagaagcgtaaatccaaaccttagaaatatgctgatagttttgagaagaatcaaacgaatggttcatttacgtacattgagtggtctaaataataaccgagaggaaaaaaaactccagctagctttgtactccctccgtttctttttattagtcgccggatagtacaaatttgcactatccggcgactaataaaaagaaacggagggagtacacgtgattgggcagaacgacaaagaaaaaaatcagttgttgacaaatcaaacaccagatgtccatagcttagctatagtttgagtactccaaggaacatttgacaaggacaccatttcagaccttggtgtgtgcgtgtgtgtgtgtttcccaatactaactgcatcatggagccatactagaaaaatacatgcataaaatcacacaattaataaggaagttgcgtaacacctgtgagggcaatcaaagactggtatatatataatagtaaataaaagtatacattaccgaaaccctaacacgtgtctccacctccccctcacggcgattgtccgccaacgaccagctgacagctgactggctggaggagctagttgatttgatgtgcactgcagtacgtatgcacaggcacatgcaatatgcatcacacatgacaggagctagcagagatcgacgtcgacacgacgact

SEQ ID NO: 6909 - DNA, 1034 bp, Zea mays
  Zm_smallRNAprecursor_2398
gaaaaaggagaatcggtccctatagccactgcacgtattgtcatattcttaggccaggccaatttaaaacagatcagggcaatttcgcgtagagattgaccttgtagccaacggtcattccagaacctggtttttctgaccttttccaattacttatcgcattgtttaatagtttttgtacccatggttggtttgcggtgtgtattcagatgaatatgcatgggacgattcagtgtggacaatgtcaagcagaaatattgtatatagttcagagatgttggacgcacgtgttcagatgattgattcaactacgtactggtccactccagaacaggtccaaattccaactgaacgagaaagaagcgtaaatccaaaccttagaaatatgctgatagttttgagaagaatcaaacgaatggttcatttacgtacattgagtggtctaaataataaccgagaggaaaaaaaactccagctagctttgtactccctccgtttctttttattagtcgccggatagtacaaatttgcactatccggcgactaataaaaagaaacggagggagtacacgtgattgggcagaacgacaaagaaaaaaatcagttgttgacaaatcaaacaccagatgtccatagcttagctatagtttgagtactccaaggaacatttgacaaggacaccatttcagaccttggtgtgtgcgtgtgtgtgtgtttcccaatactaactgcatcatggagccatactagaaaaatacatgcataaaatcacacaattaataaggaagttgcgtaacacctgtgagggcaatcaaagactggtatatatataatagtaaataaaagtatacattaccgaaaccctaacacgtgtctccacctccccctcacggcgattgtccgccaacgaccagctgacagctgactggctggaggagctagttgatttgatgtgcactgcagtacgtatgcacaggcacatgcaatatgcatcacacatgacaggagctagcagagatcgacgtcgacacgac

SEQ ID NO: 6910 - DNA, 1070 bp, Zea mays
  Zm_smallRNAprecursor_2399
gagagagagagagagagagagcgcgcgcgcgcgcgagcacggggtgaacgggggaagataaagcaggtggttaaggggcgtttggcactttggacacaaggtagctagagagagctggcatcggtatgtcttttggaatcgttgggtgcccaagggacgaggaagggttggatttggaacccgtcaactttaagagagcagtataattttatatagaaatcgtttataaattaggaggtgcactaaattcatttgcatacaagtgttgattcatgaatttgacctttcgtggatttttttacaagctacacctataaacaggagtggaataccgtcacagttacacctcatcaattagtcatcctaaaccgtgttaaatccatcgagtacacaaaggtgttcaaggatcgctgcaacaaaactgtggttcttaatcgccttaaacatgcctacgctacttaattgggatccacttcgaacagtatgccactggaaaatatactcattccttgtatgccactgaccccacatgtcatagacaccaaaaaatatacctatatgtcactcagtggcacacaagggatgagtataaaatctgatggcataccaggaattttctccaacttctacgagctagtcatgcatggtactcgcgaccttgccactcctctacttccacatgttgtaagcacatgaagtgagacacctagacaaacatgtttcataacaacaaaaatcctatcaaggggaggatatatcatgacaaatagttttgctcgagcatatgaatttaggtagaggtaatcttagaccggctgcagcggtctccgtcgcgcgcgccccctcccctctaactggcggctacaggagcccatttgggccgcagcgacatccccttccacgccccctttatggcggtagttgtctctctcccgccagtggtgtggtgcctcctccaacactattcattccttgtgttgtggaccacgaataattgttagtatataaaaaattgatagcgaatgaaaagtatggatatgagatgatattttatagctatagtatgggta

SEQ ID NO: 6911 - DNA, 1062 bp, Zea mays
  Zm_smallRNAprecursor_2400
tttgtaggatttatatccacattaggattaggttagagaatggaaacctgaagtttaaaaccaaaagtttaggcaggtttgaattttaaataggaatttgaaaatgtgaaaaaattaaaatagaaaaggaccaaaactgcacctgggccatttcttcccttgcggttggcccaactcctctccacgtggcccacacggcgctcgatccaaccactcttccacactgatcactggcggctggacccgcttggtcagagtcgcgctgaggcgcgcgctccgtgtttgcagcactagcacgtggggccatgaaggcagacacccaaccacgcgttcccttcacctgtgtggctgtcacgtggggcgcagctgtcgaactcttcctcttcgcgtcaaacgcagcgcctggttcgggttgttacacctgactgggatcctcgtcgttggtgcgggctcttcttccctctggcttctataagggcaagtttggaagtccaaaacccgaaggggattggaggggctaaaatccccttcttattcaaaattgaataaggagaggattttagctccttcaatcccctccgggtttgaggctcccaaactagcactaaagggatccgagccccctgagccatgccccatccaccctcaagaactccgtcgtcgccataggagattagagctagcacaggaggtgtctcgcgtcgccatacgtggacctcgccttctgccaccggtccaacttgggacaccgggtcgggatggagcacgggatccggggaggctggtccattgcttcattggcgcgagggcagtctgactctcggcaattgctcgtcggagcaatccttccgccgcagatcaaggttatcctgtggcatgtggtctttatcgcaccggttccaatgagcttcctcccatcctgtttgtattggccttagggtcgtttggcgcattttaatttaccaaggagtgcaccttggcgcggtggcgagtttgccggtcatggcgccacctgttgggctggcggcaccgccgtctagggagggttggttgggtaggcaa

SEQ ID NO: 6912 - DNA, 1153 bp, Zea mays
  Zm_smallRNAprecursor_2401
aatgcagagtttacagcgaaaagttaacactaattccgccgaaagtaaaaggcgaagaagctccaaagtcgttcctaagggaatgcagagcttacagcgaaaagtcaacgctgattccgccgaaagtaaaaggcgaagaagctccaaagtcgttcctaagggaatgcagagcttacagcgaaaagttagcactgatatgtgattgtttctaaggaaataatggctgtgattatggcttcggatatgtgtttggacattcatttgcacatcacattacatcatagcatttgcattcataaacattcatccaggcatacataggataaccatcatcatagcataagtggttgcttcggcaaaaaggaaaaaagagcttcggaagaaagggaaatgttgttttctatgcttcgctgtgtacgaaaagaagggaaggtgttttttcgccttcggctcaaaaagataatttcgtccacatcaaagcacctctcatacattaatggaaggataagagcatattacaaggtatgaacagaattcattaaagacaagtttagttacatttacaaaaagttatctcaaaagtttcttgagtttgtctacagtctactcctatttaatcttcaagggacctcagcttcggcgtcattctctttaaccatcggcttcggcttcgtcatcctatatgaattaagttgttgtaagtcaaaatcgagcttgaaggaagaggtaagcacaaggtatgatttcttactggttcaagatgactccgagcttcgtctccagccttttctcgcccgccttttgtccatatcatctttacaaatctattggaaatgcttcgggcgagatcaggaatgtcatctagaattgatggtgataaagtgaaattgggcctattgacaatctttccatgatcgcagccagcttttaggaaagctgcagcagagccccgagaggctacccaggcgcagaagtcaccgtgcccggctataacttcgtcaagctcatcaatttcaccctcaatatgctcgaaggtctttggtaaatcttcagctgacggggtgaatttttcactgctagctccgactgagtggaaaatttttctcaatcgttgaatacatttgttgctaaattccaaacatttgtcttgaag

SEQ ID NO: 6913 - DNA, 1156 bp, Zea mays
  Zm_smallRNAprecursor_2402
ttttgatatctaaactaattaaattacttgatttaatagagagtgggcggaccaggaggattcgagaacaagagaagcgcctctgaagatcgaatccggccgttaattgctgtctccagcactacgagattccccggtgtttttttataataaaaaaaaagatagcaaggccacaaggaataaagataaagattagcgtcagtttccatgcatgcatgctaacctcacaatcacaagcaggccaaaataaatcaaatcaacgcaaggcatgctaatcttctgtccatacatgagatagaggggcccccagatggtgatccaatggctcagatttgctggtgagatctatataagcccaccaaccgttaggcgatcgttcacaactccatatagctagttcatgtgcgcttctacaagctagcaaagacgagtgagtttatcatgctatgggaagaatggagagccacgaggaggaagaagaagatgccgatcgatcgaagagctcccttcgatccaatccaggagggaaagtggtcggctgcagctgccggttcatggatacctctctggtgcagcaatggccgagatgctcacctgcacttgcatgggtgtgcatgacccgggagacgaaccgaccatcatctttccctcgtgcttggattgaagggagctcctctctctctctctctcttatttccataatttatatattgtttgtagatagtttatctttctttctatctcttgtttgcagagatatacatggagatgccaagcgcatggaagtttgacaacggataattcagtataactgtgtgtatatatccggattattcaagacaagattgcggatctgatgtatcttttatcgtttcaaaaatttggacatatgtatatatatatataacctattccccttttagacaagtctttgtaatttctttttctttggacattttgatagctttcctcaaacatttttgcttgaagcaacttactgaaccatgcacgatttaatataattgcataaagcattttgagatttgggtgtcgtaattgaaacgatcttctttccttccacataaacaggtaccatcaattcaatatgaattgacatactgtgtgtattctctctaaaagatactgatttttagct

SEQ ID NO: 6914 - DNA, 1068 bp, Zea mays
  Zm_smallRNAprecursor_2403
gaatgaattttgtctcttcccgcatgggcagccgaatgtcatgcactcgcatgttgctgccctgaatgtctgcatcagagaagaccagaatatgggcaaaacgacgataactgactttgtgccagttaccgtggatgaagaaatacatgactgggtaatcatacccatcggcttcctcatctactttctttatccagagggtggcatagaactgagctaccacctcatcgttccaggggtattccatggtcataatgttacgtaacccctttctctctaagtttacgagagctgacgacatgtcagcatctcccatattctcacaaccctcccagtcaataaatctatgtcgaacgactgggtgtttcttggaaagaatgacagaattgtagaagtcagcctggaaaagattccagaaccgagggtcctggacaccaggatgacgaggaatgagagtagggttggtaaacctcagacgctgaagggtgtctattcccttctgagtgaagtcgacgggagattcatgcggaccgcggctgacgttcgccggatgcatgtgcagtccggtgacgtagagagcatcaggcgccggaaggtcgacgaagtcgtcgaaagccccatcctcctcttggcagggagcataccctgaggaagacgtgctacgacgaggacgagaggcgccaaccttttggcatctcccgcgagccggctgcgagggcatgggaagagccctcgccagccatccgaccagagccacgtcctctcttagagagggagcgacgaggcggaggagaggggacgggagattcctcctgaatctcgtcggagtcgctgctaaactcaaccacagaggggttgcgacgacgcaccatgattgaaaaggtggtgaaactgtgaaccggttgaagtgtgtgaaggagaggctctaaaggttgtgaagcgaccaaggcgagagtgaatgaagtgggagaagagaaggggagagtcaagtatatataggcagttgagctggtcctcaggaccagttcaaccgcccccatgggccagttcagctggttctgaccagtg

SEQ ID NO: 6915 - DNA, 1149 bp, Zea mays
  Zm_smallRNAprecursor_2404
atacccatcggcttcctcatctactttctttatccagagggtggcatagaactgagctaccacctcatcgttccaggggtattccatggtcataatgttacgtaacccctttctctctaagtttacgagagctgacgacatgtcagcatctcccatattctcacaaccctcccagtcaataaatctatgtcgaacgactgggtgtttcttggaaagaatgacagaattgtagaagtcagcctggaaaagattccagaaccgagggtcctggacaccaggatgacgaggaatgagagtagggttggtaaacctcagacgctgaagggtgtctattcccttctgagtgaagtcgacgggagattcatgcggaccgcggctgacgttcgccggatgcatgtgcagtccggtgacgtagagagcatcaggcgccggaaggtcgacgaagtcgtcgaaagccccatcctcctcttggcagggagcataccctgaggaagacgtgctacgacgaggacgagaggcgccaaccttttggcatctcccgcgagccggctgcgagggcatgggaagagccctcgccagccatccgaccagagccacgtcctctcttagagagggagcgacgaggcggaggagaggggacgggagattcctcctgaatctcgtcggagtcgctgctaaactcaaccacagaggggttgcgacgacgcaccatgattgaaaaggtggtgaaactgtgaaccggttgaagtgtgtgaaggagaggctctaaaggttgtgaagcgaccaaggcgagagtgaatgaagtgggagaagagaaggggagagtcaagtatatataggcagttgagctggtcctcaggaccagttcaaccgcccccatgggccagttcagctggttctgaccagtgtggtcagagaaccagaaacaacagagggaagaaagaaaaaaaattcaaatttgcgcgcagctgctggaagtgactggacagggaaaaaaaatgggcgcccctgacacgcatgcatggctagtgcgcgggcagagcagaaatgtccaagaaaaatctgcgcgcgcagcagggggggaagtgaccggacaaggcaaaggtgtctgcatgcaaagccaaaaaacaaaaaatctgcgcgcgcgtg

SEQ ID NO: 6916 - DNA, 1096 bp, Zea mays
  Zm_smallRNAprecursor_2405
aatgagagtagggttggtaaacctcagacgctgaagggtgtctattcccttctgagtgaagtcgacgggagattcatgcggaccgcggctgacgttcgccggatgcatgtgcagtccggtgacgtagagagcatcaggcgccggaaggtcgacgaagtcgtcgaaagccccatcctcctcttggcagggagcataccctgaggaagacgtgctacgacgaggacgagaggcgccaaccttttggcatctcccgcgagccggctgcgagggcatgggaagagccctcgccagccatccgaccagagccacgtcctctcttagagagggagcgacgaggcggaggagaggggacgggagattcctcctgaatctcgtcggagtcgctgctaaactcaaccacagaggggttgcgacgacgcaccatgattgaaaaggtggtgaaactgtgaaccggttgaagtgtgtgaaggagaggctctaaaggttgtgaagcgaccaaggcgagagtgaatgaagtgggagaagagaaggggagagtcaagtatatataggcagttgagctggtcctcaggaccagttcaaccgcccccatgggccagttcagctggttctgaccagtgtggtcagagaaccagaaacaacagagggaagaaagaaaaaaaattcaaatttgcgcgcagctgctggaagtgactggacagggaaaaaaaatgggcgcccctgacacgcatgcatggctagtgcgcgggcagagcagaaatgtccaagaaaaatctgcgcgcgcagcagggggggaagtgaccggacaaggcaaaggtgtctgcatgcaaagccaaaaaacaaaaaatctgcgcgcgcgtgaagagacaggacagggaaaagtggcgcgcttctgcatgcacacccagaaaaaaagattctggcgcgcacaggtcctgctgtcctgctgagcggcagcaagcaaaaaaaaatagtctgcgcgccagggaagtgaccggacaaagaaatggcgctgacagacgctgctgtctgcagagcggcagcaagtaaaaaacaaaacactgcgcgcgccgcaggggaagtgaccgcacagggg

SEQ ID NO: 6917 - DNA, 1152 bp, Zea mays
  Zm_smallRNAprecursor_2406
aaaagatcaaagtaaagaagaacaccgtggtattcaagttgatcattggatcacttgagaggagttgagtgcaactctcgtccgttgggacaccacaacgtggagtaggcaagttttgtacttggccgaaccacgggataaacaccgcgccatctcagtgttttattgtggttattgtgtttggactcatctctagccacttggcactattgtgctaacacttaacaagtttttgtggctataagtttaaggttcacaggatcacctattcacccccccccctctaggtgctctcagtaggataatcatcatcatagcataagtggtcgcttcggcaaaaaaaaaagagcttcttcgtgtacgaaaagaagagcttcggaagaaagggaaatgttgttttctatgcttcgctgtgtacgaaaagaagggaaggtgttttttcgccttcggctcaaaaagataatttcgtccacatcaaagcacctctcatacattaatggaaggataagagcatattacaaggtatgaacagaattcattaaagacaagtttagttacatttacaaaagttatctcaaaagtttcttgagtctgtctacagtctactcctatttaatcttcaagggacttcagcttcggcgtcattctttttaaccatcggcttcggcttcgtcatcctacatgaattaagttgctgtaagtcaaaatcgagcttgaaggaagaggtaagcacaaggtatgatttcttactagttcaagatgactccgagcttcgtctccagccttttctcgcccgccttttgtccatatcatctttacaaatctattggaaatgcttcgggcgagatcaggaatgtcatctagaattgatggtgataaagtgaaattgggcctattgacaatctttccatgatcgcagccagcttttaggaaagctgcagcagtgccccgagaagctacccaggcgcagaagtcaccgtgcccggctataacttcgtcaagctcatcaatttcaccctcaatatgttcgaaggtctttggtaaatcttcagctgacggggtgaatttctcactgctagctccgactgaatggaaaatttttcttagtcgctgaatacatttgttgctaaattctaaacatttgtcttgaag

SEQ ID NO: 6918 - DNA, 1152 bp, Zea mays
  Zm_smallRNAprecursor_2407
tccgccgaaagtaaaaggcgaagaagctccaaagtcgttcctaagggaatgcagagcttacagcgaaaagtcaacgctgattccgccgaaagtaaaaggcgaagaagctccaaagtcgttcctaagggaatgcagagtttacagcgaaaagttagcactgatatgtggttgtttctaaggaaataatggctgtgattatggcttcggatatgtgtttggacattcatttgcacatcacattacatcatagcatttgcattcataaacattcatccaggcatatgtaggataatcatcatcatagcataagtggttgcttcggcaaaaaagaaaaaaaaagaagaagagcttcttcgggtacgaaaagaggagcttcggaagaaagggaaatgttgttttctatgcttcgctgtgtacgaaaagaagggaaggtgtttttttcgccttcggctcaaaaagataatttcgtccacatcaaagcacctctcatacattaatggaaggataagagcatattacaaggtatgactaaaattcattaaagacaagtttagttacatttacaaaagttatctcaaaagtttcttgagtctgtctacagtctactcctatttaatcttcaagggacttcagcttcggcgtcattctttttaaccatcggcttcggcttcgtcatcctacatgaattaagttgttataagtaaaaatcgagcttgaaggaagaggtaagcacaaggtatgacttcttactggttcaagatgactccgagcttcgtctccagccttttctcgcccgccttttgtccatatcatcttcacaaatctattggaaatacttcgggcgagatcaggaatgtcatctaggattgatggtgataaagtgaaattgggcctattgacaatctttccatgatcgtagccagcttttaggaaagccgcagcagtgccccgagaagctacccaggcacagaagtcaccgtgcccggctataacttcgtcaagctcatcaatttcaccctcaatatgttcgaaggtctttggtaaatcttcagctgacggggtaaatttctcactgctggctccaactgagtggaaaatttttcttagtcgttgaatacatttgttgctaaattccaaacatttttcttgaag

SEQ ID NO: 6919 - DNA, 1113 bp, Zea mays
  Zm_smallRNAprecursor_2408
tgtgaaaaaagcaaacaatgcaattttgtggaaattggattctcatccgtgaggccccaagtgctacttctcagggtaaaggcaagacagcttgaaaggtgaaagctctctatagtgtcagtgcgagtggaataggttcgatcgatattaaaagtgttgctgtaaaaattgagattgtgtgggtgttcagtctaccgctcatgttcgacactatcgaaaatcatgcattggatggatgcccgggcattgagaaggaaggatgctttcagaggcgaaagttgatggggagagagagcgtctgtgatccatggatctccgatcgggaaactgtatccaagctccgtggctagtctgcgctctttggacttttcaaacttagcgaactgaaacatctgagtagctaaaggaaggaaaatcaaccgagaccccgttagtagtggcgagcgagagtggaacaagggctttcatcaaaagaaatccgaagcggtttcattcgatttgttgtggattggatgatggaaaaaccagcaagcagcaagcgtaggctgtgttgccgtagcgcgccctacggagttgtacaaagtcagcaaccgttttggggtggggtgcaagcataggcaacacaggacggggtggggcgcgcagtgaactggttttctaaaaagattggaagatctggccaaagaaggtgatagccctgttcattcgttctcatggttcgatccttcccagtaaaatgcggcgtgtttgaatgatgatcgctctttttgaaattggtgcagttccgggtaatagttcaatagaaaactctatatcacggtcaggtggcgtacctgataattcttctggaaatacgtctgggtattcacacactattctgatgtgctccaaagatttctcttccaactgatttaccattgcctctgttgttgctggcataatgacattgacttcaattctttctccttgcggactggttatgtaaccatccttttggcacaggatattactccatcatacttggtcaagtagtctatttcaagtatcacatcgattccactcgattccaaaattatcagcttaactagaaagcttaggcctctaatttcaatc

SEQ ID NO: 6920 - DNA, 1072 bp, Zea mays
  Zm_smallRNAprecursor_2409
cgccaatcatcctcgtcgcaacacctcctcctctggatacgctccttgccaggaggaggatggagcattcgacgacttcgtcgatcttccgccgtctgacgcactctacatcaccggcctacacatgcatccaacgaatgtttcccggggacctaatgaacctcatgtcgacttctctcttaagggagtggacacccttcaacgcatgaggttcactaacccttctctcactcctcgtcatcctggtgtccaggaccctcggttctagaatcttttctagactgatttctataattcagtcattttgtccaagaaacacccagtcgttaggcatcggtttattgactaggaaggatgtgataacatgggagatgctgacatgacgtcagctctccgtaacttggagagaaaggggttaaaaaatattatgacaatggaatacccctggaacgacaaggtggtagctcagttctatgccaccctctgggtcaagaaagtagatgaagaagctgatgggtatgattaccctgtcatgtatttcttcatccaggagaactggcacaaagtcagctaccgtcgttttgcccatattctgggcttctctgatgctgatattcagggcagcagcatgagagttcatgacattaagctgcccatgcgggaagagactgaatttattcatgtctctatggatcgggagttctggaccaccgccaacatgcataggtactacaggtaccttaactctttgtccaggatgaccgttctcccgaagggcgggaatcaaatgaacatccttggggagagtcgggtcttccttctcctccttgctcccaacagtctcgcccgcatcaatgtgtttgacatgatttgggaagagatccttcgtgcttcctggtctcctctcaaggggtgtcttcatgcaccctttatcatgaagatgatcgaagtggtcacccagactcacttcgaaaaacctgtcaaacactcccgctacgtaccctactgggttgattccaccaacctagctgctcgtatgaagcgggctccctcagggtctggaggccctgct

SEQ ID NO: 6921 - DNA, 1048 bp, Zea mays
  Zm_smallRNAprecursor_2410
gcaactgagcacaacaagcaccagcagctatgtattcggcctcggcagtggaaagtgcaacacagttttgcttcttagagctctaagacaccagggaccgcccaaggaattggcaagtccccgaggtgctttttcgatctactttgcaaccgacatagtctgaatgagagtagccaaataaatcgaaaaaggagcccttaggataccagagacctagattttgggtgtgaactagatatctcaaaattctcttaacagccactaggtgacactcttttgggttatcttgaaaacgggcacacatgcacacactaagcatgctatctggcctagatgcacataaatacagtagagatcctatcattgatctatgaagcttttgatctacagttttaccttcttcatttaagtcgagatgaccacttgaagccattggtgtcttggcatgcttttccttttccatgccaaacttcttgagcatgtcttgtgtgtacttgctttggcacagaaaggttccttccttgagttgtttaacttgaaaacccaggaagtacttgagctcacccatcatggacatctcaaacctatttgtcataaccctactaaattcctcacagaaagtttcattagtactgccaaaaataatgtcgtcgacatatatttgacaaacaaataattgattgtcaactttgcgagtgaataaagtagagtctacttttcctatttcaaaaccatttttaagcaagaaatctttaagacattcataccatgctctaggagcttgtttaagcccatagagcgctttgtgaagaaggtagacatggtttggcttcttaggatcttcaaagcccggtggttgctccacatagaccaactcttgcagtggtccatttaggaaagcacttttgacatccatttgatataatttgaaatcatggttagtagcataggcaattaatattcttatggactctaaccttgctactagtgcataggtttcaccaaaatcaagtccttccacttgagtgaaaccctgagcaaccagccg

SEQ ID NO: 6922 - DNA, 1127 bp, Zea mays
  Zm_smallRNAprecursor_2411
tagctgaaaaagaaggaagagaaggaatgctcaagcaagcaactccaacgagatcacagctactaatcattatatataccgagcaagaagaaagcgactgctcaaaccggcgaggtctcgactcgagaacaagacccacgctgcaaccattcttcttcagtcttcaccgtcgccggcctctccaacgacgtctggcgagaggaaagatcgagagcacagctcaatccggatggtcctcgcttgcgatctccaccgtcgcgcatctgccagcaggaccagccgcgcgccgtccgtcgcaggtgggcgggctgcgccgcagctctctggcttggctcggaccagtcgccaataaacgcggctaactctccgcctttaaaacgggcaagctcctgcgatccctttcgagagcgcgccgtcgccgggtccagctgcgtctcggtcgatggtggtgcatgggacaccgtatcttatgagcaaggagccctgctgctcccatgagcaaaatcaatccagaccacatcctacacatccaacgatgctgcgtcagaggggtttttataaaatgtacagatttgcaaagaacattttacaaaaccccctgacacagcaccgttggatgtgaagagtgtggtctggattgattttgctcatgggagcaccaacgctccttgcgcacaagatacgttctcggtgcatggtccgtcctgtgggttgagttgagcgggcctcatgaacggcgctctggccacgtcccgccgctatcaggcagtgcttggggaggcaccagcacccaccagtgggcagtggctaatcttcgtagctagctgacattggattattagtcgacgtggaagcgcgagaacacggagaaacactgcatgctgcttttgcaccaccacctacgctccatgtcatcagcgtttgttgcatgctgcttacaagtacagtccgtagcgttgcccctgctggggtctcatcctcctgtagtcctatactcctattatcgagaacggtagcaaaaacaaaaaataataaaacctgtgtcaccctacaagataaaaattaaacttgctaactttttttttctctctctctacaattgaataagtggaatatttaataaaata

SEQ ID NO: 6923 - DNA, 1206 bp, Zea mays
  Zm_smallRNAprecursor_2412
cacattggctcgcgtccgcggtcgctatgtcgtccggattccaaggtgctcgagttgattttttaattttatgctttacaatgcaacttcctaatctctttccccactccggcagtgtgaatcgctttcatttgtctccgcgcgaactcaaccctaataggcgccgccgttgacagtgtcgtcgagccggccgctgctgtcaatcctccgccaccgcgtcctataggtatttcacatgcccaccaacggtcttcattgatcttactgttcttgtgcgattatggttcagttatttatcatagagctttaggtttgataaaggttcacggacctgttcttttagactcattgtatgctcaaattgtgtgggtgaagatatatgcaatgatgtgaattatacatacctttatgaagtaggggttgatattttgatgtggaaacaagtgtagtggggaggttgaattatgtaccgtgatagaccggacaggcccttgggcttccttgtatgggtaactttctgcattgataattctactgtttctcataatgtagtctagggcctcggagcatgatccatgtttgcatccaaagttcctgaggttgtttccatctattatgtgttgctcagaaagttttattaactccttgtttcgtatgaagtgagctgcctatatgagaccggtgacaccaaatgcccagcatgaacctaaagaacaaattacaagctcaggtctaatagtgtgcgctcagcaactatgcatataagttacagtagcgaattgctatgtaccgtgatagaccggacaggctcttgggcttccttgtatgggtaactttctgcattgataattccaccgtttctcataatgtagtctagggcctcggagcatgatccatgtttgcatccaaagttcctgaggttgtttccatctatcaggtgttgctcagaaagttttattaactccttgtttcgtatgaagtgagctgcctctatgagaccggtgacaccaaatgcccagcacgaacctaaagaacaaattacaagctcaggtctaatagtgtgcgctcagcaactatgcatataagttacagtagcgaattgctaataggtagtgacattgcatgcttaccacagtctccctgatcttgtattggtgtcacagctccataggtactccaattgacaaatgtcgggagcatgtcagg

SEQ ID NO: 6924 - DNA, 1116 bp, Zea mays
  Zm_smallRNAprecursor_2413
ctccgccaccgcgtcctataggtatttcacatgcccaccaacggtcttcattgatcttactgttcttgtgcgattatggttcagttatttatcatagagctttaggtttgataaaggttcacggacctgttcttttagactcattgtatgctcaaattgtgtgggtgaagatatatgcaatgatgtgaattatacatacctttatgaagtaggggttgatattttgatgtggaaacaagtgtagtggggaggttgaattatgtaccgtgatagaccggacaggcccttgggcttccttgtatgggtaactttctgcattgataattctactgtttctcataatgtagtctagggcctcggagcatgatccatgtttgcatccaaagttcctgaggttgtttccatctattatgtgttgctcagaaagttttattaactccttgtttcgtatgaagtgagctgcctatatgagaccggtgacaccaaatgcccagcatgaacctaaagaacaaattacaagctcaggtctaatagtgtgcgctcagcaactatgcatataagttacagtagcgaattgctatgtaccgtgatagaccggacaggctcttgggcttccttgtatgggtaactttctgcattgataattccaccgtttctcataatgtagtctagggcctcggagcatgatccatgtttgcatccaaagttcctgaggttgtttccatctatcaggtgttgctcagaaagttttattaactccttgtttcgtatgaagtgagctgcctctatgagaccggtgacaccaaatgcccagcacgaacctaaagaacaaattacaagctcaggtctaatagtgtgcgctcagcaactatgcatataagttacagtagcgaattgctaataggtagtgacattgcatgcttaccacagtctccctgatcttgtattggtgtcacagctccataggtactccaattgacaaatgtcgggagcatgtcaggacctggtggtccaaatgggacatctataccaaaaggagcaccgccgccacgaaaaggggcgctaggtcctataagatgataacatagatatctttagaataaagtaacaaaagta

SEQ ID NO: 6925 - DNA, 1206 bp, Zea mays
  Zm_smallRNAprecursor_2414
ggttcacggacctgttcttttagactcattgtatgctcaaattgtgtgggtgaagatatatgcaatgatgtgaattatacatacctttatgaagtaggggttgatattttgatgtggaaacaagtgtagtggggaggttgaattatgtaccgtgatagaccggacaggcccttgggcttccttgtatgggtaactttctgcattgataattctactgtttctcataatgtagtctagggcctcggagcatgatccatgtttgcatccaaagttcctgaggttgtttccatctattatgtgttgctcagaaagttttattaactccttgtttcgtatgaagtgagctgcctatatgagaccggtgacaccaaatgcccagcatgaacctaaagaacaaattacaagctcaggtctaatagtgtgcgctcagcaactatgcatataagttacagtagcgaattgctatgtaccgtgatagaccggacaggctcttgggcttccttgtatgggtaactttctgcattgataattccaccgtttctcataatgtagtctagggcctcggagcatgatccatgtttgcatccaaagttcctgaggttgtttccatctatcaggtgttgctcagaaagttttattaactccttgtttcgtatgaagtgagctgcctctatgagaccggtgacaccaaatgcccagcacgaacctaaagaacaaattacaagctcaggtctaatagtgtgcgctcagcaactatgcatataagttacagtagcgaattgctaataggtagtgacattgcatgcttaccacagtctccctgatcttgtattggtgtcacagctccataggtactccaattgacaaatgtcgggagcatgtcaggacctggtggtccaaatgggacatctataccaaaaggagcaccgccgccacgaaaaggggcgctaggtcctataagatgataacatagatatctttagaataaagtaacaaaagtatggacaaattaagtcccagcctcagaatgaagcagtgacaaacctagcatagacttataatggggaggacaccgataagacgattagttgcaattagtagtttataaccgattggcaccaaggaagtaataagcttgactaacagatgactagataacattgtccaggcagattccattcccttttgttttttcctttttgaagg

SEQ ID NO: 6926 - DNA, 1175 bp, Zea mays
  Zm_smallRNAprecursor_2415
tgttctttaggttcatgctgggcatttggtgtcaccggtctcatagaggcaactcacttcatacgaaacaaggagttaataaaactttctgagcaacacctgatagatggaaacaacctcaggaactttggatgcaaacatggatcatgctccgaggccctagactacattatgagaaacggtggaattatcaatgcagaaagttacccatacaaggaagcccaagggcctgtccggtctatcacggtacataattcaacctcccaccacacttgtttccacatcaaaatatcaacccctacttcataaaggtatgtataattcacatcattgcatatatcttcacccacacaatttgagcatacaatgagtccaaaagaacaggtccgtgaatctttatcaaacctaaaggctctatgataaataactgaaccataatcgcacaagaacagtaagatcaatgaagaccgttggtgggcatgtgaaatacctataggacgcggtggcggaggattgacagcagcggccggctcgacgacactgtcaacggcggcgccgattagggttgagttcgtgcggagacaaatgaaggcgattcacactgccggagtggggaaggagattaggaagttgcattgtaaagcataaaattaaaaaaatcaactcgagcaccttggaatccggacgacatagcgaccgcggacgtgagccaatgtgacgcggggcgcgcaagattgacaacgacagcggctcgacgatgctgtcaacggcggcggcgattaatgttgagggcgtgcggcggtggaggacggcgaaacgggctggcggcggcggatgaacaagaatcgcccaggcgaccgctgaagaaacgcggcgagtcggccaggatggttgaccgcgcgggggttagggtatagaagtgtttgaccgcgtgggaagtggggtagtgggcccattcctttatttctggaacgtgggtcggctagagtagttatgctaaatcactattatgtataaacggaagaatggaatagcgtaaacatgtagggctcgcggttgttactctgtttacgctaaaatgggtttccgtttacgataaatctgttcgcttgcgtaaaaagtgatcggacgtgggctggggctctctacagttatatagagcccagagctcttaa

SEQ ID NO: 6927 - DNA, 1171 bp, Zea mays
  Zm_smallRNAprecursor_2416
atactgaaatctggccaatattgaaaatctgacaaagctgtgctcataaccatgtttgagtgatcaaatctatttggattggcttgaaattcagtttacttgctctatgcatatgatagcaaagtctgtgcaaatttcataatcattggataagtgaaacttcttgattaagtcaatcttgtcagcacaaacacagcagttttcagcatgtacctaccgtgggagatgttatggctggcagcacatatgaagtcaaatgagtctcaactttttacagctgttagcagacttattaaagcacatctccaccaattgtcgtggtcataggatctgtacatcaaaatttatgaatgtttctttggagtatacagaatctgtcataagtgacaagtatttgaaatattgaaagtcactttgattggaaggctctcatataggataaatcacataagttgtctgagagaccatagtttggtttttaattgatctataatcatggaaagtgaaggggtacaaggatatttgttgagaaatattttggcacttatcttggtactccaagttgaagatcaagaccaaagatgatcaaagttgaggttatcatataaccgattgcataatcttctttcttacatatggcaatccaaatgcttaaattggttgtaagtatttcttggcacatttcaatttgattactctattattgccatgatctagacataaaagagaaaaaactcgtgttcgtgaatgaataaggtgctaagtaagaaattcaaattcttaaagcacttatctaaaggggaattctctatatgactagagttgtgaaactaacttttttttaccaaagtgatctatgtagtttcacagcatgagaatgagtttctcaaatggactatgtgtcacacccggttttagaaggcaaaccgaatgcgaaccatgtacgtgccaggatcagttattcacgtacacagcagttacataacatggacatcatcacacagtgctcaaaatagtattaataagggaaatagtcgattacatcatacgtctgagacgtccatatagttcttacaataaatcaaagtgcggaaaagaaacgtagataaccgcggccttcacaggcaaccgactggggggttgccgctaacccacacctagaactcgtcgt

SEQ ID NO: 6928 - DNA, 1130 bp, Zea mays
  Zm_smallRNAprecursor_2417
actttgatgtttttattagcttttgttagttttcaagtttggaatttaatccacactatgttttggttttagaatataatccatatgaaataaatgaacaacattggttgattaggtttatggatttaatctcataagggattgggtgtccaaatatggaaaaactcatcacaacaaaattcttaatgtgtcggaaagaccttatttgattattcctcatccccgccactctcggccttctccttcccctcaactcatgccgacccctcccctcctcttccctccacgagattgtagtgctagaacatcttcaagggactagccaaataacatgtcaagccaaattttagctatttaacagcaaaataaatctacaacatactagccatttaacttgtcaagtcatccgacttttcaaattgctctcattgctcactaagagcaactccaagagactaggtatatgattttgtaaaggtaaatttagctaatagtaaaagaaaattgtatccaatagactatgtaaacgactcttcaaatttagtggctctctatttctccatcttcgctctccaattttggatagtctgcttcactctctattcagtccgtaggtttaccgagtctgttggattagcctacactttttttttaaattctgttttagagagtagctaaatcagtaaatttggctagtctttttagctaatctcttggaattgctctaaacttggctagccactccgactagctaaactaactggcatgttagagagtctgttagaatgagatattaggtataatcttcgtggagaggtaaataaaaatcaaataaagagtaaaaaatataaaatctctcgaacatgttcttaacacgggctatatgatagtttgcataaagtagagagggagaagtagcacacggcgtttttaaaaattaatgctctgatatatattagagattagaaaattttaaaagaatctgttatacaggaccacatgagataatgtgttttgtttggttcccaaaatgtaatgtaaatgacaacagtaatggtttgcattcgattaccagcgataataaatttgaataggctgatatcaatttataatgtggtatccgattacga

SEQ ID NO: 6929 - DNA, 1141 bp, Zea mays
  Zm_smallRNAprecursor_2418
tctagctcagccttctgctccacctttcccttgtccttgaggacatgttctacaacacctcttagctcatgatgtatttactggccacctcgaagaggggagatgaagtttagatccatgcgaatgagccttcatggaagttctcggtccctgaggtctttgcgaaagacgtagacatgtcttctcagacatgcttgaaacatcagcttacacgtcatgccaatgcttgatgtacctgtgcatagtcccatattcctactgcatgacttgcatgaggtcttagggatgtttggttactagggactaatttttagtctttagtctattttaatctctaaattgcaaatacggaaatggaaatagagttttagtttccgtatttgataatttataaactaaaatttaataaaataaaaggactaaaagttagtccctagaaaccaaataccccttattgtgtaggcaacgacttgcaagcagtccttctatgcaaacgtgtaagcaaactatctgatccattagatcgtgatccaaccgtaggtcacatttaacatttaaacccttccaccatcacctcaataatatttataaaaaatctcctaacaaactatggttgtatctatggttggatcgtaatctaatggatcagatggtttgcttgtacgcttgcacagaaagactgtttgcataataatcgttgcctattgtgtattctcctatttgcaggttatgctaaagttattaataaataattaaatagatacttcagcagttcagctaccccatgaacgacatagctagccatgaggccaaacaactctgttgtacctcacacacattggcaatgtatcccactccttgcccagcacgtcaacacagtgtttctccagaatatactgcagtctgcggcttggtcagttgccgaagccgtgcagtctgcggctcctgcctacagctacaggtgccgtgagcgtcgacgacgccgcctctcgtgctctgtctgtggcgcacatcaaatcctctcgcagaacagccaaaccaaccaccaaaatgtaagaacacacgcccggcgctgtgacgcctacgctactagtcagtactcagtacagtagtcacccccaaagctccgcctacgcacctc

SEQ ID NO: 6930 - DNA, 1132 bp, Zea mays
  Zm_smallRNAprecursor_2419
ggttcgtactctccaaactacccgcatcaacactagctacgcccctcagccccggcagattccggtctacctagtggtagttgaggaagttccggtggatctccctcccatccgagtggagaatgtagtcaacctggaagacagcttggaggaacagctgtcgacccccaccccgttggcagagtccctggccttcacggctaggtcatcgacgtcagcaccgcctgcaccaaccttccaagcacctgcaccttgaggcgacgaccccgacgactccggagatgacgatgatgaggatgacaacgacaaagaaggtggagatgaacacgtccacaaggaagctgactacgcccagcaggactacttcatggggtttggttctgttgtcgaacattacacatcaatgttcgagacggggcacttccctaacctgctgcaagaagtgctacacgcgccaggaacctacgtccgccccctgtacgaaacaaggcgagtgagcgagcctccccgggcttgctactacatcacccgcatccacgtcagggtgatggatgcaggggacaggggattcaggactctgtctgctcacgagtccctaacaccactgtccacctatgctgcctcggtcagcgatgctgcccgtcggaccctgtggtcgctcagccacacctaccagcagcagctgcagaacacgaggttcaagcatcttcctcagcgtttgcgtgaaggaagtcagaccagcatcgtcccaggtgaagttggtgaggatcgcctcaacaccctagctggtgtagtggcaggtctcaacaccgacctggacagtgccaccccggatctctcaagggtgcacttggagctggagaatgcccatgccaggattgcagccctggaagcccaactgcaaggactggatccgcctgaagctcaggttcccgccatggcattgtctcctccccgcaagaggctgcgctatggagagctcggatccgtcactaggctgctttaggtgttttgagatatgatgtaataagttatgcttcacgttagacgttgaacactcttttaagttatcatattaataaataccaaccatgtgatggtgattgattgaaatgtttgatttggatctttg

SEQ ID NO: 6931 - DNA, 1160 bp, Zea mays
  Zm_smallRNAprecursor_2420
acttggtccttaccactctctagtagatactgcaggaattcagggcactttctcttgtaatgacctgtcttcttgcaatagaggcaggtatcagggggaactgaaaaactgcctccttgtcttggctgattattattgctcgaggaagcttgattattctgtttaccctgcttcttaaactttttctttaaattcttgttctgtctggggatattgccttttatgaggttgacagagtctccagtctgctttaacctctcttcctcctagacacactgtgccaagagttgatctatgttccacttatcagtgacactggtgttatactgtatatggaaagtctcaaactccttgggtagagacttcattatcataaacactacaaattcctcgtgtaaaggagacccgaggtacttgtttatcttagctacgatggataacattttctgaatgaatggtctgacaccatttccatcgtattttgcattgacaaattctgtcattagagagcaagcataagccttagaagacccttgatgatgagaggctaccctctcaaggtattccttggcagtctcgcactctggtatggaactattaagaggctccttgatgctcctcttaagaataatcatacatttgtcatttgatctttcccacttgaccttgtcgatgctgtattgcatccacctgtggtcatagttgggagtgcccactgtgggctctactggtttatcaaacctcagtgcgtaatctatctcacccactgtggttatcatatcaatatcctcccgccaagaatggtaattactaccatctagcggtttcatctgagcaatctggctaatcagcatggcggtatgagcacctttgcaaaattaaaacagaaaatatttaggacatctgaaataaatactgaatcatagaacatgcatgaattaaatattcaacgttgatcaaataataatcatgccatatctatgaaaatttctgatcacaaaaaaaattctaaaccattgttggatgatctagaaaacataaacttgtataaaattgtggtaacaatatccaacgttggttaaaatattcaatcaccacaaaattttctgaattctatgcaatttaaacaataatcaatccacgttggtttcataattaac

SEQ ID NO: 6932 - DNA, 1171 bp, Zea mays
  Zm_smallRNAprecursor_2421
cagctctgctgcgcgcgcagactttctttatttattttctctgtccagttccttctcctcgcgccatgcatattttctttctttcttgcctcgctcaagtgcagggagcgcagacattttttttgagcagtttttttggtcgctgcgcagcaaaaccagctgaactgggccatgggggcagttgaactggtcctgaggaccagctcaactgcctatatatatttgacactctctccttctcttttcccacttcattcactctcgccttggtcgcttcacaacctttagagcctctccttcacacacttcaaccgcttcacagtttcaccaccttttcaatcatggtgcgtcgccgcaacccctctgtggttgagtttagcagcgactccgacgagattcaggaggaatctcccatcccctctcctccgcctcgtcgctccctctctaagagaggacgtggctctggtcggatgcctggcgagggctcttccttgccctcgcagccgactcgcgggagacgccaaaaggttggcgcctctcgtcctcgtcgtagcacgtcttcctcagggtatgctccctgccaagaggaggatggggctttcgacgacttcgtcgaccttccggcgcctgatgctctctacgtcaccggactgcacatgcatccggcgaacgtcagccgcggtccgcatgaatctcccctcgacttcactcagaaggggatagaaacccttcagcgtcttaggtttaccaaccctactctcactcctcgtcatcctggtgtccaggaccctcggttctggaatcttttccaggctgacttctacaattctgtcattcttaccaagaaacacccagtcgtccgacatagatttattgactgggagggttgtgagaatatgggagatgttgacatgtcgtcagctctcgttcacttagagagaaaggggttacgtaacattatgaccatggaatacccctggaacgatgaggtggtagctcagttctatgccaccctctggataaagaaagtagatgaggaagccgatgggtatgattacccagtcatttatttcttcatccagggtaactggcacaaagtcagttatcgtcgttttgcccatattctgggcttctctgatgcagacattcagggcagcaacatgcgagtgca

SEQ ID NO: 6933 - DNA, 1058 bp, Zea mays
  Zm_smallRNAprecursor_2422
aaacccttcagcgtcttaggtttaccaaccctactctcactcctcgtcatcctggtgtccaggaccctcggttctggaatcttttccaggctgacttctacaattctgtcattcttaccaagaaacacccagtcgtccgacatagatttattgactgggagggttgtgagaatatgggagatgttgacatgtcgtcagctctcgttcacttagagagaaaggggttacgtaacattatgaccatggaatacccctggaacgatgaggtggtagctcagttctatgccaccctctggataaagaaagtagatgaggaagccgatgggtatgattacccagtcatttatttcttcatccagggtaactggcacaaagtcagttatcgtcgttttgcccatattctgggcttctctgatgcagacattcagggcagcaacatgcgagtgcatggcattcggctgcccaggcgggaagagacggaattcattcatgtctctactgagcgggagttctggacaaccgctaacatgcataggtactataggtaccttaattccttgtcccggatgaccgttctcccaaagggcggtaatcaaatgaacgtccttggggagagtcgagtcctcctcctcctccttgctccaaacagtctcgcccgcatcaatgtgtttgacatgatctgggaggagatcgtccgtgcttcctggtctcctcacagagggtgtcttcatgcaccctttatcatgaagatgatcgaagtggtcacccagacccacttcgaaaaacccgtcaaacactcccgctacgtaccctactgggttgattcctccaacccagctgctcgtacaaagcgggttccctcacggtctggaggccctgcctcctcctctgagccacctcgccagcctcctcaccatccttcctcctctccccccgctgctgcctcgcgtccctctcctggccgcgggatctcccatgccacgtgctagtggtcgtggtcgaggtcgtggccgcgggatgggtgctcgcttgctccatgggcttgcggcatttttctc

SEQ ID NO: 6934 - DNA, 1141 bp, Zea mays
  Zm_smallRNAprecursor_2423
aaacccttcagcgtcttaggtttaccaaccctactctcactcctcgtcatcctggtgtccaggaccctcggttctggaatcttttccaggctgacttctacaattctgtcattcttaccaagaaacacccagtcgtccgacatagatttattgactgggagggttgtgagaatatgggagatgttgacatgtcgtcagctctcgttcacttagagagaaaggggttacgtaacattatgaccatggaatacccctggaacgatgaggtggtagctcagttctatgccaccctctggataaagaaagtagatgaggaagccgatgggtatgattacccagtcatttatttcttcatccagggtaactggcacaaagtcagttatcgtcgttttgcccatattctgggcttctctgatgcagacattcagggcagcaacatgcgagtgcatggcattcggctgcccaggcgggaagagacggaattcattcatgtctctactgagcgggagttctggacaaccgctaacatgcataggtactataggtaccttaattccttgtcccggatgaccgttctcccaaagggcggtaatcaaatgaacgtccttggggagagtcgagtcctcctcctcctccttgctccaaacagtctcgcccgcatcaatgtgtttgacatgatctgggaggagatcgtccgtgcttcctggtctcctcacagagggtgtcttcatgcaccctttatcatgaagatgatcgaagtggtcacccagacccacttcgaaaaacccgtcaaacactcccgctacgtaccctactgggttgattcctccaacccagctgctcgtacaaagcgggttccctcacggtctggaggccctgcctcctcctctgagccacctcgccagcctcctcaccatccttcctcctctccccccgctgctgcctcgcgtccctctcctggccgcgggatctcccatgccacgtgctagtggtcgtggtcgaggtcgtggccgcgggatgggtgctcgcttgctccatgggcttgcggcatttttctccgcgtgccgcaacatttctgctgatgtccatgaggtggcacggcgtcagcgggagactgacgacaatcttcgtcgtcaagcct

SEQ ID NO: 6935 - DNA, 1057 bp, Zea mays
  Zm_smallRNAprecursor_2424
aacccttcagcgtcttaggtttaccaaccctactctcactcctcgtcatcctggtgtccaggaccctcggttctggaatcttttccaggctgacttctacaattctgtcattcttaccaagaaacacccagtcgtccgacatagatttattgactgggagggttgtgagaatatgggagatgttgacatgtcgtcagctctcgttcacttagagagaaaggggttacgtaacattatgaccatggaatacccctggaacgatgaggtggtagctcagttctatgccaccctctggataaagaaagtagatgaggaagccgatgggtatgattacccagtcatttatttcttcatccagggtaactggcacaaagtcagttatcgtcgttttgcccatattctgggcttctctgatgcagacattcagggcagcaacatgcgagtgcatggcattcggctgcccaggcgggaagagacggaattcattcatgtctctactgagcgggagttctggacaaccgctaacatgcataggtactataggtaccttaattccttgtcccggatgaccgttctcccaaagggcggtaatcaaatgaacgtccttggggagagtcgagtcctcctcctcctccttgctccaaacagtctcgcccgcatcaatgtgtttgacatgatctgggaggagatcgtccgtgcttcctggtctcctcacagagggtgtcttcatgcaccctttatcatgaagatgatcgaagtggtcacccagacccacttcgaaaaacccgtcaaacactcccgctacgtaccctactgggttgattcctccaacccagctgctcgtacaaagcgggttccctcacggtctggaggccctgcctcctcctctgagccacctcgccagcctcctcaccatccttcctcctctccccccgctgctgcctcgcgtccctctcctggccgcgggatctcccatgccacgtgctagtggtcgtggtcgaggtcgtggccgcgggatgggtgctcgcttgctccatgggcttgcggcatttttctc

SEQ ID NO: 6936 - DNA, 1058 bp, Zea mays
  Zm_smallRNAprecursor_2425
aacccttcagcgtcttaggtttaccaaccctactctcactcctcgtcatcctggtgtccaggaccctcggttctggaatcttttccaggctgacttctacaattctgtcattcttaccaagaaacacccagtcgtccgacatagatttattgactgggagggttgtgagaatatgggagatgttgacatgtcgtcagctctcgttcacttagagagaaaggggttacgtaacattatgaccatggaatacccctggaacgatgaggtggtagctcagttctatgccaccctctggataaagaaagtagatgaggaagccgatgggtatgattacccagtcatttatttcttcatccagggtaactggcacaaagtcagttatcgtcgttttgcccatattctgggcttctctgatgcagacattcagggcagcaacatgcgagtgcatggcattcggctgcccaggcgggaagagacggaattcattcatgtctctactgagcgggagttctggacaaccgctaacatgcataggtactataggtaccttaattccttgtcccggatgaccgttctcccaaagggcggtaatcaaatgaacgtccttggggagagtcgagtcctcctcctcctccttgctccaaacagtctcgcccgcatcaatgtgtttgacatgatctgggaggagatcgtccgtgcttcctggtctcctcacagagggtgtcttcatgcaccctttatcatgaagatgatcgaagtggtcacccagacccacttcgaaaaacccgtcaaacactcccgctacgtaccctactgggttgattcctccaacccagctgctcgtacaaagcgggttccctcacggtctggaggccctgcctcctcctctgagccacctcgccagcctcctcaccatccttcctcctctccccccgctgctgcctcgcgtccctctcctggccgcgggatctcccatgccacgtgctagtggtcgtggtcgaggtcgtggccgcgggatgggtgctcgcttgctccatgggcttgcggcatttttctcc

SEQ ID NO: 6937 - DNA, 1071 bp, Zea mays
  Zm_smallRNAprecursor_2426
gaaggttccccaagacccatcgcaaaacactgtccatacttcggcatctttatttgtttcttcatcctgagcccctggcgtccaatcggcgataaaatctgccaacgcttgggactggatcgaagatctatgcacataatcaatgcaaaattcattgagctctgcagcccattttccaatccgcccagtagcttctctatttctcataatatccttcaacggctgcgaagaaggaacaataacattgtatgcttgaaagtaatgccgaagcttcctggatgccatcaaaacagcatataacaccttctctaattctgtatagtttttctttgatatactaagaacttcagatacaaaatacactgggacctgcttcttgacttggccgtcaagcttctcctggacaagtgctgcacttaccgctgagtgcgaagctgccacatataataacaacggagcccctggcgttggtggagttaatgttgttaaatctatcaaatattgcttcaggtcctcgaaggctttttgttggcttggtccccattgaaagacttcgactgatttcagtacttcgaagaatggtagatttctttctgctgatctggatataaatctattaagagatgccagcctccctgtcaatctttgggcccccttttttgtagttggtggctccattcgaagtatagcttcaattttacttggattagcttcaattccctttgttgaaaccaagcatccaagaaatttccccttcttgactccgaagacacatttttctggattcaactttaggccagcttgcctaaaactggcgaaggtctcttgcaaatcagcaatgtgattttcctgcttcgtgctttttacaatgatatcatcaacataagttagcacatttctgcctatctgagattgaagaaccttcgcagtcattctgctgaaacttcctccagcgttcttgagcacctcaggcatccgaagataacaatatgttccactaggggttatgaaactggtctttggctcatcctccttcttcatccaaatttgatgatagcctgaataacaatc

SEQ ID NO: 6938 - DNA, 1150 bp, Zea mays
  Zm_smallRNAprecursor_2427
ggtttaccaacatcctctttatgaatatgttctcatgtgtgctctgtgtcagctccagcttagtggtagttctgtcttctgtgaggtgtgaattaaccaaatatttgttcacttcccaatttgctattttttttgttacaatgtcatgagtggtattttttagggcactctaggtgctatagatatacaacattgcctttgttagatctctgttgtgtgtttttcatctgtttgcaggctgcatcctttctattcacggttttagttctactattctctaatccaataaggatttcgcaggcgaatatttagtctttcctgtcttgtctgttaatttagaaccttatcaaataaagcattcttttttggtttgtcccaccatcccacccaatgaagtgataggattcttttcaataaaatcctatgtagtcataagttttttttttcattcccatagcttctcctttagaggttagatttgaggcaacgactgttatgcaagcagtccttctgtgcaagcgtgcaagcaaaccatataatccaccacagatacaaccatggtttgttaggggtttttttataaagattattgagctggtggtggaagggtttaagtgttaaatgtgacctacggttggatcgcgatctaatggatcagatggtttgcttgcacgcttgcacagaaggactgcttgcatagcagtcgttgcctagatttgatgggtgtagttgaaatcttgctactggtatagcatatgcactgcagtacatcagggtatcgtattacactgataaacatgttctcaggtgtgctttgtttgactgtgcagagccagctttgtggtagttctgtgaagtgtgaattagcaaaatatttgttgttaactttcaaacttggtgttcattagttacaacgtcatgattgatactttttaggacattcttggtgctatagaaccgtgcctttgttaggtttttgttgtgtgttttccctctggttggatgcttgcagcctttctcttcattgtttttgttccactattattaatcgtttttgttaaaatcttgctatcagtgtagcatctgtacattacatcagggtatcacatattacatggattggaatctcatgtgtagaccatgtagtgtt

SEQ ID NO: 6939 - DNA, 1151 bp, Zea mays
  Zm_smallRNAprecursor_2428
ggtttaccaacatcctctttatgaatatgttctcatgtgtgctctgtgtcagctccagcttagtggtagttctgtcttctgtgaggtgtgaattaaccaaatatttgttcacttcccaatttgctattttttttgttacaatgtcatgagtggtattttttagggcactctaggtgctatagatatacaacattgcctttgttagatctctgttgtgtgtttttcatctgtttgcaggctgcatcctttctattcacggttttagttctactattctctaatccaataaggatttcgcaggcgaatatttagtctttcctgtcttgtctgttaatttagaaccttatcaaataaagcattcttttttggtttgtcccaccatcccacccaatgaagtgataggattcttttcaataaaatcctatgtagtcataagttttttttttcattcccatagcttctcctttagaggttagatttgaggcaacgactgttatgcaagcagtccttctgtgcaagcgtgcaagcaaaccatataatccaccacagatacaaccatggtttgttaggggtttttttataaagattattgagctggtggtggaagggtttaagtgttaaatgtgacctacggttggatcgcgatctaatggatcagatggtttgcttgcacgcttgcacagaaggactgcttgcatagcagtcgttgcctagatttgatgggtgtagttgaaatcttgctactggtatagcatatgcactgcagtacatcagggtatcgtattacactgataaacatgttctcaggtgtgctttgtttgactgtgcagagccagctttgtggtagttctgtgaagtgtgaattagcaaaatatttgttgttaactttcaaacttggtgttcattagttacaacgtcatgattgatactttttaggacattcttggtgctatagaaccgtgcctttgttaggtttttgttgtgtgttttccctctggttggatgcttgcagcctttctcttcattgtttttgttccactattattaatcgtttttgttaaaatcttgctatcagtgtagcatctgtacattacatcagggtatcacatattacatggattggaatctcatgtgtagaccatgtagtgttt

SEQ ID NO: 6940 - DNA, 1175 bp, Zea mays
  Zm_smallRNAprecursor_2429
ggtttaccaacatcctctttatgaatatgttctcatgtgtgctctgtgtcagctccagcttagtggtagttctgtcttctgtgaggtgtgaattaaccaaatatttgttcacttcccaatttgctattttttttgttacaatgtcatgagtggtattttttagggcactctaggtgctatagatatacaacattgcctttgttagatctctgttgtgtgtttttcatctgtttgcaggctgcatcctttctattcacggttttagttctactattctctaatccaataaggatttcgcaggcgaatatttagtctttcctgtcttgtctgttaatttagaaccttatcaaataaagcattcttttttggtttgtcccaccatcccacccaatgaagtgataggattcttttcaataaaatcctatgtagtcataagttttttttttcattcccatagcttctcctttagaggttagatttgaggcaacgactgttatgcaagcagtccttctgtgcaagcgtgcaagcaaaccatataatccaccacagatacaaccatggtttgttaggggtttttttataaagattattgagctggtggtggaagggtttaagtgttaaatgtgacctacggttggatcgcgatctaatggatcagatggtttgcttgcacgcttgcacagaaggactgcttgcatagcagtcgttgcctagatttgatgggtgtagttgaaatcttgctactggtatagcatatgcactgcagtacatcagggtatcgtattacactgataaacatgttctcaggtgtgctttgtttgactgtgcagagccagctttgtggtagttctgtgaagtgtgaattagcaaaatatttgttgttaactttcaaacttggtgttcattagttacaacgtcatgattgatactttttaggacattcttggtgctatagaaccgtgcctttgttaggtttttgttgtgtgttttccctctggttggatgcttgcagcctttctcttcattgtttttgttccactattattaatcgtttttgttaaaatcttgctatcagtgtagcatctgtacattacatcagggtatcacatattacatggattggaatctcatgtgtagaccatgtagtgttttgccctcttggttaagtctgttta

SEQ ID NO: 6941 - DNA, 1173 bp, Zea mays
  Zm_smallRNAprecursor_2430
gtttaccaacatcctctttatgaatatgttctcatgtgtgctctgtgtcagctccagcttagtggtagttctgtcttctgtgaggtgtgaattaaccaaatatttgttcacttcccaatttgctattttttttgttacaatgtcatgagtggtattttttagggcactctaggtgctatagatatacaacattgcctttgttagatctctgttgtgtgtttttcatctgtttgcaggctgcatcctttctattcacggttttagttctactattctctaatccaataaggatttcgcaggcgaatatttagtctttcctgtcttgtctgttaatttagaaccttatcaaataaagcattcttttttggtttgtcccaccatcccacccaatgaagtgataggattcttttcaataaaatcctatgtagtcataagttttttttttcattcccatagcttctcctttagaggttagatttgaggcaacgactgttatgcaagcagtccttctgtgcaagcgtgcaagcaaaccatataatccaccacagatacaaccatggtttgttaggggtttttttataaagattattgagctggtggtggaagggtttaagtgttaaatgtgacctacggttggatcgcgatctaatggatcagatggtttgcttgcacgcttgcacagaaggactgcttgcatagcagtcgttgcctagatttgatgggtgtagttgaaatcttgctactggtatagcatatgcactgcagtacatcagggtatcgtattacactgataaacatgttctcaggtgtgctttgtttgactgtgcagagccagctttgtggtagttctgtgaagtgtgaattagcaaaatatttgttgttaactttcaaacttggtgttcattagttacaacgtcatgattgatactttttaggacattcttggtgctatagaaccgtgcctttgttaggtttttgttgtgtgttttccctctggttggatgcttgcagcctttctcttcattgtttttgttccactattattaatcgtttttgttaaaatcttgctatcagtgtagcatctgtacattacatcagggtatcacatattacatggattggaatctcatgtgtagaccatgtagtgttttgccctcttggttaagtctgttt

SEQ ID NO: 6942 - DNA, 1174 bp, Zea mays
  Zm_smallRNAprecursor_2431
gtttaccaacatcctctttatgaatatgttctcatgtgtgctctgtgtcagctccagcttagtggtagttctgtcttctgtgaggtgtgaattaaccaaatatttgttcacttcccaatttgctattttttttgttacaatgtcatgagtggtattttttagggcactctaggtgctatagatatacaacattgcctttgttagatctctgttgtgtgtttttcatctgtttgcaggctgcatcctttctattcacggttttagttctactattctctaatccaataaggatttcgcaggcgaatatttagtctttcctgtcttgtctgttaatttagaaccttatcaaataaagcattcttttttggtttgtcccaccatcccacccaatgaagtgataggattcttttcaataaaatcctatgtagtcataagttttttttttcattcccatagcttctcctttagaggttagatttgaggcaacgactgttatgcaagcagtccttctgtgcaagcgtgcaagcaaaccatataatccaccacagatacaaccatggtttgttaggggtttttttataaagattattgagctggtggtggaagggtttaagtgttaaatgtgacctacggttggatcgcgatctaatggatcagatggtttgcttgcacgcttgcacagaaggactgcttgcatagcagtcgttgcctagatttgatgggtgtagttgaaatcttgctactggtatagcatatgcactgcagtacatcagggtatcgtattacactgataaacatgttctcaggtgtgctttgtttgactgtgcagagccagctttgtggtagttctgtgaagtgtgaattagcaaaatatttgttgttaactttcaaacttggtgttcattagttacaacgtcatgattgatactttttaggacattcttggtgctatagaaccgtgcctttgttaggtttttgttgtgtgttttccctctggttggatgcttgcagcctttctcttcattgtttttgttccactattattaatcgtttttgttaaaatcttgctatcagtgtagcatctgtacattacatcagggtatcacatattacatggattggaatctcatgtgtagaccatgtagtgttttgccctcttggttaagtctgttta

SEQ ID NO: 6943 - DNA, 1171 bp, Zea mays
  Zm_smallRNAprecursor_2432
tttaccaacatcctctttatgaatatgttctcatgtgtgctctgtgtcagctccagcttagtggtagttctgtcttctgtgaggtgtgaattaaccaaatatttgttcacttcccaatttgctattttttttgttacaatgtcatgagtggtattttttagggcactctaggtgctatagatatacaacattgcctttgttagatctctgttgtgtgtttttcatctgtttgcaggctgcatcctttctattcacggttttagttctactattctctaatccaataaggatttcgcaggcgaatatttagtctttcctgtcttgtctgttaatttagaaccttatcaaataaagcattcttttttggtttgtcccaccatcccacccaatgaagtgataggattcttttcaataaaatcctatgtagtcataagttttttttttcattcccatagcttctcctttagaggttagatttgaggcaacgactgttatgcaagcagtccttctgtgcaagcgtgcaagcaaaccatataatccaccacagatacaaccatggtttgttaggggtttttttataaagattattgagctggtggtggaagggtttaagtgttaaatgtgacctacggttggatcgcgatctaatggatcagatggtttgcttgcacgcttgcacagaaggactgcttgcatagcagtcgttgcctagatttgatgggtgtagttgaaatcttgctactggtatagcatatgcactgcagtacatcagggtatcgtattacactgataaacatgttctcaggtgtgctttgtttgactgtgcagagccagctttgtggtagttctgtgaagtgtgaattagcaaaatatttgttgttaactttcaaacttggtgttcattagttacaacgtcatgattgatactttttaggacattcttggtgctatagaaccgtgcctttgttaggtttttgttgtgtgttttccctctggttggatgcttgcagcctttctcttcattgtttttgttccactattattaatcgtttttgttaaaatcttgctatcagtgtagcatctgtacattacatcagggtatcacatattacatggattggaatctcatgtgtagaccatgtagtgttttgccctcttggttaagtctgtt

SEQ ID NO: 6944 - DNA, 1172 bp, Zea mays
  Zm_smallRNAprecursor_2433
tttaccaacatcctctttatgaatatgttctcatgtgtgctctgtgtcagctccagcttagtggtagttctgtcttctgtgaggtgtgaattaaccaaatatttgttcacttcccaatttgctattttttttgttacaatgtcatgagtggtattttttagggcactctaggtgctatagatatacaacattgcctttgttagatctctgttgtgtgtttttcatctgtttgcaggctgcatcctttctattcacggttttagttctactattctctaatccaataaggatttcgcaggcgaatatttagtctttcctgtcttgtctgttaatttagaaccttatcaaataaagcattcttttttggtttgtcccaccatcccacccaatgaagtgataggattcttttcaataaaatcctatgtagtcataagttttttttttcattcccatagcttctcctttagaggttagatttgaggcaacgactgttatgcaagcagtccttctgtgcaagcgtgcaagcaaaccatataatccaccacagatacaaccatggtttgttaggggtttttttataaagattattgagctggtggtggaagggtttaagtgttaaatgtgacctacggttggatcgcgatctaatggatcagatggtttgcttgcacgcttgcacagaaggactgcttgcatagcagtcgttgcctagatttgatgggtgtagttgaaatcttgctactggtatagcatatgcactgcagtacatcagggtatcgtattacactgataaacatgttctcaggtgtgctttgtttgactgtgcagagccagctttgtggtagttctgtgaagtgtgaattagcaaaatatttgttgttaactttcaaacttggtgttcattagttacaacgtcatgattgatactttttaggacattcttggtgctatagaaccgtgcctttgttaggtttttgttgtgtgttttccctctggttggatgcttgcagcctttctcttcattgtttttgttccactattattaatcgtttttgttaaaatcttgctatcagtgtagcatctgtacattacatcagggtatcacatattacatggattggaatctcatgtgtagaccatgtagtgttttgccctcttggttaagtctgttt

SEQ ID NO: 6945 - DNA, 1166 bp, Zea mays
  Zm_smallRNAprecursor_2434
tatgctgaagaagaaattggcagaggctcagaaatctgtggtcaatcaagcttgtccgtaattggcatttaaaatttttgggctttatcgggtgattgagaagatttgggaagttgatttcagattggagttatcaccagtagctcccgtacatccggactgccatgtttttcagctgcaacatgttacttctgtcacactactgttttctcagagttgactaactgtgttgatttgggggctcgtggtgtgctgtctgttgaagtgttagagcatcgattgtgaaaaaaaagagcaagaccattcctgaggtgctgatttggtggagtcatcttccaaacgactcaatcatttgggaagattactatgtgcttaaggagagattcccacatgctcttgcttgagggcaagcaagttttgcagcagggggagatgtcaggactgctatggtcgatgacgaggaactagaagctattagtgtaggcaacgactgctatgcaagcagtccttctgtgcaagcgtgtaagcaaaccatctaatccattagatcgtgatccaaccgtagatcacatttaacatttaaacccttccaccatcagcttaataatcattataaaaaaatccataacaaaccacgattgtatctgtggttggatcgtaatttaatggatcagatggtttgcttgcacgtttgcacagaaagactgcttgcataacagtcgttgccgtgtagagattctgtaatggtgtgctgggctttcaagccaagatttatgcgtaagtaattgggttgttaagccagggatcggtgagtggatcggcccaataaaccaggcaatatatactgtaacatgtcatcggaacgacaaaagaaaatacataactgaatagaagttttctcaccttcgtgcttcaggttgtgtctgtgttcctagcacttcatcgccgaattggtgtggctcacgtcgccggtggtctcccggtggccaggggcgtgacatccctccgttttaaaataaaagcatgtttagttcactttttttatattcagtgtctattttttgagaaagttggaatggaaactctaaccctgaaatagggtggggtgatgtattaatagactacgagtgttgggacagacccattacagaggtgggcgagagggt

SEQ ID NO: 6946 - DNA, 1167 bp, Zea mays
  Zm_smallRNAprecursor_2435
tatgctgaagaagaaattggcagaggctcagaaatctgtggtcaatcaagcttgtccgtaattggcatttaaaatttttgggctttatcgggtgattgagaagatttgggaagttgatttcagattggagttatcaccagtagctcccgtacatccggactgccatgtttttcagctgcaacatgttacttctgtcacactactgttttctcagagttgactaactgtgttgatttgggggctcgtggtgtgctgtctgttgaagtgttagagcatcgattgtgaaaaaaaagagcaagaccattcctgaggtgctgatttggtggagtcatcttccaaacgactcaatcatttgggaagattactatgtgcttaaggagagattcccacatgctcttgcttgagggcaagcaagttttgcagcagggggagatgtcaggactgctatggtcgatgacgaggaactagaagctattagtgtaggcaacgactgctatgcaagcagtccttctgtgcaagcgtgtaagcaaaccatctaatccattagatcgtgatccaaccgtagatcacatttaacatttaaacccttccaccatcagcttaataatcattataaaaaaatccataacaaaccacgattgtatctgtggttggatcgtaatttaatggatcagatggtttgcttgcacgtttgcacagaaagactgcttgcataacagtcgttgccgtgtagagattctgtaatggtgtgctgggctttcaagccaagatttatgcgtaagtaattgggttgttaagccagggatcggtgagtggatcggcccaataaaccaggcaatatatactgtaacatgtcatcggaacgacaaaagaaaatacataactgaatagaagttttctcaccttcgtgcttcaggttgtgtctgtgttcctagcacttcatcgccgaattggtgtggctcacgtcgccggtggtctcccggtggccaggggcgtgacatccctccgttttaaaataaaagcatgtttagttcactttttttatattcagtgtctattttttgagaaagttggaatggaaactctaaccctgaaatagggtggggtgatgtattaatagactacgagtgttgggacagacccattacagaggtgggcgagagggta

SEQ ID NO: 6947 - DNA, 1165 bp, Zea mays
  Zm_smallRNAprecursor_2436
tatataactaatcgatcggtcataaacagctcacagatcgatatgccgccctcttaattaatgaaaaactttcatccgaaattctgaaaaatgtcacacgtagccattgtctaatctggccacactaattatacggtgattaaattgaatacagaaaataattaatatccaaatgtcaagaaatcactcccagctgtttcttctactctagctagtagctaggagtatatgtttgttgatataatatacataacaagctaatataacggatgctcgttccatctgtctgtgtgaatttgcagttccacttcgtagggttctacaactgctggaacagtaagtagtaattcgttgcagtaattaattttcatatataaccaattcagatcgatctggattctagctaatacaattaatgtataataattacacacgtacgtacatatgcagagttcgtgggcgaccacacgacgcaggcgttcgtgttcaccgacaaggcagaggacgcgagcgtggtggtggtgtcgttccggggcacggagcccttcaacatgcgggactggtccacggacgtgaacctgtcgtggctgggcatgggcgagctgggccacgtccacgtcggcttcctcaaggcgctgggcctgcaggaggaggacggcaaggacgccacgcgggcgttccccaaggccgcccccaacgccgtcccgggcaagccgctggcctactacgcgctgcgcgaggaggtccagaagcagctgcagaagcacccgaacgccaacgtcgtggtcaccggccacagcctcggcgccgcgctggcggccatcttcccggcgctgctggcgttccacggggagcggggcgtcctggaccgcctgctctccgtggtcacctacgggcagccgcgcgtgggcgacaaggtgttcgcgggctacgtgcgcgccaacgtgcccgtggagccgctccgggtggtgtaccgctacgacgtggtcccgcgcgtgcccttcgacgcgccgcccgtcgccgacttcgcgcacggcggcacctgcgtctacttcgacggctggtacaagggccgcgagatcgccaagggcggcgacgcgcccaacaagaactacttcgaccccaggtacctgctgtccatgtacggcaacgcgtggggggacct

SEQ ID NO: 6948 - DNA, 1032 bp, Zea mays
  Zm_smallRNAprecursor_2437
cacctaatgatacacgtacataggttatgcctctaatagtatttccaaccaccaggtccgcctgagattaataagatttgggtagatgggggggctttaaaaccacacttagaatgaatagtgcactctcctctcatggctcttgtcgatcgcttgattgagaagcaggcctcgacttggtctacaactctaagatctcaggattggcactcttgagggcggacaccggcctaaactccttctgttgaacccctatagaggagggacttcaggaacataaacataaaacagtggctttcggaagcaaaggttgacctcttcgcgacattactctttggcactgtactcgtatccgtgtcctggtagaagatagatctcagtcatggctagaggaatgtgatccgttgtggaaaggcaatatatttttgatttagcccgcgcgtgtggggataggctaataaattattaatccccatcggccagtgtacgtggctgacgggaataaggtaatcccgtcggccctgacacaggccgacgggaataaggtaatctccgttgtctctgacacaggccgacgggagttaatttaattatcgttggccataaggtagccgacgagaattgtcttattcccgtcggtctttaccctatcccacgggagttattttagcgggaatctttagaattcctgttgtgtcgtcggtatgggtctatgagataagacatgagacatggcttctaaaaagggatattggtcctgtttgtttcagtttttttccagtttctggccactagaagctactacaaactactaatcatccaacttttcattctataagaaacattttagttaaaaccgtccagaatcaacgtgaacacagaatcggtaaagtcgttgcgatagtagaaaatcgtcactttttacatcataaactctatagactatttaatctttctccgtacataatctacgtgatacttaaattctttcgcagtaatatacatgatacttaaaccgcacgtaatcagaaa

SEQ ID NO: 6949 - DNA, 1178 bp, Zea mays
  Zm_smallRNAprecursor_2438
caataggttgcctcgcattttgccattctgaaatgtggtacttctgacccttataaggtgcaaggtacccctttctatttggataacctgaatccacaagatagtatttacctgcacaaacagaaatataaagttcaatacttaagacataaatgaatatcgaatgatacaaaagtacaacatacttatttaccttccggtggatgggggaacctatctgcataagttatcaaagtatcttgtaatactctagtgtcatgtactgaacctggccaaccagtgacaacaaatgtgaacctcatatcgaagtcacaaacggccattacattatgtgatgcgtaaccgtgctgaccaatatatttggcttgctccgaggccaggacagacgctggaatgtgagtaccatcaattgctcctatgcaatccttgaagtggggccaaaatctcccctctcgcaaacgaggatgaatctctatgaaatttgggtctttgggcttgattacgtcagatgacatcttatatagtgcattaagtacttcactatacttgcgactaatagtttccaaggagtgaccaaacttattccttatctgcctaaaggattgtggacccccacatgcccacaagaaaatacctagagcttccatagtactgacaccacggcttggaagcagaccataactttccaccaacgtatcatgcaatcgtttaaaaacagtacgtcgcatgcgaaacatgtcaaagcagtcgttactattctccaaagttcggtcaacccattgaatacctgtttcaaccattgttcttctagaaacctcactgggtggcatgccccaaatgtctacagcatatagggcaacaagcaattctgcatctctgtcatccgtgtcatgatcatatgtgtgtgcagcagggtcacacatctgcatgcacacaaacaacagccacatattcatgtataagcacattatataagacacataatcatgtatcataggatcacacatctgcattcacagattgacattgttcacaaacatacaactctgattattcaaatacatgttcaactcgaataattgcaaaactgttggaaacgaaaaattatgagtacgacaagtttatttcgtaacacgacatgactcataatactgacaagactgcaacacgactaacat

SEQ ID NO: 6950 - DNA, 1065 bp, Zea mays
  Zm_smallRNAprecursor_2439
tggacgataaatatttcggaagtcggaggaagtattatatataagtatgcaatcctggaatatatctttcaaactaacattaaccatgacagtaacgaaatatgtgtttttatctctagaatgagagaggagatcgatgtatatctatggtgtaccaaccgggtaggtgatgcagtagagggtatatatatatatataaagaaaaggggttgatcagagagtgggtggagggagagagagtggtagtatctgctgcatttgtaaggtgacaaaggaaaagacaagaaaggtcggcacgagcgtgggtttgctatttgctgctgctatgctagctacgcgagtgtggtgtgctttgtgctgcgtgtgtgatcgatctatctactgagctgtgtggcaagtggacaagtacacgcgcttgcttgtaggacaccgtatcttatgagcaaggagccctactgctcccatgagcagaatcaatccagaccacaccctccacatccaacggtgctgcgtcaggggggtttttgtaaaatgtacagagttgcaaagaacattttacaaaaccccctgacacagcaccgttggatgtggagggtgtggtctggattgattttgctcatgggagcaccaacgctccttgcgcacaagatacgttctctgcttgtagaggaccgtcgtgtgctcctcctcgtctctgactctgatctatgtactcgctcacagttcctgggcatttctcctgctggctgctgctgttgattcaatcaatttgtactgggctgtagtattctcaaaagaatgaactgtgtcgtagtgcatatagtaattgatgattgctcaaacaatggatgtcagacaaaaaggaaaaaaatgtttttttaacatgtttctttgagagggcaaagaaataagaatgcacagccttttgcatctttgttgggatcctggctctctcttttgccttctccgttctccccttcccctaaaagccagcagcgagtagataaaagctcgggtcggttgtggtgagtggtgacactggccttcttaccctttgcttctctt

SEQ ID NO: 6951 - DNA, 1149 bp, Zea mays
  Zm_smallRNAprecursor_2440
catgctgctgggtatttgaaacaacacttgtttgaaaacctcctaaaacatccagcattcattggtgatactaagtctgcaatgagtacgatgttttctccaagacacttaaaaatagtgcagttcatttagtagtgaattgataaatcttacaaatggtaaatttgcaggtcagtcctataaaaaaactgacgcagatttcttggatactgaaggcaatattcatgttggggttgggtcgactgcatcaacagcagttttgattggcaaccatctgtatgtggccaatgttggtgattcaagggctgtactatcaaaggcaggcaaaggttatatttttctaaaattctgtcacttcactagtcagttgatattgtacaataaacttgcatgtctgtgacactagccataaaaaaattataacattgtactaactgctaagtatcacttgataccttacacgctaagaccatttccagcaacttacctatactcatacccatattcaaactacactctataaacattgcaatctataatataaaacgacgcaaaacaatgttttttgtgaccatattggtgcaatgtacagtagttcacccatatggtcacaaaaacacattttacactgtagattgtattgtttgtagagtgtagtttgaatatgggtatgggtaagctgctggagatggtctaatcaatcaattacgagcatatgttttgatcagttacccttacacatcattatgattcctgccctgatttcattgtaaaaatatgtcctataagagggatgtccaaacagtgaaaaagacatttgactgcatattttatcactgacctgtattatgacacagatgaagtgtactatagaatccagattaacctgagcatttggaaaatgtcaaaaacatccccacatggtactggggttctcaaccacctcgtgactccaaactaaccggcgtgacaacagggtcctgtactcctatgtgccctgacaagaagaagggggggggggtgtttacaagacataagccgacccaaatgaagaaatgaaactgtgaaaccacacattcgctccccaccccgctacatgctggctagataggtgaacagcattgaaaactccaatctcattgttgaagg

SEQ ID NO: 6952 - DNA, 1096 bp, Zea mays
  Zm_smallRNAprecursor_2441
ctgctgttgacaggaagcgactcgacaaaaaaaaatcgctggcgcccctgacacgcttgcatggctgtgaggagagaaagaaaaaaaatctgcagcatggcgcccaaacggactgtgcagaagtgaccgaacagagagaaaaaaaatttctgcatgcgcagcagctgttgaccggacaccacaaaaaaaaatctgtgcgcgcattgacgctaaagcacagcggatactgcatggcgccctgacatttgcatgcattgctgagaccagacagccccaaaaaaaagttactggcgcgcggggtgacaaagctgaggagaagcgaccggacggaacaaaaaaaatggcgcacactgacgctgctgagcggcagcaagcagacaaaaaaaagtaatctgcgcgcccagcagaggaagtgaccggtcaataagaaaaagaaaaaaaatgatgtgcgccctgcagagtggattggactggacaaaagaaaaaaagtgttgcgcgccctgcaggatgcgaccggattaaaaaatttgcacgtcaggctgccagcagaagtggaagcgaccggtcaatagagaaaaagatgctgcgcgactgaaaaaaggtgcagctgacagacctgcgcggacatgcctgcgcggacagacctgcgcggacagaccggtcaaagaccggttcaaccggtccactatgccggttcaaccggttttaaccaggatggtcctggtaaaaactggttaaaagcagctgagctgaagttcagctccgaagttcagctggcctcctccagctgaactagaaagttcagctggtcaagccagttgagccccaaaaaaatcttagcactaaaatgcattcaaattttaacattttcaccaagtttttgaaagatcatcacatagctttaaaactatcaatcaaaaatagtgaatcaaataatttttgtgactgttttcaagttaagttacgagaatccaagatatttaattcactcctaagaaaacaaaacctaatctcatcgaggggttttgtgaagatatcggctagttgattttcggtgctcacatgaaacaattcgatatctcctttggcttcgtgg

SEQ ID NO: 6953 - DNA, 1160 bp, Zea mays
  Zm_smallRNAprecursor_2442
acttggtccttaccactctctagtagatactgcaggaattcagggcactttctcttgtaatgacctgtcttcttgcaatagaggcaggtatcagggggaactgagaaactgcctccttgtcttggctgattattattgctcgacgaagcctggttattctgtttaccttgcttcttgaactttttctttgagttcttgttctgtctggggatattgcctttgatgaggttgacagagtctccagtctgctttaacctctcttcctcctggacacactgtgccaagagttgatctatattccacttatcagtgacactagtgttgtattgtatgtgaaaagtctcaaactccttgggcagagacttcattatcataaatactacaaattcctcgtgtaaaggagacctgaggtacttgtttatcttagctacgatggatatcattttctgaatgaatggtctgacaccatttccatcgtattttgcattgacaaattctgtcattagagagcaagcataagccttagaagacccttggtgatgagaggctaccctctcaaggtattctttggcagtctcgcactctggtatggaactcttaagaggctccttgatgctcctcttaagaataatcatacatttgtcatttgatctctcccacttgaccttgtcgatgctgtattgcatccacctgtggtcatagttgggagtgcccactgtgggctcaactggtttatcaaacctcagtgcgtaatctatctcacccactgtggttatcatgtctatatcctcccgccaagaatggtaattactaccatctagcggtttcatctgagcaatctggctaatcagcatggcggtatgagcacctttgcaaaattaaaatagaaaatatttaggacatctgaaataaatactgaatactgaatcatagaacatgcatgaattaaatattcaacgttggtcaaataataatcatgccatatctatgaaaatttctgatcacaaaatttctaaaccatcgttggatgatctagaaaacataaacttgtattaaattgtggtaacaatatccaacgttggttaaaatattcaatcaccacaaaattttctgaattctatgcaatttaagcaataatcaatccacgttggtttcataat

SEQ ID NO: 6954 - DNA, 1039 bp, Zea mays
  Zm_smallRNAprecursor_2443
ctaccaccaccaaaatagtatcatatccttctgaccggggtaacttctcaataaaatccatagttaagtcttgccaagctcctgctggcacaggcaatgggtgaagtaacccagaaggatactgcttgggacttttggcttgctgacaaaccgcacattgtttcacaaataattccacatcagttttcaggcctgaccaacagaacatctttttaatttcatggttcacttgtagttgaacaaatgacaatgcaacaactaacagggggacaatgcaacaactattagtgggagccagtttctcatcctaaattctgctgagcactgttagagaaaaacgataagtgtcatggtaatctgtttaaagccaattacacagtaaaaaatgacagtaaagaaatatggatagtgaaacaagaaaatgttagtgttatacaccctccttctaattataagtcgttttagcttttttagatacataaaggacttatagtttggactggaacatgagagtgcatagcaaaaaatatcaatattgtgcaacacatgtagatacaacattaggaatcttatataaactgaccaacagattgtaagatgcaagaccagagtgatccatggacaaatgaaggagaggcaaaatatggaattaatatgagttagtttcatttaatcactctttgaaggactaaagactaaaatagtttagtccctgttttattgcaacctatttgccaatttagctactaaataaaactaaaatgaatgaattaatttttagtccctaaaaccaaacagaacgtgaaatactgctattaagatctccatcatgatcgtgacaagggccggagctatggttgaaaagagcttgaactttgccgtggtgcagtttgttttttaactttttcgtgcagaatactcgagtgaggccatgggggtggggtgggctctgagaaaggcagaactccagagggcaaaagtggcatttcgcatggggatgtgtggtccgtatccttgaccgtggcttcagtgtttgtcg

SEQ ID NO: 6955 - DNA, 1037 bp, Zea mays
  Zm_smallRNAprecursor_2444
agggccggagctatggttgaaaagagcttgaactttgccgtggtgcagtttgttttttaactttttcgtgcagaatactcgagtgaggccatgggggtggggtgggctctgagaaaggcagaactccagagggcaaaagtggcatttcgcatggggatgtgtggtccgtatccttgaccgtggcttcagtgtttgtcgtctcgtgcactttcccctctctccgggggcggcggacaccgcattgatggaccccaccctgccgtgctgacctgatcaccccgtcgactgcatgacctcttttgccaccgacgtttgccactcaacacatctaacaattccaacatccgttccacaattccacgccatcatcgaaggaggttcccgaagctgcagagctaagccctcgcccaacgacaaaggtgtctctccgacgaggcattccggtctggagctgagcaagtcgcctcctccgccatcggctccatggtggactgatccttcggtgtcggcgatcggagaccatagttggctgatcctcgaccgcatcgtccaccgcagtcggaagtggtgcggggacgctacgacctcggcgctcgcccacgagtgcgtcggccggccgatccgtgcctccctccggattgcggaccccccgcggtgtcccgtctctacgtccactggaccagtattgcagccattgactgcatgaaggagcctgttgccatcgccgcccaccacaactccattctattccgggtgtctgtcctcttcgacgatccctgtttctagagccaaacggtctactttcctgatgactactttgtctactcgtgctccttgtcgctgccgtcccttactaggcttcccacttgcttcacccgggttcccctttgcttcggcggtggacgcaccgaccccgagttcgataagtggttacaaccgcaccggcgccagcaacagcggaccatgattgaagaagacatggaaatcctctgccatggagacaagggtgaattcacggtggcaaatctcacataccg

SEQ ID NO: 6956 - DNA, 1106 bp, Zea mays
  Zm_smallRNAprecursor_2445
cgtttgccactcaacacatctaacaattccaacatccgttccacaattccacgccatcatcgaaggaggttcccgaagctgcagagctaagccctcgcccaacgacaaaggtgtctctccgacgaggcattccggtctggagctgagcaagtcgcctcctccgccatcggctccatggtggactgatccttcggtgtcggcgatcggagaccatagttggctgatcctcgaccgcatcgtccaccgcagtcggaagtggtgcggggacgctacgacctcggcgctcgcccacgagtgcgtcggccggccgatccgtgcctccctccggattgcggaccccccgcggtgtcccgtctctacgtccactggaccagtattgcagccattgactgcatgaaggagcctgttgccatcgccgcccaccacaactccattctattccgggtgtctgtcctcttcgacgatccctgtttctagagccaaacggtctactttcctgatgactactttgtctactcgtgctccttgtcgctgccgtcccttactaggcttcccacttgcttcacccgggttcccctttgcttcggcggtggacgcaccgaccccgagttcgataagtggttacaaccgcaccggcgccagcaacagcggaccatgattgaagaagacatggaaatcctctgccatggagacaagggtgaattcacggtggcaaatctcacataccgtttcaaccaagaggtccaactctgcttgttgcaccatcccccttctgcatctgatgctgaaatgaaatggagtgttgagaagctgcagatccctcctaacatgaagatcaacctctactcgtttaagactgatgccgtcgtcatcatcggcgagaggttcttgtgctaggttgactactaccatgatatgctgctgattgatgtcctcactgacagcaacaacaggctccgtaatataccacttccatctaaggctttaaagactggccgtgtgtacaaggacggtgaaccagatccgtttcgacgtctcagtgtctgtgatggtggcatcattaagctcgtctgcattattactaaagaacacccttcttttttatc

SEQ ID NO: 6957 - DNA, 1187 bp, Zea mays
  Zm_smallRNAprecursor_2446
cgtttgccactcaacacatctaacaattccaacatccgttccacaattccacgccatcatcgaaggaggttcccgaagctgcagagctaagccctcgcccaacgacaaaggtgtctctccgacgaggcattccggtctggagctgagcaagtcgcctcctccgccatcggctccatggtggactgatccttcggtgtcggcgatcggagaccatagttggctgatcctcgaccgcatcgtccaccgcagtcggaagtggtgcggggacgctacgacctcggcgctcgcccacgagtgcgtcggccggccgatccgtgcctccctccggattgcggaccccccgcggtgtcccgtctctacgtccactggaccagtattgcagccattgactgcatgaaggagcctgttgccatcgccgcccaccacaactccattctattccgggtgtctgtcctcttcgacgatccctgtttctagagccaaacggtctactttcctgatgactactttgtctactcgtgctccttgtcgctgccgtcccttactaggcttcccacttgcttcacccgggttcccctttgcttcggcggtggacgcaccgaccccgagttcgataagtggttacaaccgcaccggcgccagcaacagcggaccatgattgaagaagacatggaaatcctctgccatggagacaagggtgaattcacggtggcaaatctcacataccgtttcaaccaagaggtccaactctgcttgttgcaccatcccccttctgcatctgatgctgaaatgaaatggagtgttgagaagctgcagatccctcctaacatgaagatcaacctctactcgtttaagactgatgccgtcgtcatcatcggcgagaggttcttgtgctaggttgactactaccatgatatgctgctgattgatgtcctcactgacagcaacaacaggctccgtaatataccacttccatctaaggctttaaagactggccgtgtgtacaaggacggtgaaccagatccgtttcgacgtctcagtgtctgtgatggtggcatcattaagctcgtctgcattattactaaagaacacccttcttttttatcccttcaccatagcaacatggactttggttgatatccaccaaggtagatgggagaaggatgtcaacttgaccatgggagcca

SEQ ID NO: 6958 - DNA, 1190 bp, Zea mays
  Zm_smallRNAprecursor_2447
cgtttgccactcaacacatctaacaattccaacatccgttccacaattccacgccatcatcgaaggaggttcccgaagctgcagagctaagccctcgcccaacgacaaaggtgtctctccgacgaggcattccggtctggagctgagcaagtcgcctcctccgccatcggctccatggtggactgatccttcggtgtcggcgatcggagaccatagttggctgatcctcgaccgcatcgtccaccgcagtcggaagtggtgcggggacgctacgacctcggcgctcgcccacgagtgcgtcggccggccgatccgtgcctccctccggattgcggaccccccgcggtgtcccgtctctacgtccactggaccagtattgcagccattgactgcatgaaggagcctgttgccatcgccgcccaccacaactccattctattccgggtgtctgtcctcttcgacgatccctgtttctagagccaaacggtctactttcctgatgactactttgtctactcgtgctccttgtcgctgccgtcccttactaggcttcccacttgcttcacccgggttcccctttgcttcggcggtggacgcaccgaccccgagttcgataagtggttacaaccgcaccggcgccagcaacagcggaccatgattgaagaagacatggaaatcctctgccatggagacaagggtgaattcacggtggcaaatctcacataccgtttcaaccaagaggtccaactctgcttgttgcaccatcccccttctgcatctgatgctgaaatgaaatggagtgttgagaagctgcagatccctcctaacatgaagatcaacctctactcgtttaagactgatgccgtcgtcatcatcggcgagaggttcttgtgctaggttgactactaccatgatatgctgctgattgatgtcctcactgacagcaacaacaggctccgtaatataccacttccatctaaggctttaaagactggccgtgtgtacaaggacggtgaaccagatccgtttcgacgtctcagtgtctgtgatggtggcatcattaagctcgtctgcattattactaaagaacacccttcttttttatcccttcaccatagcaacatggactttggttgatatccaccaaggtagatgggagaaggatgtcaacttgaccatgggagccagcg

SEQ ID NO: 6959 - DNA, 1093 bp, Zea mays
  Zm_smallRNAprecursor_2448
ctcggcgctcgcccacgagtgcgtcggccggccgatccgtgcctccctccggattgcggaccccccgcggtgtcccgtctctacgtccactggaccagtattgcagccattgactgcatgaaggagcctgttgccatcgccgcccaccacaactccattctattccgggtgtctgtcctcttcgacgatccctgtttctagagccaaacggtctactttcctgatgactactttgtctactcgtgctccttgtcgctgccgtcccttactaggcttcccacttgcttcacccgggttcccctttgcttcggcggtggacgcaccgaccccgagttcgataagtggttacaaccgcaccggcgccagcaacagcggaccatgattgaagaagacatggaaatcctctgccatggagacaagggtgaattcacggtggcaaatctcacataccgtttcaaccaagaggtccaactctgcttgttgcaccatcccccttctgcatctgatgctgaaatgaaatggagtgttgagaagctgcagatccctcctaacatgaagatcaacctctactcgtttaagactgatgccgtcgtcatcatcggcgagaggttcttgtgctaggttgactactaccatgatatgctgctgattgatgtcctcactgacagcaacaacaggctccgtaatataccacttccatctaaggctttaaagactggccgtgtgtacaaggacggtgaaccagatccgtttcgacgtctcagtgtctgtgatggtggcatcattaagctcgtctgcattattactaaagaacacccttcttttttatcccttcaccatagcaacatggactttggttgatatccaccaaggtagatgggagaaggatgtcaacttgaccatgggagccagcgagttattcaatctttacgacgacgctgccaagagttgcctcccacgagtgaggccaagttttcctgtggtgagcttggttgatccagatgtcatttgcttcctcctcgaggacaagttccgcgatcctttctggatggttcaagtcaacatgcgaaataagttgctactgttaagttcc

SEQ ID NO: 6960 - DNA, 1147 bp, Zea mays
  Zm_smallRNAprecursor_2449
aagattgaagaactcgctggctcccatggtcaagttgacatccttctcccatctaccttggtagatatcaaccaaagtccatgttgctatggtgaagggataaggagaagggtgctttttagtaataatgcagactagcttaatgataccaccatcacagacactgagacgccgaaacggatcaggtttaccgtccttgtacacacgatcagtcttcaaagccttagatgtgagtggtatataacggagcctgctgttgctgttgctgtcagtgaggacatcaatgagcaacataccatggtagtagtcaacccagcacaagcacctctcgccgatggtgatgacgacatcagtcttaaacgagtagaggttgatcttcatgtcggcagggatctgtagcttctcaacactccatttcatttcagcatcagaggcaaaagtggatgatgtagcaagcagagtttgatctcctggttgaaacgatatgtgagatctgccaccgtgaattcacccttgtctccatggcagaggatgcccatgtcttcttcaatcatggtccgttgttgctggcgccggtgcggttgtaaccacttatccaactcagggtcggtgcgtccaccgccgaagcaagggggaacccgggtgaagcaagggggaagcctagtaagggacgacggcgacgaggagcacgagtagacaaagtagtcatcaggaaagtagacaatttggcttcagaaagtgggatcgtcgaaggggacagacacccggaatagaatggagtcgtggtggtcaatggctggaatgctggtccagtggacgtagagacgggacaccgcgggggggtccgcgatccggagggaggcacggatcggccagccgacgcactcgtgggcgagcaccgaggtcgtagcgtccccacactgcttccgactgcggtggacgatgcggtcgaggatcagccagctatggtctccggtcgccggcaccgaaggattagtccaccatggagcgggcggcggcggaggcgacttgctcagctccagaccggaatctctcgtcggagagacacctttgccgttggacgagggcttagccctgtggcttcggggaacttcttcgatgatgacggtggaattgtggaacgggt

SEQ ID NO: 6961 - DNA, 1096 bp, Zea mays
  Zm_smallRNAprecursor_2450
tggtgaagggataaggagaagggtgctttttagtaataatgcagactagcttaatgataccaccatcacagacactgagacgccgaaacggatcaggtttaccgtccttgtacacacgatcagtcttcaaagccttagatgtgagtggtatataacggagcctgctgttgctgttgctgtcagtgaggacatcaatgagcaacataccatggtagtagtcaacccagcacaagcacctctcgccgatggtgatgacgacatcagtcttaaacgagtagaggttgatcttcatgtcggcagggatctgtagcttctcaacactccatttcatttcagcatcagaggcaaaagtggatgatgtagcaagcagagtttgatctcctggttgaaacgatatgtgagatctgccaccgtgaattcacccttgtctccatggcagaggatgcccatgtcttcttcaatcatggtccgttgttgctggcgccggtgcggttgtaaccacttatccaactcagggtcggtgcgtccaccgccgaagcaagggggaacccgggtgaagcaagggggaagcctagtaagggacgacggcgacgaggagcacgagtagacaaagtagtcatcaggaaagtagacaatttggcttcagaaagtgggatcgtcgaaggggacagacacccggaatagaatggagtcgtggtggtcaatggctggaatgctggtccagtggacgtagagacgggacaccgcgggggggtccgcgatccggagggaggcacggatcggccagccgacgcactcgtgggcgagcaccgaggtcgtagcgtccccacactgcttccgactgcggtggacgatgcggtcgaggatcagccagctatggtctccggtcgccggcaccgaaggattagtccaccatggagcgggcggcggcggaggcgacttgctcagctccagaccggaatctctcgtcggagagacacctttgccgttggacgagggcttagccctgtggcttcggggaacttcttcgatgatgacggtggaattgtggaacgggtgttgggattgttagatgtgttgagtgacaaacgccggt

SEQ ID NO: 6962 - DNA, 1187 bp, Zea mays
  Zm_smallRNAprecursor_2451
agacactgagacgccgaaacggatcaggtttaccgtccttgtacacacgatcagtcttcaaagccttagatgtgagtggtatataacggagcctgctgttgctgttgctgtcagtgaggacatcaatgagcaacataccatggtagtagtcaacccagcacaagcacctctcgccgatggtgatgacgacatcagtcttaaacgagtagaggttgatcttcatgtcggcagggatctgtagcttctcaacactccatttcatttcagcatcagaggcaaaagtggatgatgtagcaagcagagtttgatctcctggttgaaacgatatgtgagatctgccaccgtgaattcacccttgtctccatggcagaggatgcccatgtcttcttcaatcatggtccgttgttgctggcgccggtgcggttgtaaccacttatccaactcagggtcggtgcgtccaccgccgaagcaagggggaacccgggtgaagcaagggggaagcctagtaagggacgacggcgacgaggagcacgagtagacaaagtagtcatcaggaaagtagacaatttggcttcagaaagtgggatcgtcgaaggggacagacacccggaatagaatggagtcgtggtggtcaatggctggaatgctggtccagtggacgtagagacgggacaccgcgggggggtccgcgatccggagggaggcacggatcggccagccgacgcactcgtgggcgagcaccgaggtcgtagcgtccccacactgcttccgactgcggtggacgatgcggtcgaggatcagccagctatggtctccggtcgccggcaccgaaggattagtccaccatggagcgggcggcggcggaggcgacttgctcagctccagaccggaatctctcgtcggagagacacctttgccgttggacgagggcttagccctgtggcttcggggaacttcttcgatgatgacggtggaattgtggaacgggtgttgggattgttagatgtgttgagtgacaaacgccggtggcaaaagggggccgtgcagtcgacgaggtgatcggggcagcacaacagggtgaggtccgtcaatgcggtgcccgccgcccccggagagaggggaaagtgtacgagacgacaaacgttgaagccatggtcaaggatacggaccacacaaccccatgcgaa

SEQ ID NO: 6963 - DNA, 1084 bp, Zea mays
  Zm_smallRNAprecursor_2452
agtttgatctcctggttgaaacgatatgtgagatctgccaccgtgaattcacccttgtctccatggcagaggatgcccatgtcttcttcaatcatggtccgttgttgctggcgccggtgcggttgtaaccacttatccaactcagggtcggtgcgtccaccgccgaagcaagggggaacccgggtgaagcaagggggaagcctagtaagggacgacggcgacgaggagcacgagtagacaaagtagtcatcaggaaagtagacaatttggcttcagaaagtgggatcgtcgaaggggacagacacccggaatagaatggagtcgtggtggtcaatggctggaatgctggtccagtggacgtagagacgggacaccgcgggggggtccgcgatccggagggaggcacggatcggccagccgacgcactcgtgggcgagcaccgaggtcgtagcgtccccacactgcttccgactgcggtggacgatgcggtcgaggatcagccagctatggtctccggtcgccggcaccgaaggattagtccaccatggagcgggcggcggcggaggcgacttgctcagctccagaccggaatctctcgtcggagagacacctttgccgttggacgagggcttagccctgtggcttcggggaacttcttcgatgatgacggtggaattgtggaacgggtgttgggattgttagatgtgttgagtgacaaacgccggtggcaaaagggggccgtgcagtcgacgaggtgatcggggcagcacaacagggtgaggtccgtcaatgcggtgcccgccgcccccggagagaggggaaagtgtacgagacgacaaacgttgaagccatggtcaaggatacggaccacacaaccccatgcgaaatgtcacttttgccctctggagttctgcctttctcagagcccaccccaccctcacggctccactcgagtattctgcacgaaaaagttaaaaatcaaactgaaccacgacaaagttcaagctcttctcaaccacagctcttacctttgtcacgatcatgatggagatcttaatagcagtattccacgttccgtttggtt

SEQ ID NO: 6964 - DNA, 1106 bp, Zea mays
  Zm_smallRNAprecursor_2453
gcaggccgcagagctgccgctgccgccgccgccggattgaggccttgcgcactggttggcggttggccgcgtggggactggggagcgccggagcggggaactggggaagtggggagtggggagcgccgccggtctgtcgaagtcgaatggattagggttggaagttggaactgaaggagggccgcgtcgttgagcgtctggtcttggcgtcttgccgactaggcgactaccgagttggcgcagagaagttctcagtcgcacggagaagtgggctatgggctatggcatatgggccgattacggtagaatggtgggagtgggacgcatgacgctgatatttcggttcggtgttttcggttcggtgtaagcctaaaaccgaggccgacaccgagaaccgaagttctcaggaattaaaaccgaacctgacaccgaaccccgaaaaatcgaaacttcggtgcggttttcaaattttcggttcggtaattcggtttcggcttaagggattgttcgtttacgtcggattgcacccggaatcgtttcagctaatcaaagtttatataaattagagaagcaatccggttaggaatcgttccgacccactaatccggtacaaacgaacaaggcctaaaagtgcccaggcctacccacgattcacccggacccgactccccgagtccgaccgcgcggcgacccttctagacctcgcttcccccaaaaggcagtaccgcagtccgcagtagcagcagcagagtccagaccgttctccgcccctctccccgccacgctcttccggagagcatcgccggccgccatgggctcgccgctccgcaccgtgcacctccgtcgctcgtcgccctcgtcgccagcggataccgtggcgatcacggtggatggcggctcaggggtggacctggccagggtggggctcgcgctggggctggaccccgcctccgtccggcccaacggctacttcctcagccgcggccctggccacgtctgctccgccgtcacgtggcgcgcgctcctcgccttcttcgcgaagcgcgggctgcccaccggcgccgacgccgccgcgcccgttgtcgtccacggcaggcccgccgcgc

SEQ ID NO: 6965 - DNA, 1090 bp, Zea mays
  Zm_smallRNAprecursor_2454
aaaatgagccaatagttcagaaggaggcactatgcagaaactacatttctgaaggtgactaaaaggtgagcgtagagtgtaattactagtagtttagccaccattacccaaatgctttcgagcttgtattaagatttcctaagctgagcatcatcactgatctgcaggccaccctcgcttcgctgccaagatcaacagcaaccatgtggcggcaacatccagcattgcacatgggctaaagattgagctttgtgcctcgtctagggatcagctgaggttatcagtctttcctttttttcatccaggtgaggcatcaagctactactgcctcgattggctggacccgaagcccacatgtaggataccagaatgggccgacccaggacgcagtatgttggccagtcccaccggttagtgccatctcggttgctcacatgcgtagaagccagcttaaaaatttagctttggtaactcacagcacgaccttacttgaacaggatctgttctataggatcgtactgttgcatctttgattaataagaaggcaagtacttaaacctggttgatgagaatttgacctgtgggccagagcgtgattaacggccaggactctttgccttggtgcattgtctggagctgcagatgatcgttcttggccaggcttaatgtctggctagggtggcctacaggctgtttgacaggtctctcaatttttttgctctgctgcaggtgatcatttgactcaacgccattaatgattgactttttgatctgtgctgcgtttgaagaaacctactccagctagcttttcctcagcatttgcactcaaattaagagggccagatatcttgctcgcttttgccatcagtaataaagttttccttaggtgtgatgcatttgaaggggatttaaggaggttatttctgtcaccagctgtttttgcttagtgttgctctcaaactaaaaggggcatatctcttgcctcttttggcattagtagaaccatacttttggcatagtttttctgcttcaagtcgcttctgactgtagacatggtctgcacaaagttcagtttttttatttccctttt

SEQ ID NO: 6966 - DNA, 1097 bp, Zea mays
  Zm_smallRNAprecursor_2455
acactgtccgtcgctctcctcgtgtacaaaacaagagaaaggaattagataaaaatgaattgaagaaaaggaggaagaggttaaggttgaaagtccccttgtctcctattcaagatgaagaaagtgatgatgaacaagacccagagtttgctcctgccggtgatggttctggcgacgacaatgttgttattgttggtggcgatgagaataagggtaaaactaagacgcgagctatacgatgctcacctgggaagttcataaagcttgtgaatgctctatccgatgaattgaaaggtgaagtagttgccaaggggtttggcggcctgctgagattcaagctgcacttatcgtccagaaaattgctcagctggctgatgcggaagcttaacccggagacgatgaaattagagattggtggtggaaaagagattccaatcactgagcacagtgtttggtgtgttttgcagttaccaaacgttggccgtgacccgccccccatgtctgatgcagatgctcgtgccttgcgggacgagctaggagagcaaatttgtttcaactcttatagacgcatatctagtatcaatctatctattatcactgatcgactgcagaagaggattctaactggggagctgggcctaagagcctttttcatggctgcatttcagtgtctgctattctccaatactgacactcgcatcaggattaatgatgtaaagtatactcaggacatccagaacatggccaacaagaactggtgcaaagcggtagttgacaggctcagcatagttgctcgtctttataaaaaggattttgcggagaaaggcatcaacgcacccatcagtggatgtgggatcttcgtagctgtaagctcaacatacacattcaatttttgtccttgcaacttactcttccaattacacaagtagtaattgttttatgtttactgttacaactgtcatatgttacaagtagcaatttgatttactttttttattttttttatgatagcttagttcacatattcacatgtattttgtaatttatgttgtacacaaagtagcaataattttagtattttctattgcaactggctt

SEQ ID NO: 6967 - DNA, 1074 bp, Zea mays
  Zm_smallRNAprecursor_2456
gtagctatcagaagagctgaagaagatattgttttatggaagttcgttgggccaaacatcttgctcttcttacagctcccattctaggtgtcttgtaggggtctggtagagggagtttgtggtaacattaaagatgaatatgttatttggtgttgagctggtgcgtcggggctgcgtaggtgatgggctttttaggtgttctatcatggatgctttcatgtattctaagttgcggccaccatcatgtgcctttcctttgtgtatgtacttgttctatttttggatccttctttctttcttaatttaatgatacgcggctctcctatgtgtttgagacaaaatttactaaatcgaatgatacactatctgtcaccgaagtgataatgaacattctgatcatctagtctagaaactgaaatacgattctttcgcaatgaagagacatagagtacgtctttcaaaactaaatggaaaccataatctattgctatgactagatctccgacgatctctacttctgcttcctttttctttggcctttaggagcctttaggtggcaaataaaaaggaagcagaagtggaggtcctcggagatctagtaatagcattaactgatgattttcatttagttttgcgagacatactctatgagacatactctatgctcttccttgcgaaggaatttttttcagtttcaagactagatgatcaggatgttcattgtcacttcagtgacagataatgtatcattcgatttagtaataaagatgttggtctcgtcgtccgatgagatttgttttatttactttcacacagtaatgttgttaacgtcttagacaacagaaaacgttccagacaacaatggcaagaaaacaaagagaagtgatagagagacctcgtcgaaattaagggagagcttgtcatcttgaatcacatgggctacagattgcaacctagtaaataattttcgttctgaagcaggggagcatattgtagtcaataagtgcggtgatacttaattggtcattatgtgtaaccttgtcgaaggatggaatccagaaaaaaagaagtgta

SEQ ID NO: 6968 - DNA, 1100 bp, Zea mays
  Zm_smallRNAprecursor_2457
tgtgacatttatatttatacattttgtcattatatgtattgttttttttggcgcgtatatgagacgtacccggctttatcccttaaatccgggtgtaacatttagttagataggttgtctctagcttggcattagtctcagtatttatagtcacgtgatgagctaatatggtaattgttttttttcttttttcccttcttccaattagatgtcaaaccctccaactgtgttctccaaccccttggagaaatggatatacaaaaaatgcataaggtcagtggtgtccattgagttccgtaaggaacggtggagaagagttggtccaaaggcgacaacctgttgaacgaattcgtgcgaggactgaggctagccgcagtgaatgactggaaccagtacgctatacggatagagttaacgcgagtgttgcagccgtgtactgggaccggtacgctaaggcaagcaagcaaaccggaaaccttaaatgtagagttgcagcaacgtctactgcatacgtctgctccgtgcaccaggagagaggcggggccagaggcagcaaaggttgtgggacccgaggcggggcaccaggagagagaaataatagaatatatggtatagagtaaacatgagtgcggaggattgtgatatagagtaaagaattttgctgaccaggacaaaatattctttttagggtagaaatttagagtagtatgagtgcggatagcctcagaagaacatcggcaactgactattgactgtacatacagctttccaccggctctgtagttggagaagacgaggacaacctatacattttgacatgtgctcatgtcctgggtcccgtgttcaattctcgttatccaattcatgcggataccgtcaatcatatttatgaggtctatattgtttgcgaccattgtgaagagatgtttcgtaggcactccaagattaagcacactggccattatccatgtggtgtcattgctataccatcagtagcggaggacaactaaaaaaataaggtatggctaagcaaaaggtaaaaatacaagcaaatgatactcaaatggaagatcaaaatcagaacaaagatagagattgaa

SEQ ID NO: 6969 - DNA, 1063 bp, Zea mays
  Zm_smallRNAprecursor_2458
ttcagcgccgtagcgcctggtatgagcctcgtggagaagcaatggctagtccacagggctcatacttcagcgctgcagcgcttggtactcggacctcggctcgaggcattttctctaccccttcttaccctgaaaaagcagggtcaccttgtgtccttaaacctataaccatctttcggctaacctagcctcctctgtccctccgtaccaacaaggggtagtacaggaatattgacctgttgtccatcgactacgcctttcggcctgatcttaggccctgactcaccctccgtggacgaaccttgcggaggaaaccttgggttttcggggcattggattctcaccaatgttttcgttactcaagccgacattctcgcttccgcttcgtcgacccccccgctttcgcgtttgcttccctctaaggcggaacgctcccctaccgatgcattttgacatcccacagcttcggcagatcgcttagccccgttcatcttcagtgcaagggcgctcgatcagtgagctattacgcactctttaaagggtggctgcttctaggcaaacctcctggctgtctttgcacccccacctcctttatcactgagcggtcatttaggggccttagctggtgatccgggctgtttccctctcgacgatgaagcttatcccccatcgtctcactggccgaccttgacccctgttatttttgggtcatatctagtattcagagtttgcctcgattttggtaccgctcgcgcagcccgcaccgaaacagtgctttacccctagatgtgcttcgacagaagacgaagaggattgtaaaataacaaaagacaccggaccaggcttcagacaatagatcacatcaataaatatcaagctgaaatagttaaatagctggatcaaaaggtaagattaaagaatatcaagccaggacacttggtgcttcgaagagtggccaacccggatacagtggggaagcttcagcttaagtgggaaggtcctttcttggtggtgtcttcgtcacgacctggatcatactggttgaaagacatggacggtaatg

SEQ ID NO: 6970 - DNA, 1097 bp, Zea mays
  Zm_smallRNAprecursor_2459
gcactagcgtccttgcgcgcacagttttttttggagttcggttaacagctggtgtacatgcagaatcttttttctgtccggtcacttctttgctgggcgcgcacgtttttttttttggacgctcctgctcagcccgcgcgccatgcatgcgtgtcaggggcgccaatttttctttcctgtccagtcgcttccagcagctgcgcgcacattttttttacagccccacactactgccttgtgaccagtcgctgtgtcacccgcgcagcaaggaaacattttttttgtcacttccgtgcagcagtgtgagggatacagggcgcgcagaacttttcttttgtgcggttctttttcttttcctgtccggtctcatctgcgcagacacttggttttgttttttttttttgcatggaatctctgcagtacactttttcagaatcctgcgtcagaaatttgaatttttttgcatcttccctctgctatttctggttctctgaccacactggtcagaaccagctgaactggcccatgggggcggttgaactggtcctgaggaccagctcaactgcctatatatacttgactctccccttctcttctcccacttcattcactctcgccttggtcgcttcacaacctttagagcctctccttcacacacttcaaccggttcacagtttcaccaccttttcaatcatggggcgtcatcgcaacccctctgtggttgagtttagcagcgactccgacgagattcaggaggaatctcccgtcccctctcctccgcctcgtcgctccctctctaagagaggacgtggctctggtcggaaggatgccgagggctcttctatgccttcgcagccgactcgcgggagacgccaaaaggttggcgcctctcgtcctcgtcgtagcacgtcttcctctgggtatgctccctgccaggaggaggatggggcgttcgacgacttcgtcgaccttccggcgcctgatgctctctacgtcaccggactgcacatgcatccggcgaacgtcagccgcggtccgcatgaatctcccgtcgacttcactctgaagggaatagacacccttcagcgtctgaggtt

SEQ ID NO: 6971 - DNA, 1149 bp, Zea mays
  Zm_smallRNAprecursor_2460
tgtgaccagtcgctgtgtcacccgcgcagcaaggaaacattttttttgtcacttccgtgcagcagtgtgagggatacagggcgcgcagaacttttcttttgtgcggttctttttcttttcctgtccggtctcatctgcgcagacacttggttttgttttttttttttgcatggaatctctgcagtacactttttcagaatcctgcgtcagaaatttgaatttttttgcatcttccctctgctatttctggttctctgaccacactggtcagaaccagctgaactggcccatgggggcggttgaactggtcctgaggaccagctcaactgcctatatatacttgactctccccttctcttctcccacttcattcactctcgccttggtcgcttcacaacctttagagcctctccttcacacacttcaaccggttcacagtttcaccaccttttcaatcatggggcgtcatcgcaacccctctgtggttgagtttagcagcgactccgacgagattcaggaggaatctcccgtcccctctcctccgcctcgtcgctccctctctaagagaggacgtggctctggtcggaaggatgccgagggctcttctatgccttcgcagccgactcgcgggagacgccaaaaggttggcgcctctcgtcctcgtcgtagcacgtcttcctctgggtatgctccctgccaggaggaggatggggcgttcgacgacttcgtcgaccttccggcgcctgatgctctctacgtcaccggactgcacatgcatccggcgaacgtcagccgcggtccgcatgaatctcccgtcgacttcactctgaagggaatagacacccttcagcgtctgaggtttaccaaccctactctcactccttgtcatcctggtgtccaggaccctcggttctggaatcttttccaggctgacttctacaattctgtcattctttccaagaaacacccagtcgtccgacatagatttattgactgggagggttgtgagaatatgggagatgctgacatgtcgtcagctctcgtaaacttagagagaaaggggttacgaaacattatgaccatggaatacccctggaacgatgaggtggtagctcagttctatgccaccctctggataaagaaagtaga

SEQ ID NO: 6972 - DNA, 1190 bp, Zea mays
  Zm_smallRNAprecursor_2461
agctctcgtaaacttagagagaaaggggttacgaaacattatgaccatggaatacccctggaacgatgaggtggtagctcagttctatgccaccctctggataaagaaagtagatgaggaagccgatgggtatgattacccagtcatgtatttcttcatccagggtaactggcacaaagtcaattatcgtcgttttgcccatattctgggcttctctgatgcagacattcagggcagcaacatgcgagtgcatggcattcggctgcccatgcgggaagagacggaattcattcatgtctctactgagcgggagttctggacaaccgctaacatgcataggtactacaggtaccttaattctttgtcccggatgaccgttctcccgaagggcggtaatcaaatgaacgtccttggggagagtcgagtcttcctcctcctccttgctccaaacagtctcgcccgcatcaatgtgtttgacatgatctgggaagagatcgtccgtgcttcctggtctcctcacagagggtgtcttcatgcaccctttatcatgaagatgatcgaagtggtcacccagacccacttcgaaaaacccgtcaaacactcccgctacgtaccctactgggtcgattcctccaacccagctgctcgtacgaagcgggctccctcacggtctggaggccctgcctcctcctctgagccacctcgccagcctccccatcatccatcctcctctccccccgctgctgcctcgcgtccctctcctggccgcggctctcccatgccacgtgctcgtggtcgaggtcgtggccacgggatgggtgctcgcttggtccatgggtttgcggcatttttctccatgtgccgcaacatttctgctgatgtccatgaggtggcacggcgtcagcgggagactgacgacaatcttcatcgtcaaacttcctccatgggcatgccttttgtccctcgttcgcctgatgtgcctctccatcctcctcccccggagatcaatgagtggcaccagcaggcctacggggtgccttttatgtctgcagacgatgaagatgaagaagtctatgttgatgatcgcgaggagtttgccccgcctccctaccatggggatccgggtcaatcatcctcccaccctccgcctccttacccgggtccgggacccatgctgaaaaaaccctagg

SEQ ID NO: 6973 - DNA, 1083 bp, Zea mays
  Zm_smallRNAprecursor_2462
attagagtggcaaatggagtcgaagcaccagtcaaggccattggagatctacatcttagtttacctaatggttttgtactgctgttgagagatgtactctatgtaccttccttgcgagagaaccttattttagtttctagattagatgatcaacacattagttgtcttttcggtgatagacaatgtgttattaattttgataataaagatgctggtcttgccatccaaatagatatgctttatttacttttgtacagtgatgttgttaacgtattagatacaccagaaaataaaccagccagcagtggcaggaaaagaaaatgtagtgatggagagacctcgccaaaattatggcactatcgtttgggccatattttgtgggggggggatagagcatctcgttaaggaacaaattctccatcccttagacttcacagacatagagcaatgcaaagattgcaataagggtgaatttgcgaagcagattaagaaaaatgctaagcatagtacaagagtgttagaaattattcatacagatattcgtggtccttttctagttaggacagtagatggatttagctcgttcataaccttcacagatgactactctcgctatggttatatttatcccattaaggaaagttcagaagctttagataagtttaaacatttcaaggctaaagtagaaaatcaacacgatttgaagacaaagattgtcagatcagatcgttggggagagtactatgggcgccatactgagtatggacaggtcccagggcctttcgtgaggttcctaagagaaaatgatattgttgctcagtattcaacacctggtgaaccacaacagaatggggttgccgaaagacgtaacagaatgctaatggacatggtaaggagtatgcttagttactttaacttaccattgggtctatggatggaggcattaaaaatatctatgcatatactcaacagagttcctagtaaatcagtgctaaaactccatatgagttgtggactagcagaaagtccacgttcaactacttccacatatggggttgtctagcagaagctagaatattcaat

SEQ ID NO: 6974 - DNA, 1250 bp, Zea mays
  Zm_smallRNAprecursor_2463
tcaaagctgaaccttgatgtagtcctatgataatcaggaaaacatttgtgtcaccatcaattgttcggacattagtcacaaccttgtcatacatgtccttgatgaacatactttgttgggactttatgcttatccaatgcccaccacatgagatttctaggtattttatcataggccttttccaagtcgataaaaaaccatgtgcaagtccttcttctgctccttatatcgctccatgacctgccttattaagaaaattgcttccatggttgaccttccaggcatgaatccaaattggttcatggtgatatgtgtcattcctctcagccgatgctcaataactctctcccatagcttcatagtgtggctcatgagcttaatccctcgatagttggtacaactttgaatatctcccttgttctagaagattggtactaatgtactcctcctccactcatcgggcatcctgtttgttcgaaaaatatggttgaacagcttgtttagccaaacgatagcaatatcccaaggcatttccacacctctattgggataccatccgggcccatcgccttgcccctttcatcctctttaaagcttttttgacctctgatttttggatcctacatacaaagcatctatttaatcatcaaaggagtcatcccaattaaatgtccatagtctcattctcaccattgaaaagattgtcaaaatacctctgcccacctttgtttgatgtcttctcaccaagagttgatccatctcatccttaatgcatttaacttggttgaggtccctcgtcttcctttctcaaatcctagctatcttatagacatctttctccccttcctttgtacttagtcttcggtaaagatcatcataggcttgaccctttgcctcactcagagctcgttttgcagtcttctttgccaccttatacctctctatgttgaccgcgctgctgtcatggaacaagctcctgtaacattctttcttctcctttcttgccttttgaacatcctcggtccaccaccaagtatccttagattcaccgctgctccctttggtcactccaaacacctctgacgccaccttcctaatacaagttgccatcttcaccacatgttgtttgcatcttcttcttcggaccaagcgttctccacaaaaactctttccctaaaaacatcggatgtctcccctttgagttttcaccacttcgtcctcgcaatttttgcttgtttaaccctatgggt

SEQ ID NO: 6975 - DNA, 1113 bp, Zea mays
  Zm_smallRNAprecursor_2464
accttcagagactcgacgtgcaacttgtaaccatatttgcattgtaagtgtcactcatactccacatatatgtgttattattagtgagttgtataaattttcaatatctgacatgcacgtgtgcgttgcagaatgcaacatgatcagcaggagatcctttatggtaccaatcccaatgctagtgccagtaaaagggttgggtatctcaacccaataaagatatgcgaggataaccacacttttagaatcggaaaagacaacgaagcattacagggactaacggacgaagaaattgaggtgcgtatccaggatctgaagaaggattttgaagcaagatacgccacctacataggacacgcaatgcttcaatttcaagacagggaatccatagtgcactacaggaatcctaatgattcccgtcggccaggataattcccgtcggccagggaaacagccgacggggataacgtaactcccgtcggctacactgaagccgacgggaataacgtaacgcccgtcggccagagagtaggctgacgtgagttaacttaactcccgtcagccagaaaataggccgacggggattacttaactcccgtcggccagagcgcaggccgacggggattaggcttttatgagcgcgggttcgcccgcgcgggctcatttcttctctgtctttcttcctagccgccgccgccgcctgccctattctcgccgccgcctctaaccgccgccgcgccgccgcccctccccgccggcgtgccttcccggccgagcccgacgtcgcccctcggagcgccgcccgtccacgccgcccgacgccgcccctcggagcccgacgccgcgcacccgggcgccccggagtcgcccgtccgccgctcgtccgccggtcgtcctctcgcggcgccgagcgcccagccgccccaccgccgcgcgcccgtcagcgccgcccgtccacgccgcccgacgccgcccctcggagcccgacgccgcgcacccgggcgccccggcgtcgcccgtccgccgctcgtccgccgctcgtcctctcgcggcgccgagcgcccagccgccccaccgccgcgcgcccgtcagcgccgccgcgagcccggccgc

SEQ ID NO: 6976 - DNA, 1043 bp, Zea mays
  Zm_smallRNAprecursor_2465
attaatcagcccagttcctccgtgcatactaaaagtcttgtttattctgagtcaggcagtcaggcccatgaggagccggagctgaggcaactcatgcttgcacgatgatttaccggtcttattgtcgccatgcatgattcatgccatgccacacacacatagcatgcacactcctgcacggacacgtcattcgagctaggcgatgcatctggatctagactggagagggaacccgtccaaaccccacccatctatcgcttacagttcgccgtcgtcgtagctatccttatcaccagcacgcataaaaaaaatctaggcgagaaataaatttaagcggacacaccaacgacataaacaaaaaaaatgcaaaatatggggtttgaacccacgaccacatggttagaagccttgtgctctaccaagtgggctagatgggctttgtgctcatgtttgcaacaaatattttaataacacaaccgagctcggcgccaagatctgtggcgccgagctcggttccacgtcgacgccacgcgtctgggttgtgccaacgcaacacgacctcggcgccatagcctatggcgccgagctgtgttagctcggcgccataggctatggcgccgagcaaagggtccaaaactgcatttaaaatttttttaggtctaaacgtgattttacttctgtttaagggctaaaatacaaaaaattcgggccacccgcgcggtgctgacaagtggtagtttggcaatcctatttccacacgatttttattttctaaaaaaaaactaattattttcctttagaaaaataagaatcacttaaaaaataaaattgccaaaatagccctacattattttttcggtaagtacctacgctattaggcgtgaaaaaacggaaataaaagagaaggccacaaagggccttgagtggccccttttttgtcaggccatctagtaggccttggtacaataagccggactcctccacacaggcctagcccaatgagagggttccatggaaaccctaatcctcgcggtatataacct

SEQ ID NO: 6977 - DNA, 1044 bp, Zea mays
  Zm_smallRNAprecursor_2466
attaatcagcccagttcctccgtgcatactaaaagtcttgtttattctgagtcaggcagtcaggcccatgaggagccggagctgaggcaactcatgcttgcacgatgatttaccggtcttattgtcgccatgcatgattcatgccatgccacacacacatagcatgcacactcctgcacggacacgtcattcgagctaggcgatgcatctggatctagactggagagggaacccgtccaaaccccacccatctatcgcttacagttcgccgtcgtcgtagctatccttatcaccagcacgcataaaaaaaatctaggcgagaaataaatttaagcggacacaccaacgacataaacaaaaaaaatgcaaaatatggggtttgaacccacgaccacatggttagaagccttgtgctctaccaagtgggctagatgggctttgtgctcatgtttgcaacaaatattttaataacacaaccgagctcggcgccaagatctgtggcgccgagctcggttccacgtcgacgccacgcgtctgggttgtgccaacgcaacacgacctcggcgccatagcctatggcgccgagctgtgttagctcggcgccataggctatggcgccgagcaaagggtccaaaactgcatttaaaatttttttaggtctaaacgtgattttacttctgtttaagggctaaaatacaaaaaattcgggccacccgcgcggtgctgacaagtggtagtttggcaatcctatttccacacgatttttattttctaaaaaaaaactaattattttcctttagaaaaataagaatcacttaaaaaataaaattgccaaaatagccctacattattttttcggtaagtacctacgctattaggcgtgaaaaaacggaaataaaagagaaggccacaaagggccttgagtggccccttttttgtcaggccatctagtaggccttggtacaataagccggactcctccacacaggcctagcccaatgagagggttccatggaaaccctaatcctcgcggtatataacctt

SEQ ID NO: 6978 - DNA, 1041 bp, Zea mays
  Zm_smallRNAprecursor_2467
taatcagcccagttcctccgtgcatactaaaagtcttgtttattctgagtcaggcagtcaggcccatgaggagccggagctgaggcaactcatgcttgcacgatgatttaccggtcttattgtcgccatgcatgattcatgccatgccacacacacatagcatgcacactcctgcacggacacgtcattcgagctaggcgatgcatctggatctagactggagagggaacccgtccaaaccccacccatctatcgcttacagttcgccgtcgtcgtagctatccttatcaccagcacgcataaaaaaaatctaggcgagaaataaatttaagcggacacaccaacgacataaacaaaaaaaatgcaaaatatggggtttgaacccacgaccacatggttagaagccttgtgctctaccaagtgggctagatgggctttgtgctcatgtttgcaacaaatattttaataacacaaccgagctcggcgccaagatctgtggcgccgagctcggttccacgtcgacgccacgcgtctgggttgtgccaacgcaacacgacctcggcgccatagcctatggcgccgagctgtgttagctcggcgccataggctatggcgccgagcaaagggtccaaaactgcatttaaaatttttttaggtctaaacgtgattttacttctgtttaagggctaaaatacaaaaaattcgggccacccgcgcggtgctgacaagtggtagtttggcaatcctatttccacacgatttttattttctaaaaaaaaactaattattttcctttagaaaaataagaatcacttaaaaaataaaattgccaaaatagccctacattattttttcggtaagtacctacgctattaggcgtgaaaaaacggaaataaaagagaaggccacaaagggccttgagtggccccttttttgtcaggccatctagtaggccttggtacaataagccggactcctccacacaggcctagcccaatgagagggttccatggaaaccctaatcctcgcggtatataacct

SEQ ID NO: 6979 - DNA, 1042 bp, Zea mays
  Zm_smallRNAprecursor_2468
taatcagcccagttcctccgtgcatactaaaagtcttgtttattctgagtcaggcagtcaggcccatgaggagccggagctgaggcaactcatgcttgcacgatgatttaccggtcttattgtcgccatgcatgattcatgccatgccacacacacatagcatgcacactcctgcacggacacgtcattcgagctaggcgatgcatctggatctagactggagagggaacccgtccaaaccccacccatctatcgcttacagttcgccgtcgtcgtagctatccttatcaccagcacgcataaaaaaaatctaggcgagaaataaatttaagcggacacaccaacgacataaacaaaaaaaatgcaaaatatggggtttgaacccacgaccacatggttagaagccttgtgctctaccaagtgggctagatgggctttgtgctcatgtttgcaacaaatattttaataacacaaccgagctcggcgccaagatctgtggcgccgagctcggttccacgtcgacgccacgcgtctgggttgtgccaacgcaacacgacctcggcgccatagcctatggcgccgagctgtgttagctcggcgccataggctatggcgccgagcaaagggtccaaaactgcatttaaaatttttttaggtctaaacgtgattttacttctgtttaagggctaaaatacaaaaaattcgggccacccgcgcggtgctgacaagtggtagtttggcaatcctatttccacacgatttttattttctaaaaaaaaactaattattttcctttagaaaaataagaatcacttaaaaaataaaattgccaaaatagccctacattattttttcggtaagtacctacgctattaggcgtgaaaaaacggaaataaaagagaaggccacaaagggccttgagtggccccttttttgtcaggccatctagtaggccttggtacaataagccggactcctccacacaggcctagcccaatgagagggttccatggaaaccctaatcctcgcggtatataacctt

SEQ ID NO: 6980 - DNA, 1040 bp, Zea mays
  Zm_smallRNAprecursor_2469
gtcagggttgcttcttagcgaagccaaggcctcgggcgagccggagatgtgtccgtcgttaaaaggggggcctcgggcgagacggaagtccctcgaggtcggctgcccgagtccgaggctaggctcgggtgaagcgtgatcgagtcactcgtatggactgatccctgacttaatcgcacccatcaggcctctgcagctttatgctgatgggggttaccagctcagaattaggcgtcttgagggtacccctaattatggtccccgacaatgtcgttatgttaaatttgtgaatgtgaatacttatgtgactatatttctgaatgtgtagacttatgtgagtatatttgtgattatgaatgtgtatatgtgtatgaaatctgttttgtatttgcaaatgtcagattttttaaaattcagaattttgtgcaatttctgaaatattttatgtctgacggcctagagtaagccgtcggacataaggtatatgttatgtacaacggcttaaaaccgtcggacataaggtatatgttatgtccgacggcttaaaaccgtcggacataacaacagtgggcccacaggcgacggttaaaacagttgccacgccttacctccgacggtccgatggggccatcggagatagcttatgtccgacggcggccgtcggacataacgctatttccgacgccttacccccgacggcttaaaaccgtcagagataggttaatgccgtcggacataacctatctccgacggtccaaagcttatgtccgacggctttagccgttggaagttcttccgtttactgtagtgagtgagggaaaaacaagggagaaatcaacaaaagagtaatgaggaagttcaaccaaactattgacgctctacagctcctagagctggacctatttgggaaaaaattcatttggtcaaatgaacaggatgatcctacgatgtctaggatagatagagtaatggcgacaacagagtggcatgctctctatccatcggctaatttgcaggcaatttgcaccatgacctcggac

SEQ ID NO: 6981 - DNA, 1079 bp, Zea mays
  Zm_smallRNAprecursor_2470
gtcttaaataacaatgtcaggcaaccccggccctcacagatgggtttaaaaccaaatctcttaataatggttaaaaaataagggatgataaaacttcttggagaaaatatactaacaacataaaggaaaaaaacttctcagacttactattggggatggacataaactaacgatgtaaagcttcttggaagaaaaagaaacccattataaaaatgctaaaaaaggacgaataatgaactaaaaaactttaagttaacaatggtagaactgtcaaagcgttcaggagaagtaggagagagtgtacaagaaagtatgaaactgaaccttattagcttatcaccagctgctggagaatcgacagagaaaagaacacatcttgatcggtgctgcatgcatgtggaagatttatatttgtctaggcagcacgcatgcatctgcacaggatgaccaagttgacggcaccggccatgctttgctgctctgctggcctctctctgcagtttcccacagctttattgaactgcatgcacctgctgatgcgggtggaggagttgaagctgccgctcctctgagagatgcagttcaagaaagctgtggaagatcacaaagaaggccatctgattactgcaggaggaggaaggaaggaggaagaaggagaaggaacactgcttgctgcctgctgccatcgtctttggcactcagtaacagcaagttgggtgggtggcggaggaagcgggggagagcaagggctatttatacagaaaggaaggaagaaggaaagaagtatggcctgtgcgagaagagggggggagatggcagcgccgggtttggttggtgtgggactgggagggaggctaagcaggtccccaatcccaagaagaatatagaacctgaacactactccaagccacaggccaaagccaagaaagctctctctctctctctggacccgacccatcatctggctttttgggcagatcgattcaaggagctttgttcatgtgaggggagacaaagggccagttctttaatccacacttggatcaaatatacacacacacccagtgtgcgtgcgtgca

SEQ ID NO: 6982 - DNA, 1079 bp, Zea mays; identical to SEQ ID NO: 6981
  Zm_smallRNAprecursor_2471

SEQ ID NO: 6983 - DNA, 1080 bp, Zea mays
  Zm_smallRNAprecursor_2472
gtcttaaataacaatgtcaggcaaccccggccctcacagatgggtttaaaaccaaatctcttaataatggttaaaaaataagggatgataaaacttcttggagaaaatatactaacaacataaaggaaaaaaacttctcagacttactattggggatggacataaactaacgatgtaaagcttcttggaagaaaaagaaacccattataaaaatgctaaaaaaggacgaataatgaactaaaaaactttaagttaacaatggtagaactgtcaaagcgttcaggagaagtaggagagagtgtacaagaaagtatgaaactgaaccttattagcttatcaccagctgctggagaatcgacagagaaaagaacacatcttgatcggtgctgcatgcatgtggaagatttatatttgtctaggcagcacgcatgcatctgcacaggatgaccaagttgacggcaccggccatgctttgctgctctgctggcctctctctgcagtttcccacagctttattgaactgcatgcacctgctgatgcgggtggaggagttgaagctgccgctcctctgagagatgcagttcaagaaagctgtggaagatcacaaagaaggccatctgattactgcaggaggaggaaggaaggaggaagaaggagaaggaacactgcttgctgcctgctgccatcgtctttggcactcagtaacagcaagttgggtgggtggcggaggaagcgggggagagcaagggctatttatacagaaaggaaggaagaaggaaagaagtatggcctgtgcgagaagagggggggagatggcagcgccgggtttggttggtgtgggactgggagggaggctaagcaggtccccaatcccaagaagaatatagaacctgaacactactccaagccacaggccaaagccaagaaagctctctctctctctctggacccgacccatcatctggctttttgggcagatcgattcaaggagctttgttcatgtgaggggagacaaagggccagttctttaatccacacttggatcaaatatacacacacacccagtgtgcgtgcgtgcac

SEQ ID NO: 6984 - DNA, 1080 bp, Zea mays; identical to SEQ ID NO: 6983
  Zm_smallRNAprecursor_2473

SEQ ID NO: 6985 - DNA, 1081 bp, Zea mays
  Zm_smallRNAprecursor_2474
gtcttaaataacaatgtcaggcaaccccggccctcacagatgggtttaaaaccaaatctcttaataatggttaaaaaataagggatgataaaacttcttggagaaaatatactaacaacataaaggaaaaaaacttctcagacttactattggggatggacataaactaacgatgtaaagcttcttggaagaaaaagaaacccattataaaaatgctaaaaaaggacgaataatgaactaaaaaactttaagttaacaatggtagaactgtcaaagcgttcaggagaagtaggagagagtgtacaagaaagtatgaaactgaaccttattagcttatcaccagctgctggagaatcgacagagaaaagaacacatcttgatcggtgctgcatgcatgtggaagatttatatttgtctaggcagcacgcatgcatctgcacaggatgaccaagttgacggcaccggccatgctttgctgctctgctggcctctctctgcagtttcccacagctttattgaactgcatgcacctgctgatgcgggtggaggagttgaagctgccgctcctctgagagatgcagttcaagaaagctgtggaagatcacaaagaaggccatctgattactgcaggaggaggaaggaaggaggaagaaggagaaggaacactgcttgctgcctgctgccatcgtctttggcactcagtaacagcaagttgggtgggtggcggaggaagcgggggagagcaagggctatttatacagaaaggaaggaagaaggaaagaagtatggcctgtgcgagaagagggggggagatggcagcgccgggtttggttggtgtgggactgggagggaggctaagcaggtccccaatcccaagaagaatatagaacctgaacactactccaagccacaggccaaagccaagaaagctctctctctctctctggacccgacccatcatctggctttttgggcagatcgattcaaggagctttgttcatgtgaggggagacaaagggccagttctttaatccacacttggatcaaatatacacacacacccagtgtgcgtgcgtgcaca

SEQ ID NO: 6986 - DNA, 1159 bp, Zea mays
  Zm_smallRNAprecursor_2475
ttttatgcaatttttcagttaattatgaaaccaacgtggattgattattgtttaaattgcttagaattcagagaattttgtggtgattgaatattttaaccaacattggatattgttaccataatttaatacaagtttatgttttctagatcatccaacgatggtttagaattttgtgatcagaaattttcatagatatgacatggttattatttgactaacattgaatatttaattcatgcatgttctatgatttagtattcagtatttatttcagatgtcctaaatattttctgttttaattttgcaaaggtgctcataccgccatgctgattagccagattgctcagatgaaaccgctagatggtagtaattactattcttggcgggaggatattgatatgataaccacagtgggtgagatggattacgcactgaggtttgataaaccagtagagcccacagtgggaactcccaactatgaccacaggtggatgcaatacagcatcgacaaggtcaagtgggaaatatcaaatgacaaatgtatgattattcttaagaggagcatcaaggagcctctttagagttccataccagagtgtgagactaccaaggaataccttgagagggtagcctctcatcataaagggtcttctaaggcttatgcttgctctctaatgacagaatttgtcaatgcaaaatatgatggaaatggtattgttgcccagtattcaacacctggcgaaccacaacagaatggggttgctgaaaggcgtaacaaaacgctaatggatatggtaaggagtatgctaagttactctaacctgccattgggtctacggatggaggctttaaaaaccgctatgcatatactcaatagagttcctagtaaatcagtgactagaactccatatgagttgtggactggcagaaaacccacactcaactacttccacatatggggttgtccagcagaagctagaatatttaatcctggacagggaaagctagatgagagaaccactagctgccattttattggctaccctgacagatcgaagggttacagattctactgccctgatagacaaaccaagttcatagagactagacatgccattttcttagaggatgacatgatcatggggagtaaggtact

SEQ ID NO: 6987 - DNA, 1060 bp, Zea mays
  Zm_smallRNAprecursor_2476
cagatctcggtgtataacgcgcttctcgttatgcaaatagatcagtccttttagcatctgcacaaggaaggcgcaatttcaattataaggttcatgtaatgatagtgtagcattttagttttagcggaaagattattcatagcttctgccacatgtcactagcctgcgtacagatagcagcgaggtaggcctctggaatggttttaacagtcttcaggaaatctgcaagggagccaccatccatgtattccaaaacaatagaaatggcaccattgaaatagaaacactgatagaacacaacaacatattggcactgtgttgataagtttatcttcaactccttggcaatctgtttgcgtatactctcatcaatatttagttgaataacctgcaaacacagtggcagacgatgaaggagaagaccatttacaacagttaggaagattacacaaagaagatactccctccgttcttttttatttgtcgcggtttagttcaaaaataaactagcggacgacaaatattcgagaccggaggtagttctacctccgttgtcgaatatttgtcgtccgctagtttatttttgaactaaaccatgacaaataaaaaagaatggagggagtacaatgcagagatcgttctaaagtcttgactgtaaagaaccataaataagcagcatcaaagaatgattgtgtcagatataccttcagagcaaaaaactggccagtaaatttgtggcggaccaattgcacatttccgctgctacctttcccgatatcacttttataacgtctagatcatctaagctcagttgactatccaacggctctataggaggagcctgaagaacattttttagcaagtcagaaaaaagtgtgcgaacagtatcagaaatttttaataggtaaataaaaattaaaacaccaacaatggtattgttatgactggcatcacctatcagcagtaccaacgcatcagttgcccaattatcgtttgattggtttatttcccaattagctcccataaaaataggtgatgagatcttagattggtgtaaggg

SEQ ID NO: 6988 - DNA, 1097 bp, Zea mays
  Zm_smallRNAprecursor_2477
tgtgcatgcagaatcttttttctgtccggtcacttctcctctgctgggcgcgcgcagatttttttttggacgcttctgctcagcccgcgcgccatgctgtagattttttctctcctgctcacagccatgcatgcgtgtcaggggcgccagttttttttccctgtccagtcgcttccagcagctgcgcgcacagtttttttttgtcactgccccactctactgccgtgtgcgcagccttttgttcttgtgaccagtcacccgcgcagcaaggaaactattttttctgtcactttcgtgctgcagtgtgagggatacagggcgcgcagaacttttcttttgcgcagttccttttcttttgccgtccggtctcatctgcgcagacacttggttttgtttttttttttgcatagaatccctgcagtacactttttcagaatcctgtgtcagaaatttgaatttttggcatcttccctctgctgtttctggttctctgaccacactggtcagaaccagctgaactggcccatgggggcggttgaaccggtcctgaggaccagctcaactgcctatatatacttgactctccccttctcttctcccacttcattcactctcgccttagtcgcttcgcaacctttagagcctctctttcacacacctcaaccggttcacagtttcaccaccttttcaatcatggtgcgtcgtcgcaacccctctgtggttgagtttagcagcgactccgacgagattcaggaggaatctcccgccccctctcctccgcctcgtcgctccctctctaagagaggacgtggctctggtcggatggatggcgagggctcttccatgccctcgcagccgactcgcgggagacgccaaaaggttggcgcctctcgtcctcgtcgtagcacgtcttcctctgggtatgctccctgccaggaggaggatggggctttcgacgacttcgtcgaccttccgacgcctgatgctctctacgtcaccggactgcacatgcatcccggcgaacgtcagccgcggtccgcatgaatctcccgtcgacttcactctgaagggaatagacaccctttcagcgcctgagg

SEQ ID NO: 6989 - DNA, 1149 bp, Zea mays
  Zm_smallRNAprecursor_2478
ttttgttcttgtgaccagtcacccgcgcagcaaggaaactattttttctgtcactttcgtgctgcagtgtgagggatacagggcgcgcagaacttttcttttgcgcagttccttttcttttgccgtccggtctcatctgcgcagacacttggttttgtttttttttttgcatagaatccctgcagtacactttttcagaatcctgtgtcagaaatttgaatttttggcatcttccctctgctgtttctggttctctgaccacactggtcagaaccagctgaactggcccatgggggcggttgaaccggtcctgaggaccagctcaactgcctatatatacttgactctccccttctcttctcccacttcattcactctcgccttagtcgcttcgcaacctttagagcctctctttcacacacctcaaccggttcacagtttcaccaccttttcaatcatggtgcgtcgtcgcaacccctctgtggttgagtttagcagcgactccgacgagattcaggaggaatctcccgccccctctcctccgcctcgtcgctccctctctaagagaggacgtggctctggtcggatggatggcgagggctcttccatgccctcgcagccgactcgcgggagacgccaaaaggttggcgcctctcgtcctcgtcgtagcacgtcttcctctgggtatgctccctgccaggaggaggatggggctttcgacgacttcgtcgaccttccgacgcctgatgctctctacgtcaccggactgcacatgcatcccggcgaacgtcagccgcggtccgcatgaatctcccgtcgacttcactctgaagggaatagacaccctttcagcgcctgaggttcaccaaccctactctcactcctcgtcatcctggtgtccaggaccctcggttctggaatcttttccaggctgacttctacaattctgtcattctttccaagaaacacccagtcgtccgacatagatttattgactgggagggttgtgagaatatgggagatgctgacatgtcgtcagctctcgtaaacttagagagaaatgggttacgaaacattatgaccatggaatacccctggaacgatgaggtggtagctcagttctatgccaccctctggataaagaaagta

SEQ ID NO: 6990 - DNA, 1073 bp, Zea mays
  Zm_smallRNAprecursor_2479
ccgtcgacttcactctgaagggaatagacaccctttcagcgcctgaggttcaccaaccctactctcactcctcgtcatcctggtgtccaggaccctcggttctggaatcttttccaggctgacttctacaattctgtcattctttccaagaaacacccagtcgtccgacatagatttattgactgggagggttgtgagaatatgggagatgctgacatgtcgtcagctctcgtaaacttagagagaaatgggttacgaaacattatgaccatggaatacccctggaacgatgaggtggtagctcagttctatgccaccctctggataaagaaagtagatgagaaagccgatgggtatgattacccagtcatgtatttcttcatccagggtaactggcacaaagtcagttatcgtcgttttgcccatattctgggcttctctgatgcagatattcagggcagcaacatgcgagtgcatgacattcggctgcccatgcgggaagagacggaattcattcatgtctctactgagcgggagttctggacaaccgctaacatgcataggtactacaggtaccttaattctttgtctcggatgaccgttctcccgaagggcggaaatcaaatgaacgtccttggggagagtcgagtcttcttcctcctccttgctccaaacagtctcgcccgcatcaatgtgtttgacatgatctgggaagagatcgtctgtgcttcctggtctcctctcagagggtgtcttcatgcaccctttatcatgaagatgatcgaagtggtcacccagacacacttcgaaaaacccgtcaaacactcccgctacgtaccctactgggttgattcctccaacccagctgctcgtacgaagcgggctccctcacggtcaggaggccctgcctcctccactgagccacctcgccagcctccccatcatccatcctcctctccccccgctgctgcctcgcgtccctctcctggccgcggatctcccatgccacgtgctcgtggtcgaggtcgtggccgagtgatgggtgctcgcttggtccatgggttgcaacgaat

SEQ ID NO: 6991 - DNA, 1142 bp, Zea mays
  Zm_smallRNAprecursor_2480
gagggacaaaaggcatgcccatggtggaagcttgacgacgaagattgtcgtcagtctcccgctgacgccgtgccacctcatggacatcagcagaaatgttgcggcacatggagaaaaatgccgcaaacccatggaccaagcgagcacccatcactcggccacgacctcgaccacgagcacgtggcatgggagatccgcggccaggagagggacgcgaggcagcagcggggggagaggaggatggatgatggggaggctggcgaggtggctcagtggaggaggcagggcctcctgaccgtgagggagcccgcttcgtacgagcagctgggttggaggaatcaacccagtagggtacgtagcgggagtgtttgacgggtttttcgaagtgtgtctgggtgaccacttcgatcatcttcatgataaagggtgcatgaagacaccctctgaaaggagaccaggaagcacagacgatctcttcccagatcatgtcaaacacattgatgcgggcgagactgtttggagcaaggaggaggaagaagactcgactctccccaaggacgttcatttgatttccgcctttcgggagaacggtcatccgggacaaaaaattaaggtacctgtagtacatatgcatgttagcggttgtccagaactcccgctcagtagagacatgaatgaattccgtctcttcccgcatgggcagccgaatgtcatgcactcgcatgttgctgccctgaatatctgcatcagagaagcccagaatatgggcaaaacgacgataactgactttgtgccagttaccctggatgaagaaatacatgactgggtaatcatatccatcggcttcctcatctactttctttatccagagggtggcatagaactgagctaccacctcatcgttccaggggtattccatggtcataatgtttcgtaacccatttctctctaagtttacgagagctgacgacatgtcagcatctcccatattctcacaaccctcccagtcaataaatctatgtcggacgactgggtgtttcttggaaagaatgacagaattgtagaagtcagcctggaaaagattccagaaccgagggtcctggacaccaggatgacgaggagtgagagtagggttggtgaac

SEQ ID NO: 6992 - DNA, 1058 bp, Zea mays
  Zm_smallRNAprecursor_2481
acatcagcagaaatgttgcggcacatggagaaaaatgccgcaaacccatggaccaagcgagcacccatcactcggccacgacctcgaccacgagcacgtggcatgggagatccgcggccaggagagggacgcgaggcagcagcggggggagaggaggatggatgatggggaggctggcgaggtggctcagtggaggaggcagggcctcctgaccgtgagggagcccgcttcgtacgagcagctgggttggaggaatcaacccagtagggtacgtagcgggagtgtttgacgggtttttcgaagtgtgtctgggtgaccacttcgatcatcttcatgataaagggtgcatgaagacaccctctgaaaggagaccaggaagcacagacgatctcttcccagatcatgtcaaacacattgatgcgggcgagactgtttggagcaaggaggaggaagaagactcgactctccccaaggacgttcatttgatttccgcctttcgggagaacggtcatccgggacaaaaaattaaggtacctgtagtacatatgcatgttagcggttgtccagaactcccgctcagtagagacatgaatgaattccgtctcttcccgcatgggcagccgaatgtcatgcactcgcatgttgctgccctgaatatctgcatcagagaagcccagaatatgggcaaaacgacgataactgactttgtgccagttaccctggatgaagaaatacatgactgggtaatcatatccatcggcttcctcatctactttctttatccagagggtggcatagaactgagctaccacctcatcgttccaggggtattccatggtcataatgtttcgtaacccatttctctctaagtttacgagagctgacgacatgtcagcatctcccatattctcacaaccctcccagtcaataaatctatgtcggacgactgggtgtttcttggaaagaatgacagaattgtagaagtcagcctggaaaagattccagaaccgagggtcctggacaccaggatgacgaggagtgagagtagggttggtgaa

SEQ ID NO: 6993 - DNA, 1057 bp, Zea mays
  Zm_smallRNAprecursor_2482
catcagcagaaatgttgcggcacatggagaaaaatgccgcaaacccatggaccaagcgagcacccatcactcggccacgacctcgaccacgagcacgtggcatgggagatccgcggccaggagagggacgcgaggcagcagcggggggagaggaggatggatgatggggaggctggcgaggtggctcagtggaggaggcagggcctcctgaccgtgagggagcccgcttcgtacgagcagctgggttggaggaatcaacccagtagggtacgtagcgggagtgtttgacgggtttttcgaagtgtgtctgggtgaccacttcgatcatcttcatgataaagggtgcatgaagacaccctctgaaaggagaccaggaagcacagacgatctcttcccagatcatgtcaaacacattgatgcgggcgagactgtttggagcaaggaggaggaagaagactcgactctccccaaggacgttcatttgatttccgcctttcgggagaacggtcatccgggacaaaaaattaaggtacctgtagtacatatgcatgttagcggttgtccagaactcccgctcagtagagacatgaatgaattccgtctcttcccgcatgggcagccgaatgtcatgcactcgcatgttgctgccctgaatatctgcatcagagaagcccagaatatgggcaaaacgacgataactgactttgtgccagttaccctggatgaagaaatacatgactgggtaatcatatccatcggcttcctcatctactttctttatccagagggtggcatagaactgagctaccacctcatcgttccaggggtattccatggtcataatgtttcgtaacccatttctctctaagtttacgagagctgacgacatgtcagcatctcccatattctcacaaccctcccagtcaataaatctatgtcggacgactgggtgtttcttggaaagaatgacagaattgtagaagtcagcctggaaaagattccagaaccgagggtcctggacaccaggatgacgaggagtgagagtagggttggtgaa

SEQ ID NO: 6994 - DNA, 1058 bp, Zea mays
  Zm_smallRNAprecursor_2483
catcagcagaaatgttgcggcacatggagaaaaatgccgcaaacccatggaccaagcgagcacccatcactcggccacgacctcgaccacgagcacgtggcatgggagatccgcggccaggagagggacgcgaggcagcagcggggggagaggaggatggatgatggggaggctggcgaggtggctcagtggaggaggcagggcctcctgaccgtgagggagcccgcttcgtacgagcagctgggttggaggaatcaacccagtagggtacgtagcgggagtgtttgacgggtttttcgaagtgtgtctgggtgaccacttcgatcatcttcatgataaagggtgcatgaagacaccctctgaaaggagaccaggaagcacagacgatctcttcccagatcatgtcaaacacattgatgcgggcgagactgtttggagcaaggaggaggaagaagactcgactctccccaaggacgttcatttgatttccgcctttcgggagaacggtcatccgggacaaaaaattaaggtacctgtagtacatatgcatgttagcggttgtccagaactcccgctcagtagagacatgaatgaattccgtctcttcccgcatgggcagccgaatgtcatgcactcgcatgttgctgccctgaatatctgcatcagagaagcccagaatatgggcaaaacgacgataactgactttgtgccagttaccctggatgaagaaatacatgactgggtaatcatatccatcggcttcctcatctactttctttatccagagggtggcatagaactgagctaccacctcatcgttccaggggtattccatggtcataatgtttcgtaacccatttctctctaagtttacgagagctgacgacatgtcagcatctcccatattctcacaaccctcccagtcaataaatctatgtcggacgactgggtgtttcttggaaagaatgacagaattgtagaagtcagcctggaaaagattccagaaccgagggtcctggacaccaggatgacgaggagtgagagtagggttggtgaac

SEQ ID NO: 6995 - DNA, 1171 bp, Zea mays
  Zm_smallRNAprecursor_2484
cgcatgggcagccgaatgtcatgcactcgcatgttgctgccctgaatatctgcatcagagaagcccagaatatgggcaaaacgacgataactgactttgtgccagttaccctggatgaagaaatacatgactgggtaatcatatccatcggcttcctcatctactttctttatccagagggtggcatagaactgagctaccacctcatcgttccaggggtattccatggtcataatgtttcgtaacccatttctctctaagtttacgagagctgacgacatgtcagcatctcccatattctcacaaccctcccagtcaataaatctatgtcggacgactgggtgtttcttggaaagaatgacagaattgtagaagtcagcctggaaaagattccagaaccgagggtcctggacaccaggatgacgaggagtgagagtagggttggtgaacctcaggcgctgaagggtgtctattcccttcagagtgaagtcgacgggagattcatgcggaccgcggctgacgttcgccggatgcatgtgcagtccggtgacgtagagagcatcaggcgtcggaaggtcgacgaagtcgtcgaaagccccatcctcctcctggcagggagcatacccagaggaagacgtgctacgacgaggacgagaggcgccaaccttttggcgtctcccgcgagtcggctgcgagggcatggaagagccctcgccatccatccgaccagagccacgtcctctcttagagagggagcgacgaggcggaggagaggggacgggagattcctcctgaatctcgtcggagtcgctgctaaactcaatcacagaggggttgcgacgacgcaccatgattgaaaaggtggtgaaactgtgaaccggttgaggtgtgtgaaagagaggctctaaaggttgcgaagcgactaaggtgagagtgaatgaagtgggagaagagaagggagagtcaagtatatatacgcagttgagctggtcctcaggaccggttcaaccgcccccatgggccagttcagctggttctgaccagtgtggtcagagaaccagaaacagcagagggaagatgccaaaaattcaaatttctgacacaggattctgaaaaagtgtactgcagggattctatgcaaaaaaaaacaaaaccaagtgtctgcgcagat

SEQ ID NO: 6996 - DNA, 1094 bp, Zea mays
  Zm_smallRNAprecursor_2485
tcggcatctgcatagccaactatttgtagggaattagatcttctgtacgtaagcatgagacctttagtaccttgaaggtaccttagagccttcttgactgctttccagtgttctatgcctggattcttctgatagtgtccaagcatcccggtggtaaaagctaagtcagggcgagtacatacttgagcatacataatgctaccgatagctgaagcatatggtactgacttcatcttgtttttctcatactgattcttgggacactgatattccccaaacttatcacccttgactattggaccaggcgaggcattacacttgtgcatattatacctctttagtacattttctatatatgacttctgtgagagtcctaatactcccttttgtctgtctctgtgaatttctattccaagaacataggaggcttctcccatgtctttcatatcaaaattcgaggaaagaaacccttttgtttccgctagtagatccttatcactactagctaagagtatgtcatcgacatacagaacaaggaagatatactttccttttctaaattttgcataaatgcaattgtcttccttgttttcctcgaaaccaaactttcttatagtctgatcaaacttgatgtaccactgtctggaggcctgttttaatccataaatggacctcctcaagtgacatcccatgtgttctttaccgctcacaacaaaaccctttggttgtgccatgaacacattttcttctaactctccatttaggaatgctgtctttacatccatctgatggagctctagatcaaaatgagcaactagtgccattatgatcctgaatgaatcttttgttgagataggtgagaaggtttcatggtagtcaatgccttctctctgtgtgaaccctttggccacaagtctagccttatatctttctatgttccctctggagtcacgctttgtcttgtagacccatttacagcctactgttttggctccatggggaatgacttctaagtcccaaactttgttcattctcatggattctaattcatcttccatggctgataaccatttggatgaatttgcacttctcat

SEQ ID NO: 6997 - DNA, 1171 bp, Zea mays
  Zm_smallRNAprecursor_2486
agctcaaaagagatgacgttagtaatacaagcaccaattttccttttatagcactttgaatatataaagttggcagttactaaaacaaggaaatcttattatatgaactaaatttctcttaatcttcaatgcttaattttaacaaattaaacatgcatgataaattgattaagttcaaaggctaattttaaatcatatcatggtgagtatttaatgtggaagaaataaatccaaatgtacaagagagaatacatcacatagttttggattgtttcttctttatacgtttaattgcatagtccattgagaaactcattctcatgctctgaaactacatagatcacttaggtaaaaacattagtttcacaactctagtcatatagagaattccctttttgataagtgctttaagaatttgaatttcttacttagcaccttattcatttacgaacacggggtttttctcttttatgtctagatcatggcaataatagagtaatcaaattgaaatgtgccaagaaatacttacaaccaatttaagtatttggattgccatatgtaagaaagaagattatgtaatctgttatatgataacctcaattttgatcatctttggtcttgatcttcaacttggagtaccaagataagtgccaaaatatttctcaacaaatatccttgtaccccttcactttccataattatagatcaattcaaaaccaaactatggtctctcaaacaatgtaacacccggattttaggggtccaaaacccggggttaacataaacaccaggtatgctgggaccaagtctcaaacatatgatgtatagtggcacaggatcgaatgtcacaactttatatataacaggagttctatacaaataaatagttacattataaggagacaacagtccagcaacccaaagttgactgggagacgacgacctagacctctcacgaactcatcaccgcatcctccatgagcatcatcctgcagtacctggtcttgacctgtggtgtatgtgagacagcaagagtgagctcacatacgttcatcgctcagcaagttgtggggaataatgtgcatgaactcgccaaaggtgggagctcacgtgaagtgtaaggcttaccaaagaagatggttagagctgagcattgcttttaaagttggtc

SEQ ID NO: 6998 - DNA, 1153 bp, Zea mays
  Zm_smallRNAprecursor_2487
aatttaggataatatacaaatatattacatatataaatatataaacttaattagttttgtctaaattataattatcaaaatggaattcaattccaacgaaacaaacggggcctgacacaatatgctttcgagcagcttcaaaactcctcccagaagtggtgaatatttggaatcgtggagcttaaaccctgtcaaaatgataggatgagctcgtggagaaagaaggtgcgggggttgacgactacatttatatatagctaggtattaatagaataataatagctgcgtcattgcagattgttagcaatgacacggaggattatcacactacttgcattggctgccctcaacaaaaggctacaagttccagtagcggacgtgcactttgcaaaaactgaaggtacttgtacgtgttgtacgtaatactctcacctgatgacaacgtacgcccaacattcctgtccgggccggtcgatcttgttcgagctgaagacagtcgcagggcaactctcctttggcaggacgtacgcgcgtgcatgcacgcatgttacactgcaatgcatgcacggctagctagcacaccatggacgaacgaacacagcatagcagagccaagcaaccgtcgtcgatggcgacgatgaccgcgcgcctgcctgccagaggagagctgcctacaactgtcttcagctagctgcatcatgctagtcccgcggtcgtcgtcatcgtcgttagaaaaccagctagatatataggtagctgctgctctcagttccatggacgatggatctagctagcttagccagcaccgtacctcttcctagctagctcctctgcttagacctcgcgaagtgttggcgctcctcttatagagtcagtccacgacgacgaccgaggaacggagtagcccgtcgatcagcaggggcgcgtgtggcagcctggcaggcgggcggcggtggcatatgccgtgctgctgctgctgctgctgcaggatgcatgggcctaccgatggatgcatgcgcatgatgcgctgcgactttttaggcccatggttgtaccatggatatccctcctccgggattcctccgcgcccatcaactttatcctattccccggccacgatgaggcttccgtcgacatggagaatcccggggcc

SEQ ID NO: 6999 - DNA, 1142 bp, Zea mays
  Zm_smallRNAprecursor_2488
caaaaggcatgcccatggaggaagcttgacgacgaagattgtcgtcagtctcccgctgacgccgtgccacctcatggacatcagcagaaatgttgcggcacatggagaaaaatgccgcaaacccatggaccaagcgagcacccatcccgcggccacgacctcgaccacgaccacgagcacgtggcatgggagatccgcggccaggagagggacgcgaggcagcagcggggggagaggaggatggatgatggggaggctggcgaggtggctcagtggaggaggcagggcctccagaccgtgagggagcccgcttcgtatgagcagctgggttggaggaatcaacccagtagggtacgtagcgggagtgtttgacgggtttttcgaagtgggtctgggtgaccacttcgatcatcttcatgataaagggtgcatgaagacaccctctgtgaggagaccaggaagcacggacgatctcttcccagatcatgtcaaacacattgatgcgggcgagactgtttggagcaaggaggaggaggaagactcgactctccccaaggacgttcatttgattaccgcccttcgggagaacggtcatccgggacaaagaattaaggtacctgtagtacctatgcatgttagcggttgtccagaactcccgctcagtagagacatgaatgaattccgtctcttcccgcatgggcagccgaatgtcatgcactcgcatgttgctgccctgaatatctgcatcagagaagcccaaaatgtgggcaaaacgacgataactgactttgtgccagttaccctggatgaagaaatacatgactgggtaatcatacccatcggcttcctcatctactttctttatccagagggtggcatagaactgagctaccacctcatcgttccaggggtattccatggtcataatgttccataacccctttctctctaagtttacgagagctgacgacatgtcagcatctcccatattctcacaaccctcccagtcaataaatctatgtcggacgactgggtgtttcttggaaagaatgacagaattgtagaagtcagcctggaaaagattccagaaccgagggtcctggacaccaggatgacgaggagtgagagtagggttggtaaac

SEQ ID NO: 7000 - DNA, 1058 bp, Zea mays
  Zm_smallRNAprecursor_2489
gcagaaatgttgcggcacatggagaaaaatgccgcaaacccatggaccaagcgagcacccatcccgcggccacgacctcgaccacgaccacgagcacgtggcatgggagatccgcggccaggagagggacgcgaggcagcagcggggggagaggaggatggatgatggggaggctggcgaggtggctcagtggaggaggcagggcctccagaccgtgagggagcccgcttcgtatgagcagctgggttggaggaatcaacccagtagggtacgtagcgggagtgtttgacgggtttttcgaagtgggtctgggtgaccacttcgatcatcttcatgataaagggtgcatgaagacaccctctgtgaggagaccaggaagcacggacgatctcttcccagatcatgtcaaacacattgatgcgggcgagactgtttggagcaaggaggaggaggaagactcgactctccccaaggacgttcatttgattaccgcccttcgggagaacggtcatccgggacaaagaattaaggtacctgtagtacctatgcatgttagcggttgtccagaactcccgctcagtagagacatgaatgaattccgtctcttcccgcatgggcagccgaatgtcatgcactcgcatgttgctgccctgaatatctgcatcagagaagcccaaaatgtgggcaaaacgacgataactgactttgtgccagttaccctggatgaagaaatacatgactgggtaatcatacccatcggcttcctcatctactttctttatccagagggtggcatagaactgagctaccacctcatcgttccaggggtattccatggtcataatgttccataacccctttctctctaagtttacgagagctgacgacatgtcagcatctcccatattctcacaaccctcccagtcaataaatctatgtcggacgactgggtgtttcttggaaagaatgacagaattgtagaagtcagcctggaaaagattccagaaccgagggtcctggacaccaggatgacgaggagtgagagtagggttggtaaa

SEQ ID NO: 7001 - DNA, 1057 bp, Zea mays
  Zm_smallRNAprecursor_2490
cagaaatgttgcggcacatggagaaaaatgccgcaaacccatggaccaagcgagcacccatcccgcggccacgacctcgaccacgaccacgagcacgtggcatgggagatccgcggccaggagagggacgcgaggcagcagcggggggagaggaggatggatgatggggaggctggcgaggtggctcagtggaggaggcagggcctccagaccgtgagggagcccgcttcgtatgagcagctgggttggaggaatcaacccagtagggtacgtagcgggagtgtttgacgggtttttcgaagtgggtctgggtgaccacttcgatcatcttcatgataaagggtgcatgaagacaccctctgtgaggagaccaggaagcacggacgatctcttcccagatcatgtcaaacacattgatgcgggcgagactgtttggagcaaggaggaggaggaagactcgactctccccaaggacgttcatttgattaccgcccttcgggagaacggtcatccgggacaaagaattaaggtacctgtagtacctatgcatgttagcggttgtccagaactcccgctcagtagagacatgaatgaattccgtctcttcccgcatgggcagccgaatgtcatgcactcgcatgttgctgccctgaatatctgcatcagagaagcccaaaatgtgggcaaaacgacgataactgactttgtgccagttaccctggatgaagaaatacatgactgggtaatcatacccatcggcttcctcatctactttctttatccagagggtggcatagaactgagctaccacctcatcgttccaggggtattccatggtcataatgttccataacccctttctctctaagtttacgagagctgacgacatgtcagcatctcccatattctcacaaccctcccagtcaataaatctatgtcggacgactgggtgtttcttggaaagaatgacagaattgtagaagtcagcctggaaaagattccagaaccgagggtcctggacaccaggatgacgaggagtgagagtagggttggtaaa

SEQ ID NO: 7002 - DNA, 1058 bp, Zea mays
  Zm_smallRNAprecursor_2491
cagaaatgttgcggcacatggagaaaaatgccgcaaacccatggaccaagcgagcacccatcccgcggccacgacctcgaccacgaccacgagcacgtggcatgggagatccgcggccaggagagggacgcgaggcagcagcggggggagaggaggatggatgatggggaggctggcgaggtggctcagtggaggaggcagggcctccagaccgtgagggagcccgcttcgtatgagcagctgggttggaggaatcaacccagtagggtacgtagcgggagtgtttgacgggtttttcgaagtgggtctgggtgaccacttcgatcatcttcatgataaagggtgcatgaagacaccctctgtgaggagaccaggaagcacggacgatctcttcccagatcatgtcaaacacattgatgcgggcgagactgtttggagcaaggaggaggaggaagactcgactctccccaaggacgttcatttgattaccgcccttcgggagaacggtcatccgggacaaagaattaaggtacctgtagtacctatgcatgttagcggttgtccagaactcccgctcagtagagacatgaatgaattccgtctcttcccgcatgggcagccgaatgtcatgcactcgcatgttgctgccctgaatatctgcatcagagaagcccaaaatgtgggcaaaacgacgataactgactttgtgccagttaccctggatgaagaaatacatgactgggtaatcatacccatcggcttcctcatctactttctttatccagagggtggcatagaactgagctaccacctcatcgttccaggggtattccatggtcataatgttccataacccctttctctctaagtttacgagagctgacgacatgtcagcatctcccatattctcacaaccctcccagtcaataaatctatgtcggacgactgggtgtttcttggaaagaatgacagaattgtagaagtcagcctggaaaagattccagaaccgagggtcctggacaccaggatgacgaggagtgagagtagggttggtaaac

SEQ ID NO: 7003 - DNA, 1040 bp, Zea mays
  Zm_smallRNAprecursor_2492
gaaatgaccggtcatgcaggatgcgaccgaataaaaaaaagtggcgcgctgagtggcagaaaaaaaaaagaaaaaactttatctgcgcgccaggggaagtgacaggacagaaaaaaaaatctgcacgaggaagcgactggtcaagaaaaagtgctgcgagacaaaagaaaaggtgcagcgcgactgaaaaaagtgcaggtgacagacctgcgaccggtcaaaaaggtgctgcgcgactgaaaaaagtgcaggtgacagacctgcgcggacaggccggtcagagaccggttcaaccggtccactatgccggttcaaccggttttaaccaggatggtcctggtaaaaactggttaaaaacagctgagctgaagttcagctggcctcctccagctgaactagaaagttcagctggtcaagccagttgagcccaaaaaaaatcttagcactaaaatgcattcaaattttaacattttcaccaagtttttgaaagatcatcacatagctttaaaactatcaatcaaaaatagtgaatcaaacaatttttgtgaccgttttcaagttaagttacgagaatccaagatatttaattcactcctaagaaagcaaaacctagtcccatcgagggttttgtgaagatatcggctagttgattttcggtgctcacatgaaacaattcgatatctcctttggcttcgtggtctctcaagaaatggtgtttgatgtcaatatgtttagttctagagtgttgcacagggttgtttgcaagttttatggcactctcattgtcacacaaaagtggaattttgttaaactcacaaccaaaatctcgaagggtttgcttcatccataacaattgtgcacaacatgccccagctgctatgtactcagcttctgcagtggaaagtgcaacacaattttgtttcttggaactccatgatactaaggatcgcccaaggaattggcaagtcccagtagtgctttttcgatctactttgcaaccgacataatctgagtcagaatagccaagtaaatcgaaaagg

SEQ ID NO: 7004 - DNA, 1172 bp, Zea mays
  Zm_smallRNAprecursor_2493
ttgatttaagattgcaattcttccatgtttctgcagtagcatattgttccatggagctagggtccaaaataggaatcaacaagtgtttccacgactctaccgcccggccaatcctgttccactgaatcccctccctttttcatggccacatatctttacggctaaggagtgggaaatctttctcctgttacacaaatgaggtttcatttcatccgggaaaagccacctctttctccacaaacaatgtctttgtcatttgatccaggagccttccgttagataggaacaactttgctaaatactgagaactctcggatagagtattagaatgaaaagaccattaattatataaggaagagcccagggttctagcccattcccattcctaaatcaataattcgtagtgcttttgcctttcttgcgtactcctggtgaaccagttgctagccatatgtttaggaggcttttttctccaggtactggtactaagccgctttgccatctcttcatcttcatctgcaaagaattctcgacgtgaaaacacagagacaaaggcctgatctttgaataggaaaaagaatggatccgaaggtcccaaatcaattggcttattcgaaaaaagccttcttctttgaaagatatatctcgtgtctggtactgcattgttccactctgcaagaagtccgaatcagtctcttgcacctccccctttttatgataaatataccagaaataattcgaataaatagcagtctctgacaactcatcctctttaatctgcttggacccgctccaatacccataggaaaatccccagtcatattcagcgtacctgtccctgcaatcaaatagattgtcccaagggccccatattctaggagcccaagttatgctattgaaaattcgttcctctagcagttccggtttgaccattccgttccctttttcaaactccacttcttttcatatagcatccctaatcaaagagagaacaatatccatttcaaaacatttctaacggattccttggttcggaccgacaaagtaatggcactcgattattatcaacccgactgcaatctttttctgtcggtgaggattgcaccagagcaccttctacttctaataggccatgaactatagatagagaagaatcattctgagcgagtcca

SEQ ID NO: 7005 - DNA, 1059 bp, Zea mays
  Zm_smallRNAprecursor_2494
atcttaaaccaaacaatcatatctaagagatcgtctcatcttatttgcaactaagcacacctacacgttcattaacatccaccgcacgttcagagattgacaattcagcatttcattaacatccaccacatgttcagagtacgggctgtttaaattcactctcagtgtatcggatttgtggactaaaatcgtcatcgacaaaaggaaagaaaacaagagtagaaagaatgccaatccaaatgccaaattctagtagcattgtagaattgctgtgcacagcagaaggcacaaaactaacaccacctccagaactactagccgaaagaaattaaaacactaccaaatgcacgaagaagagagagagcgagagagagactgacagagagagtgagtgagtgagagagaagaaagagagtttaataaaatttaaatgctaaaacgaaatttacaagctcagaagggatagtcgatacaggagatgagcctatcaccgtggatcagcagccctgcctgcagtgcactaagccagaacctcgcccttgcaaggccaagagcctggcagtcactaacataagggtttccccatcctccatcaagaagacaaagaaattaaacacccattgtgtacggcaggaaagcattataggctcatccaaaagctcatctgggatagcgccatacaagagttcaggaattataggtaataaccaccgccgttgtaatcggcggtcgacaactagggtatgatgatgaagggcatgagagaagggaatggctctgaaacttcatctctagaggaaaagatggaatttaactgactgagctgtgggcagcctcatctcactgccggtggctatttatagccaaaagggtccggtcattagtaccaacggcaatgccacttgtttaccatcttactgtccagaaaatgatcgtacagccgatcgaggtgaatctttgccatccaattggacggcaacaacagttcatgggtggcctaatgcattcgagactacagatacagattggtggaatctcattgcgcacgttagctgtggg

SEQ ID NO: 7006 - DNA, 1153 bp, Zea mays
  Zm_smallRNAprecursor_2495
tgaaaaaactattggcgggcctacaagacaaatgtttggaatttagtaacaaatgtattcaacaactgagaaaaattttccattcagtcggagctagcagtgagaaattcaccccgtcagctgaagatttagcaaagaccttcgaacatattgagggtgaaattgatgagcttgacgaagttatagccgggcacggtgacttctgcgcctgggtagcttctcggggcactgctgcagctttcctaaaagctggctgcgatcatggaaagattgtcaataggcccaatttcactttatcaccatcaattctagatgacattcctgatctcgcccgaagcatttccaatagatttgtaaagatgatatggacaaaaggcgggcgagaaaaggctggagacgaagctcgaagtcatcttgaaccagtaagaaatcataccttgtgcttacctcttccttcaagctcgatttttacttacaacaacttaattcatgtaggatgacgaagccgaagccgatggttaaaaagaatgacgccgaagctgaagtcccttgaagattaaataggagtagactgtagacagactcaaggaacttttgagataacttttgtaaatgtaactgaacttgtctttaatgaattctgttcataccttgtaatatgctcttatccttccattaatgtatgagaggtgctttgatgtggacgaaattatcttttttgagccgaaggcgaaaaaacaccttcccttcttttcgtacacagcgaagcatagaacataacatttccctttcttccgaagctcttcttttcgtacacgaagaagctcttctctctttttttttctttttgccgaagcaaccacttatgctatgatgatgattatcctacatatgcctggatgaatgtttatgaatgcaaatgctatgatgtaatgtgatgtgcaaatgaatgtccaaacacatatccgaagccataatcacagccattatttccttagaaacaatcacatatcagtgctaacttttcgctgtaagctctgcattcccttaggaacgactttggagcttcttcgccttttactttcggcggaatcagcgttgacttttcgctgtaagctctgcattcccttaggaacgactttggagcttcttc

SEQ ID NO: 7007 - DNA, 1133 bp, Zea mays
  Zm_smallRNAprecursor_2496
actatgatatattggtattttcctatgttgtttaaaactacgtttaaacgaagtttaaacatttaaaagtcaaaacttcacccatgagcgtttcaacgttttatcgttttaaggcccgtttggtaaaacgttttaaggcccgtttggtttgagggactaaatattagtccctccattttagtctcatttaatccctaaattgccaaacagtgggactaaaatagggacaagactgtttgtctctagtcccttaaggagtgactgaaagggactaaaccatataaattccattttttgcccctccgctattttagttgcactaatggcgggtgaatgctaaggggtattttagtcctcttatgattcatttaatgtgttttgaatagtttgtttctagaaccaaacagggtagggattaaactttagtcttctaactaaactttagtccctggactaaaggaaccaaacggggccttaataacctggcaacgactgctatgcaagcagtccttctgtgcaagcgtgcaagcaaaccatctaatctattagatcgtgatccaaggtcacatttaacacttaaaccgtagatctgtggttggatcgtaatctaatggatcagatgatttgcttgcacgcttgcacagaaggactgcttgcataacagtcgttgcctaataaaatggagagggttttcctaatccatttgcttttgttgacccaacaccattgacacataactatgtggttagaaagatcaagagctgctcacgcacttgttttacaggctgttccctggggatggacaaacaagcactcttgattcaacaaaccagagccaggccgcagggcctgtccaccctttccatccgaagatagccatcaggcgtggtgtgctgtcggccgagtgctcagagataatgcagcagttcttccagctgaggaggaagaagaaaccacagtcaccaccgcaggcccaccgccatgggcaccatcatcctgtcaagttcttcagcaagatgcaccacatgttcggcacgatattctgtttataacttcgcctctctgttttattttagcttcctaaatttcgtattatggaagtgtgaaaaatgcatttctttctgtgcatctag

SEQ ID NO: 7008 - DNA, 1134 bp, Zea mays
  Zm_smallRNAprecursor_2497
actatgatatattggtattttcctatgttgtttaaaactacgtttaaacgaagtttaaacatttaaaagtcaaaacttcacccatgagcgtttcaacgttttatcgttttaaggcccgtttggtaaaacgttttaaggcccgtttggtttgagggactaaatattagtccctccattttagtctcatttaatccctaaattgccaaacagtgggactaaaatagggacaagactgtttgtctctagtcccttaaggagtgactgaaagggactaaaccatataaattccattttttgcccctccgctattttagttgcactaatggcgggtgaatgctaaggggtattttagtcctcttatgattcatttaatgtgttttgaatagtttgtttctagaaccaaacagggtagggattaaactttagtcttctaactaaactttagtccctggactaaaggaaccaaacggggccttaataacctggcaacgactgctatgcaagcagtccttctgtgcaagcgtgcaagcaaaccatctaatctattagatcgtgatccaaggtcacatttaacacttaaaccgtagatctgtggttggatcgtaatctaatggatcagatgatttgcttgcacgcttgcacagaaggactgcttgcataacagtcgttgcctaataaaatggagagggttttcctaatccatttgcttttgttgacccaacaccattgacacataactatgtggttagaaagatcaagagctgctcacgcacttgttttacaggctgttccctggggatggacaaacaagcactcttgattcaacaaaccagagccaggccgcagggcctgtccaccctttccatccgaagatagccatcaggcgtggtgtgctgtcggccgagtgctcagagataatgcagcagttcttccagctgaggaggaagaagaaaccacagtcaccaccgcaggcccaccgccatgggcaccatcatcctgtcaagttcttcagcaagatgcaccacatgttcggcacgatattctgtttataacttcgcctctctgttttattttagcttcctaaatttcgtattatggaagtgtgaaaaatgcatttctttctgtgcatctagt

SEQ ID NO: 7009 - DNA, 1131 bp, Zea mays
  Zm_smallRNAprecursor_2498
ctatgatatattggtattttcctatgttgtttaaaactacgtttaaacgaagtttaaacatttaaaagtcaaaacttcacccatgagcgtttcaacgttttatcgttttaaggcccgtttggtaaaacgttttaaggcccgtttggtttgagggactaaatattagtccctccattttagtctcatttaatccctaaattgccaaacagtgggactaaaatagggacaagactgtttgtctctagtcccttaaggagtgactgaaagggactaaaccatataaattccattttttgcccctccgctattttagttgcactaatggcgggtgaatgctaaggggtattttagtcctcttatgattcatttaatgtgttttgaatagtttgtttctagaaccaaacagggtagggattaaactttagtcttctaactaaactttagtccctggactaaaggaaccaaacggggccttaataacctggcaacgactgctatgcaagcagtccttctgtgcaagcgtgcaagcaaaccatctaatctattagatcgtgatccaaggtcacatttaacacttaaaccgtagatctgtggttggatcgtaatctaatggatcagatgatttgcttgcacgcttgcacagaaggactgcttgcataacagtcgttgcctaataaaatggagagggttttcctaatccatttgcttttgttgacccaacaccattgacacataactatgtggttagaaagatcaagagctgctcacgcacttgttttacaggctgttccctggggatggacaaacaagcactcttgattcaacaaaccagagccaggccgcagggcctgtccaccctttccatccgaagatagccatcaggcgtggtgtgctgtcggccgagtgctcagagataatgcagcagttcttccagctgaggaggaagaagaaaccacagtcaccaccgcaggcccaccgccatgggcaccatcatcctgtcaagttcttcagcaagatgcaccacatgttcggcacgatattctgtttataacttcgcctctctgttttattttagcttcctaaatttcgtattatggaagtgtgaaaaatgcatttctttctgtgcatcta

SEQ ID NO: 7010 - DNA, 1132 bp, Zea mays
  Zm_smallRNAprecursor_2499
ctatgatatattggtattttcctatgttgtttaaaactacgtttaaacgaagtttaaacatttaaaagtcaaaacttcacccatgagcgtttcaacgttttatcgttttaaggcccgtttggtaaaacgttttaaggcccgtttggtttgagggactaaatattagtccctccattttagtctcatttaatccctaaattgccaaacagtgggactaaaatagggacaagactgtttgtctctagtcccttaaggagtgactgaaagggactaaaccatataaattccattttttgcccctccgctattttagttgcactaatggcgggtgaatgctaaggggtattttagtcctcttatgattcatttaatgtgttttgaatagtttgtttctagaaccaaacagggtagggattaaactttagtcttctaactaaactttagtccctggactaaaggaaccaaacggggccttaataacctggcaacgactgctatgcaagcagtccttctgtgcaagcgtgcaagcaaaccatctaatctattagatcgtgatccaaggtcacatttaacacttaaaccgtagatctgtggttggatcgtaatctaatggatcagatgatttgcttgcacgcttgcacagaaggactgcttgcataacagtcgttgcctaataaaatggagagggttttcctaatccatttgcttttgttgacccaacaccattgacacataactatgtggttagaaagatcaagagctgctcacgcacttgttttacaggctgttccctggggatggacaaacaagcactcttgattcaacaaaccagagccaggccgcagggcctgtccaccctttccatccgaagatagccatcaggcgtggtgtgctgtcggccgagtgctcagagataatgcagcagttcttccagctgaggaggaagaagaaaccacagtcaccaccgcaggcccaccgccatgggcaccatcatcctgtcaagttcttcagcaagatgcaccacatgttcggcacgatattctgtttataacttcgcctctctgttttattttagcttcctaaatttcgtattatggaagtgtgaaaaatgcatttctttctgtgcatctag

SEQ ID NO: 7011 - DNA, 1130 bp, Zea mays
  Zm_smallRNAprecursor_2500
tatgatatattggtattttcctatgttgtttaaaactacgtttaaacgaagtttaaacatttaaaagtcaaaacttcacccatgagcgtttcaacgttttatcgttttaaggcccgtttggtaaaacgttttaaggcccgtttggtttgagggactaaatattagtccctccattttagtctcatttaatccctaaattgccaaacagtgggactaaaatagggacaagactgtttgtctctagtcccttaaggagtgactgaaagggactaaaccatataaattccattttttgcccctccgctattttagttgcactaatggcgggtgaatgctaaggggtattttagtcctcttatgattcatttaatgtgttttgaatagtttgtttctagaaccaaacagggtagggattaaactttagtcttctaactaaactttagtccctggactaaaggaaccaaacggggccttaataacctggcaacgactgctatgcaagcagtccttctgtgcaagcgtgcaagcaaaccatctaatctattagatcgtgatccaaggtcacatttaacacttaaaccgtagatctgtggttggatcgtaatctaatggatcagatgatttgcttgcacgcttgcacagaaggactgcttgcataacagtcgttgcctaataaaatggagagggttttcctaatccatttgcttttgttgacccaacaccattgacacataactatgtggttagaaagatcaagagctgctcacgcacttgttttacaggctgttccctggggatggacaaacaagcactcttgattcaacaaaccagagccaggccgcagggcctgtccaccctttccatccgaagatagccatcaggcgtggtgtgctgtcggccgagtgctcagagataatgcagcagttcttccagctgaggaggaagaagaaaccacagtcaccaccgcaggcccaccgccatgggcaccatcatcctgtcaagttcttcagcaagatgcaccacatgttcggcacgatattctgtttataacttcgcctctctgttttattttagcttcctaaatttcgtattatggaagtgtgaaaaatgcatttctttctgtgcatcta

SEQ ID NO: 7012 - DNA, 1171 bp, Zea mays
  Zm_smallRNAprecursor_2501
agcggagtggctctccaaaaacccgaagctgagcagttcagagttgatctccctggtgcaccggacactgtccagtggcacaccggattgtccggtgcgccagaccagggcagtcttcggatggttttgcttctttctttttgaactctatcttggactttttattggtttgtgttgaacctttggcacctttagaacttataatctagagcaaactagttagtccaattatttgtgtagggcaatttaaccaccaaaatcatttaggaaaaggtttgaccctatttccctttcacatagtccatttgagaaactcattctcatgttgcgaaactacgtaaatcacatagacaaaaagcattagtttcacaactctagttatatagagaattccccttttgataagtgatttaagaattcaaatttcttacttagcaccttattcatttaagaattcgggatttctctttatgccttgatcatggcaataatagtgtaatcaaattgaaatgtgccaagaaatacttacaaccaatttaagcatttagattgccatatttttaaaaataagattatgcaatatgttatatgataaactcaattttgatcatctttggttttgatcttcaacttggaataccaaaataagtgcaaaatatttctcgaccaatatccttgtaccccttcactttccatgattatagatcaattcaaaaccaaatttaggtctctcaaatacttgaaataatttatcctttatgagagccttccaatcaaggtgactttcaatatttcaaataattgtcacttgatgacagattttgtttactttaaagaaacatccataaatcttgatgtacagatcctatgaccacaaaaattggtggagatgtgtttttataagtccactaacagctgtaaaaagttgaaactcatttgacttcatgtgtgctgccagcaacaacgtataacacagtaggtacatgctgaaaactgctgagtttgtgttgataagattgacttcaccaagaagtttcacttatccaatgatcatgaaatttgcacagactttgctatcatatgtgtagatcatgtaatatgaatttcaagccaatgcaattagatttgatcgctcaaacatggctatgatcacaacttggtcaattttcaa

SEQ ID NO: 7013 - DNA, 1145 bp, Zea mays
  Zm_smallRNAprecursor_2502
aggtctggcgaatcctcttcccaactggcctggaatgagatccagaaaaggacctggcaagagatacgtctgtcttgttgtgatgcgaggaataggcgaatctgtcgtgatagaaaacaaccctttgttgctatgctaatggatctgctcagggaactggccagggttcagttgaagacaggaatggaaatgtttcccaactagagctacggcacttttccaataaacggaagctcaagccaagcctaaagcgaagcatccgcctcctctttactagcgagtctagtttcctacagggcaagggcgtagactggtttcgagtcctataggaggatcaaagtattagagctcaagtagttctcttacgacctagtcaatacgcattggaatcatggcatcccctccaccgtagtaaagtaagaagtaacgggtctacgcccagcttccttgttccggaaatgaaggatccatgcagaagtggactctctttccgttctgttcaaagagttggcctggtattctagttactctagacctattcccttcgaaatagaaactcttgccagagctgagtagaaatcatcattaccgccgcatttactatactagactagcgcctaagatagctataaacatggtatgtcttagagcgatatgagtattctttaccagcaccacccagggatccaaccacaatcagaaatggatacgttatagtttccatccttgactttactagtcctataaccggcatccaagcaaatagacttgtctttctctttctctttttccctagtccctagtaataggagatccttcctgttctggatatgtcctctattccatccggtttggacacagattgtcaacggtgaggtgacatgaccttgatcaatagatcccttactctggtccctagttccttacctatttgatagggaagcgtttcgatatcacctaccatgaactcagatggtgtttgctgacgaaagaaaaaggctggttttggcccatagtgagcagcactggcactcaaaagggatccttccgcctgccgggaataagtaccggcacccttacaggaatcaaatctcttggaacgagatcaagggccgaaggaagtcaactgcgaatcggttcggtag

SEQ ID NO: 7014 - DNA, 1063 bp, Zea mays; identical to SEQ ID NO: 6190
  Zm_smallRNAprecursor_2503

SEQ ID NO: 7015 - DNA, 1048 bp, Zea mays
  Zm_smallRNAprecursor_2504
ttggttacaagaaacaaggcaaggctagttgctcaaggtttcactcaagtggaaggacttgattttggtgaaacctatgcaccagtagcaaggttagagtccataagaatattaattgcctatgctactaaccatgatttcaaattgtatcaaatggatgtcaaaagtgctttcctaaatggaccactgcgagagttggtctatgtggagcaaccaccgggctttgaagatcctaagaagccaaaccatgtctaccttcttcacaaagcgctctatgggcttaaacaagctcctagagcatggtatgaatgtcttaaagatttcttgcttaaaaatggttttgaaataggaaaagtagactctactttattcactcgtaaagttgacaatcaattatttgtttgtcaaatatatgtcgacgacattatatttggcagtactgatgaaactttctgtgaggaatttagtagggttatgacaaataggtttgagatgtccatgatgggtgagctcaagtacttcctgggttttcaagttaaacaactcaaggaaggaacctttctgtgccaaaccaagtacacacaagacatgctcaaaaagtttggcatggaaaaggcaaagcacgccgagacaccaatggcttcaagtggtcatctcgacttaaatgaagaaggtaaaactgtagatcaaaagctttatagatcaatgataggatctctactatatttatgtgcatctaggccagatatcatgcttagtgtgtgcatgtgtgcccgttttcaagctaacccaaaagagtgtcacttagtggcagttaagagaattttgagatatctagttcacacccaaaatctaggtctttggtatcctaagggctcctttttcgatttatttggctactctgattcagactatgccggttgtaaagtagatcgaaaaagcacctcggggacttgccaattccttgggcggtccctggtgtcttggagctctaagaagcaaaactgtgttgcactttccactgccgaggccgaatacataactgctg

SEQ ID NO: 7016 - DNA, 1076 bp, Zea mays
  Zm_smallRNAprecursor_2505
gcatatttctgtcgtagacagtaatctagtggacttcaaaaattcatatctcagaacctactgcaccaaaattgacgtttaagcattctatggagagataaaaacacgccttacaaattactccatagtggttagaacaaactaggtcttaaactaactcaaaatgtgccgaaactgctactaccccaactgaacagaccaaactgaatcgattcttgccagttcctaacgattgcatataatgcaacgaaacagcagggcgataaggcaaggattaactcgcgcattacataagggaaacaaaatttctattccttttctcctccccattcgtcgttcatccttcctgcaacaccatgtccggcaccaacacaatggaaaagcaaatagggatatattgagatggggaaggactagctccccatagagacaggaagtggcgatctagagaggagcactacagtaaactaacaaaaatccgacggtcaatttatctccgacggctgtctacgatgccgtcggacatagagttatgtccgacggccaccaagaactctcggaaataccgacttacctccgacggctaccctgacagccgtcggacataatcttatgtccgacggcctcgtacgtagccgtcggacattggcttatgtccgacggcatcgtacgtagccgtcggaggtaaggttttttaacacggctagcccggagcgcgcttcatttttcatgcgcgctcgctctctcctctcttctctctgcccgtcgccgccgccgccgtgctgtcaccgcccgtcgccgccgccgccccgcccacccgccgtcgacccccgccgcgagccccgtcaccgcccgtcaccgcccggcgccgccgccgccccgctcgcccgccgtcgacacccgccgcccgccccccgtcgacacccgctgccggccgccactgccctgcccactgctaagtaagtatttttatttttattttgtagtttctactgttgttattaaattattagtatgttaaataatatttatcttattatatccgagggcctaaatttgattatatggcgaaattt

SEQ ID NO: 7017 - DNA, 1127 bp, Zea mays
  Zm_smallRNAprecursor_2506
atgcttatccaatgcccaccacatgagattcctaggtattttaccataggccttttccaagtcgataaaaaccatgtgcaagtccttcttctgctccttatatcgctccatgacatgccttattaagaaaattgctttcatggttgaccttccaggcattaacccaaattggttcatggtgatatgtgtcattcctattaggcgatgctcaataactctctcccatagcttcatagtgtggctcatgagcttaatccctcgatagttggtacaactttgaatatctcccttgttcttgaagattggtactaatgtactcctccactcatcgggcatcctgtttgatcgaaaaatatggttgaacaatttgattagccaaacgatagcaatatccccaaggcatttccacacctctattgggataccatccaggcccatcgccttgccccctttcatcctctttaaagcttctttgacctctgattcttagatcctgtgtacaaagcatctatttaaatcatcgaaggagtcatccaattggatgtccatagtctcattctcgccattgaaaagattatcaaaatacatcttccacatctgtttgatgtcttgacctttcaccaagagttgatccatctcatccttaatgcatttaacttggttgaggtccctcatctttcgttctgaaagtcgcctagacgggggtgaataggtgaaacctaaaatttataaactttaagcacacactaaggccgagttagcgttagaaataaatcagagttcaaaggatagttctccttgcttagagttgctcaatcaatgcggatagcatttgggagcaaactcaaatcaatatgagcaagggaacgttagagagaggaaagaggggaaacaaatcaagtgaagatcaatgcaagtgaacacaatgatttgtttaccgaggtttggttccaaagaacctagtccccgttgaagaggccacaaaggccgggtctattccaaccctttccctctctcaatcggtcacaaagaccggtcgaggcttctccttaatcacttgggtcactaagaccccacaaggatcaccacacacttaggtgtctcttgctatctttacaaagcactta

SEQ ID NO: 7018 - DNA, 1150 bp, Zea mays
  Zm_smallRNAprecursor_2507
tgaaaaaactattggcgggccttcaagaaaaatgtttggaatttagcaacaaatgtattcaacgactaagaaaaattttccactcagttggagccagcagtgataaattcaccccatcagctgaagatttaccaaagaccttcgaacatattgagggtgaaattgatgagcttgacgaagttattgccgggcacggtgacttctgtgcttgggtagcttctcggggcactgctgcagctttcctaaaagctggctgcgatcatggaaagattgtcaataggcccaatttcactttatcaccatcaatcctagatgacattcctgatctcgcccgaagtatttccaatagatttgtaaagatgatatggacaaaaggcgggcgagaaaaagctggagacgaagctcggagtcatcttgaaccagtaagaagtcataccttgtacttgcctcttccttcaagctcgatttttacttacaacaacttaattcatgtaggatgacgaagccgaagccgatggttaagaatgacgccgaagctgaagtcccttgaagattaaataggagtggactgtagacagactcaagaaacttttgagataacttttgtaaatgtaactaaacttgactttaatgaattttgttcataccttgtaatatgctcttatccttccattaatgtatgagaggtgctttgatgtggacgaaattatctttttgagccgaaggcgaaaaaaacaccttcccttcttttcgtacacagcgaagcatagaaaacaacatttccctttcttccgaagctctcctttttgtacacgaagaagctcttctctcttttttttctttttgccgaagcaaccacttatgccatgatgatgattatcctacatatgcctggatgaatgtttatgaatgcaaatgctatgatgtaatgtgatgtgcaaatgaatgtccaaacacatatccgaagccatactcacagccattatttccttagaaacaatcacacatcagctctgcattcccttaggaacgactttggagcttcttcgccttttacttttggcgaaatcagcgttgacttttcgctgtaagctctgcattcccttaggaacgactttggagcttcttcgccttttactttcggcggaat

SEQ ID NO: 7019 - DNA, 1201 bp, Zea mays
  Zm_smallRNAprecursor_2508
ttgtaacattctgccaaaaaaggtgagtgaattctgttacatagatgccgttctcaacctctttgaaacacgcatccacgaaaagtgtgtccaatacatcaggccatgccatgtccaacggatccctccaacctaaaatggaaaaaaagatgcaagcagtttaaccatctgttctgaaagtattgtatggatttctgcaagcaaatcgtgtatcggtgttccagggtgatatgtcatcccttgcgccccaacaattttaaacaatggtcagagaagtgaaacacaaaatattacaactatttcttggactgggcaattattgattatgtgctgagacaaagctgacactcgatacttctgtagcaagcaatcctattaagtgctttataatttaccactggattccaatattccacaagaaccaagaaccctaggacccaagaaccctacttcgtggtcagcagatgcgaaggaagaggaggtacctgtcaatcgactggaccgacaaggtgaagaccgagtcaaacgagaactgcaaccggcgatgcgacgactgaacctcaccaaagagccaccaccgatccagcaagaatatgggccgactatgtgtcggctgtattggtaagaaaatttgccggcaatgcgtcggctggatctccgcgcatggccactgtcgttcgggcgcggaccagaggactcgcccttgcccttcatttgttgggggagagaatggagggagggggagaacttcaatgcaggcagtgaaggccagaaggggcacgcgggcggctgtagccagtgactcagagcaatggcgattagacaggctcgggggcagcgactcggaggcagaggactcggctggatctccgcgcatggccactgccgtccaggcccggaccagaggactcgcccttcatttgttgggggagagaatggaggttggagggaggggcagaacttcaatgcgggcagtgaaggccagaaaggggcacgccggcggcggcgacagcggagaccgaggtgttctgtgcagtggctaaatttatcaaacgcttaggctgactccaacaatgttgcatatcggagaggcgcgcgcgagagagatgggcctgttgggctcatttcttctgtatgggtggcctatcttctcgacaggcaaaaacaacaccgccccactgcctggctacccatcttcttc

SEQ ID NO: 7020 - DNA, 1133 bp, Zea mays
  Zm_smallRNAprecursor_2509
aggatcgagttttctggtgtcggtcttgctgctgagctcagaggacttggaatttcctcttgagatgacctttttcttcttctttcgccctttctacttgcatggctttgttggagaggtacgagaaactgaggaagtcttggctggctaggatggtcttgagttggtttgagcccttttaggaagcgggccatcttcttgacttcggtgccgacgtcatccggcacgtagcgggccaactccgtgaacttgtgcacatattcactgacagatcttccgtcttgagtcaattctcggaattcatcttccttgagttgaacgatcccttggggcacatggtgctcccggaaagccgtttcaaactccgcccaggtagcatctctgatggtgacattgaaggtatcccaccaggctaaggccatcccggaaagttgatgagcagccagttgaacacgctgattccgggcatccgattgcttccagctttcttttaattgtgcgcagccaatcgtcagcatcgaggggattgctagatctggcaaacgtgggaggcttgagcctcaggaagtctcccattctgtcttgtggtcttccaccattcggacgttgattttccagacttcgagtgaggacctcgatgagtcgggtttggttggctagaacttgggctagatctaagggtagttctggaggtgcggggaggtgggtctcactttcctctctaccggcttcccttttagctctcaggggaaaccctgctccaatcccggaggcggtaggcgtggttttatccgaagccatctgccaggggggagagagtcactattatgcacatgccaattgttttcaaccaagttattttattcattacaccaatacattacaagcatatggctactacaagtcgtactacacgcgagcgttctcagaggtactcccgaactcttttttctaaagtgtccccaaattccttgagaaggtcatcaaggctagctagggacatatcctcgacgtcggacaaattctctatcctggcgggagttggtgctggaggggcctttttcctccgctcagcttggcctccttggttcttggtcttcttttggattttcttcgtgggggcgagcttcttc

SEQ ID NO: 7021 - DNA, 1132 bp, Zea mays
  Zm_smallRNAprecursor_2510
tagaaggggattgaatggaataggagaggattgaggaagaaataaactaatttatctctcaatctcttcgaatccctttctaactaaataaactgctttaaatgataaacaatacctctatcctaaaatataataattcgttttagattaattatataccaatggagtttgtatatatatctatattaattatcatttgaatgtatatgaacagaaaaaatgggctagaagtaactatattttaggagaacggaggaagtaccaagttaacattagtttgaagggatataacgcttttcctgctgtgcagctaagagcctgaggccgacggcaatactgtgttgttcatgtgctgcctgcctcgcgcgctgagaccaactatttatgctatgaggacataaaaccgtcctctctcacacagtgccaatcatcacactcgtggattgtgtggtgacgtgtagacaaatatacgtcaagttgcattctcacaactagggtcagatatcgagctagtatggctcggctcatccgaattcgaactagcttgttaaactaacgagcttgctcggctcattaaactaatgagctatagagtcagttcggtttggctcgactcgtttacgagcttgagctagctcgtttagctcgcgataataatcaatttctatttaatttcaaactaatttaacaataaaaaataataattatactcataatttcacataccacatcaatgtaacaccaaattaacataacttatcacttatcaattcacaaacatgttcatcagtttaactcacaattatatttgcatatatcaatttaacacaaaaataattcattaatcattagtttaactcataaaccatagaaaccatactgtggccctgacctaaattaatattcaataatagtcaatgctaaaggtccactttaatgctacggtgtattaatattttagtatcataccgaaagttcaaggaacaaatcaatcaacttaaataagtggaccattgttgcatctattgagaagttgagaaaaggataaaggactaccacacgcgcatgctgccggctgggccgtggctgaggccgtggtaaattggaccttgattcgaatattccttcctaa

SEQ ID NO: 7022 - DNA, 1081 bp, Zea mays
  Zm_smallRNAprecursor_2511
aatctctattttcctgtgtatgatatcctaatttaaaacgcaccgaagcaaaggtggatagaagcctagctactaactgaatctttgcaaatatacaggcaaacgcaaagaaaaaacaattgttggtttgaaaaactgaatatttgacatgtatccgccgttcaatttctgcttgtggttaagcattaaactttctttagtagaaagagatgggaaaaaacgaatgagtaatagtatacattctaaagcctgcattaccagcttatctgcctgatgacttgcccggtgaaaaccagcagctacctaatgccaacacattaacacaaattgctagttcagagactgtttttcccctgacaaaccatgaagcatacacgaatcctactgctgtggcatgcatgatgcttggttcagttaataaagattaaacaagcacataccggcgaaggaattcattgtccggagcctccacggtgctttgccgcccttcgctggttgcgagagagtgaagctgcaacatgatctggtgaagcgccaccgatcgagcacttgggaggccggcggcgtttgagcagccagatcatgctggcagcttcaagctctcacaccagcgaagtgttctttcttccccacccggatttgggactcccagacgagcagaagaggagtgaggagagcatatgtgcagctaaagttttggcgtgtgcgaaggcaaggggacggcgggaggacgagacgaaatcagagcacgactgcgcgagccatgcacggacggaggttgcattggaggctgttaagcagagcactgaatacataaatacatgcatgcatggtccctcgcgcgcccacccgggcagcgggcactccccctcctcgtgacgctgccgttttgcccgagccaagcgctgtcgtgctcgctgcgtctgcacgtattcgtatgcgtctctgttgtgtagcctgtcctcgcgttggtagcctagctgtgccctggcatgggcagctcggcaccagctgattcttgcgacctctcgatgcaactaaaacagcctgttctgattgcaagcaacgtctctttcctcct

SEQ ID NO: 7023 - DNA, 1072 bp, Zea mays
  Zm_smallRNAprecursor_2512
tctattttcctgtgtatgatatcctaatttaaaacgcaccgaagcaaaggtggatagaagcctagctactaactgaatctttgcaaatatacaggcaaacgcaaagaaaaaacaattgttggtttgaaaaactgaatatttgacatgtatccgccgttcaatttctgcttgtggttaagcattaaactttctttagtagaaagagatgggaaaaaacgaatgagtaatagtatacattctaaagcctgcattaccagcttatctgcctgatgacttgcccggtgaaaaccagcagctacctaatgccaacacattaacacaaattgctagttcagagactgtttttcccctgacaaaccatgaagcatacacgaatcctactgctgtggcatgcatgatgcttggttcagttaataaagattaaacaagcacataccggcgaaggaattcattgtccggagcctccacggtgctttgccgcccttcgctggttgcgagagagtgaagctgcaacatgatctggtgaagcgccaccgatcgagcacttgggaggccggcggcgtttgagcagccagatcatgctggcagcttcaagctctcacaccagcgaagtgttctttcttccccacccggatttgggactcccagacgagcagaagaggagtgaggagagcatatgtgcagctaaagttttggcgtgtgcgaaggcaaggggacggcgggaggacgagacgaaatcagagcacgactgcgcgagccatgcacggacggaggttgcattggaggctgttaagcagagcactgaatacataaatacatgcatgcatggtccctcgcgcgcccacccgggcagcgggcactccccctcctcgtgacgctgccgttttgcccgagccaagcgctgtcgtgctcgctgcgtctgcacgtattcgtatgcgtctctgttgtgtagcctgtcctcgcgttggtagcctagctgtgccctggcatgggcagctcggcaccagctgattcttgcgacctctcgatgcaactaaaacagcctgttctgattgcaagcaacgtctctttc

SEQ ID NO: 7024 - DNA, 1072 bp, Zea mays; identical to SEQ ID NO: 7023
  Zm_smallRNAprecursor_2513

SEQ ID NO: 7025 - DNA, 1073 bp, Zea mays
  Zm_smallRNAprecursor_2514
tctattttcctgtgtatgatatcctaatttaaaacgcaccgaagcaaaggtggatagaagcctagctactaactgaatctttgcaaatatacaggcaaacgcaaagaaaaaacaattgttggtttgaaaaactgaatatttgacatgtatccgccgttcaatttctgcttgtggttaagcattaaactttctttagtagaaagagatgggaaaaaacgaatgagtaatagtatacattctaaagcctgcattaccagcttatctgcctgatgacttgcccggtgaaaaccagcagctacctaatgccaacacattaacacaaattgctagttcagagactgtttttcccctgacaaaccatgaagcatacacgaatcctactgctgtggcatgcatgatgcttggttcagttaataaagattaaacaagcacataccggcgaaggaattcattgtccggagcctccacggtgctttgccgcccttcgctggttgcgagagagtgaagctgcaacatgatctggtgaagcgccaccgatcgagcacttgggaggccggcggcgtttgagcagccagatcatgctggcagcttcaagctctcacaccagcgaagtgttctttcttccccacccggatttgggactcccagacgagcagaagaggagtgaggagagcatatgtgcagctaaagttttggcgtgtgcgaaggcaaggggacggcgggaggacgagacgaaatcagagcacgactgcgcgagccatgcacggacggaggttgcattggaggctgttaagcagagcactgaatacataaatacatgcatgcatggtccctcgcgcgcccacccgggcagcgggcactccccctcctcgtgacgctgccgttttgcccgagccaagcgctgtcgtgctcgctgcgtctgcacgtattcgtatgcgtctctgttgtgtagcctgtcctcgcgttggtagcctagctgtgccctggcatgggcagctcggcaccagctgattcttgcgacctctcgatgcaactaaaacagcctgttctgattgcaagcaacgtctctttcc

SEQ ID NO: 7026 - DNA, 1073 bp, Zea mays; identical to SEQ ID NO: 7025
  Zm_smallRNAprecursor_2515

SEQ ID NO: 7027 - DNA, 1073 bp, Zea mays; identical to SEQ ID NO: 7025
  Zm_smallRNAprecursor_2516

SEQ ID NO: 7028 - DNA, 1073 bp, Zea mays; identical to SEQ ID NO: 7025
  Zm_smallRNAprecursor_2517

SEQ ID NO: 7029 - DNA, 1074 bp, Zea mays
  Zm_smallRNAprecursor_2518
tctattttcctgtgtatgatatcctaatttaaaacgcaccgaagcaaaggtggatagaagcctagctactaactgaatctttgcaaatatacaggcaaacgcaaagaaaaaacaattgttggtttgaaaaactgaatatttgacatgtatccgccgttcaatttctgcttgtggttaagcattaaactttctttagtagaaagagatgggaaaaaacgaatgagtaatagtatacattctaaagcctgcattaccagcttatctgcctgatgacttgcccggtgaaaaccagcagctacctaatgccaacacattaacacaaattgctagttcagagactgtttttcccctgacaaaccatgaagcatacacgaatcctactgctgtggcatgcatgatgcttggttcagttaataaagattaaacaagcacataccggcgaaggaattcattgtccggagcctccacggtgctttgccgcccttcgctggttgcgagagagtgaagctgcaacatgatctggtgaagcgccaccgatcgagcacttgggaggccggcggcgtttgagcagccagatcatgctggcagcttcaagctctcacaccagcgaagtgttctttcttccccacccggatttgggactcccagacgagcagaagaggagtgaggagagcatatgtgcagctaaagttttggcgtgtgcgaaggcaaggggacggcgggaggacgagacgaaatcagagcacgactgcgcgagccatgcacggacggaggttgcattggaggctgttaagcagagcactgaatacataaatacatgcatgcatggtccctcgcgcgcccacccgggcagcgggcactccccctcctcgtgacgctgccgttttgcccgagccaagcgctgtcgtgctcgctgcgtctgcacgtattcgtatgcgtctctgttgtgtagcctgtcctcgcgttggtagcctagctgtgccctggcatgggcagctcggcaccagctgattcttgcgacctctcgatgcaactaaaacagcctgttctgattgcaagcaacgtctctttcct

SEQ ID NO: 7030 - DNA, 1071 bp, Zea mays
  Zm_smallRNAprecursor_2519
ctattttcctgtgtatgatatcctaatttaaaacgcaccgaagcaaaggtggatagaagcctagctactaactgaatctttgcaaatatacaggcaaacgcaaagaaaaaacaattgttggtttgaaaaactgaatatttgacatgtatccgccgttcaatttctgcttgtggttaagcattaaactttctttagtagaaagagatgggaaaaaacgaatgagtaatagtatacattctaaagcctgcattaccagcttatctgcctgatgacttgcccggtgaaaaccagcagctacctaatgccaacacattaacacaaattgctagttcagagactgtttttcccctgacaaaccatgaagcatacacgaatcctactgctgtggcatgcatgatgcttggttcagttaataaagattaaacaagcacataccggcgaaggaattcattgtccggagcctccacggtgctttgccgcccttcgctggttgcgagagagtgaagctgcaacatgatctggtgaagcgccaccgatcgagcacttgggaggccggcggcgtttgagcagccagatcatgctggcagcttcaagctctcacaccagcgaagtgttctttcttccccacccggatttgggactcccagacgagcagaagaggagtgaggagagcatatgtgcagctaaagttttggcgtgtgcgaaggcaaggggacggcgggaggacgagacgaaatcagagcacgactgcgcgagccatgcacggacggaggttgcattggaggctgttaagcagagcactgaatacataaatacatgcatgcatggtccctcgcgcgcccacccgggcagcgggcactccccctcctcgtgacgctgccgttttgcccgagccaagcgctgtcgtgctcgctgcgtctgcacgtattcgtatgcgtctctgttgtgtagcctgtcctcgcgttggtagcctagctgtgccctggcatgggcagctcggcaccagctgattcttgcgacctctcgatgcaactaaaacagcctgttctgattgcaagcaacgtctctttc

SEQ ID NO: 7031 - DNA, 1071 bp, Zea mays; identical to SEQ ID NO: 7030
  Zm_smallRNAprecursor_2520

SEQ ID NO: 7032 - DNA, 1072 bp, Zea mays
  Zm_smallRNAprecursor_2521
ctattttcctgtgtatgatatcctaatttaaaacgcaccgaagcaaaggtggatagaagcctagctactaactgaatctttgcaaatatacaggcaaacgcaaagaaaaaacaattgttggtttgaaaaactgaatatttgacatgtatccgccgttcaatttctgcttgtggttaagcattaaactttctttagtagaaagagatgggaaaaaacgaatgagtaatagtatacattctaaagcctgcattaccagcttatctgcctgatgacttgcccggtgaaaaccagcagctacctaatgccaacacattaacacaaattgctagttcagagactgtttttcccctgacaaaccatgaagcatacacgaatcctactgctgtggcatgcatgatgcttggttcagttaataaagattaaacaagcacataccggcgaaggaattcattgtccggagcctccacggtgctttgccgcccttcgctggttgcgagagagtgaagctgcaacatgatctggtgaagcgccaccgatcgagcacttgggaggccggcggcgtttgagcagccagatcatgctggcagcttcaagctctcacaccagcgaagtgttctttcttccccacccggatttgggactcccagacgagcagaagaggagtgaggagagcatatgtgcagctaaagttttggcgtgtgcgaaggcaaggggacggcgggaggacgagacgaaatcagagcacgactgcgcgagccatgcacggacggaggttgcattggaggctgttaagcagagcactgaatacataaatacatgcatgcatggtccctcgcgcgcccacccgggcagcgggcactccccctcctcgtgacgctgccgttttgcccgagccaagcgctgtcgtgctcgctgcgtctgcacgtattcgtatgcgtctctgttgtgtagcctgtcctcgcgttggtagcctagctgtgccctggcatgggcagctcggcaccagctgattcttgcgacctctcgatgcaactaaaacagcctgttctgattgcaagcaacgtctctttcc

SEQ ID NO: 7033 - DNA, 1072 bp, Zea mays; identical to SEQ ID NO: 7032
  Zm_smallRNAprecursor_2522

SEQ ID NO: 7034 - DNA, 1070 bp, Zea mays
  Zm_smallRNAprecursor_2523
tattttcctgtgtatgatatcctaatttaaaacgcaccgaagcaaaggtggatagaagcctagctactaactgaatctttgcaaatatacaggcaaacgcaaagaaaaaacaattgttggtttgaaaaactgaatatttgacatgtatccgccgttcaatttctgcttgtggttaagcattaaactttctttagtagaaagagatgggaaaaaacgaatgagtaatagtatacattctaaagcctgcattaccagcttatctgcctgatgacttgcccggtgaaaaccagcagctacctaatgccaacacattaacacaaattgctagttcagagactgtttttcccctgacaaaccatgaagcatacacgaatcctactgctgtggcatgcatgatgcttggttcagttaataaagattaaacaagcacataccggcgaaggaattcattgtccggagcctccacggtgctttgccgcccttcgctggttgcgagagagtgaagctgcaacatgatctggtgaagcgccaccgatcgagcacttgggaggccggcggcgtttgagcagccagatcatgctggcagcttcaagctctcacaccagcgaagtgttctttcttccccacccggatttgggactcccagacgagcagaagaggagtgaggagagcatatgtgcagctaaagttttggcgtgtgcgaaggcaaggggacggcgggaggacgagacgaaatcagagcacgactgcgcgagccatgcacggacggaggttgcattggaggctgttaagcagagcactgaatacataaatacatgcatgcatggtccctcgcgcgcccacccgggcagcgggcactccccctcctcgtgacgctgccgttttgcccgagccaagcgctgtcgtgctcgctgcgtctgcacgtattcgtatgcgtctctgttgtgtagcctgtcctcgcgttggtagcctagctgtgccctggcatgggcagctcggcaccagctgattcttgcgacctctcgatgcaactaaaacagcctgttctgattgcaagcaacgtctctttc

SEQ ID NO: 7035 - DNA, 1070 bp, Zea mays; identical to SEQ ID NO: 7034
  Zm_smallRNAprecursor_2524

SEQ ID NO: 7036 - DNA, 1040 bp, Zea mays
  Zm_smallRNAprecursor_2525
atgggtttgcggcatttttctctatgtgccgcaacatttctgctgatgtccatgaggtggcaaggcgtcagcgggagactgacgacaatcttcgtcgtcaagcttccactatgggtgtgccctttgcccctcgctcgcctgacgtgcctctccatcctcctcccccggagatcaatgagtggcaccagcaggcctacggagtgccatttatgtcagcagacgacgaagaagaagcctatgttgatgatcgcgagcagtttgccccgcctccctaccatggggatccgggtcaatcatcctctcaccctccgcctccctacccgggtccgggacccattcctggtgaccctaggccatccggctctggttaccatcaccacccttcacctcctcctgatcatcgtacatcttcggcatctattttttctgcggctgatgagccacctcgggactccacatttgaggaggacgtgatgaggaccctcttccctgactacacttcataccctccatcatatcctccgtcatatcctcctcctggaggatattgattcatgtatccttgtctctctcttcgtttttggtacttgttgccaaaaagggggagaaaatcctacttctagtttgtggttcttttggattatttttgttttggccactgttgtggcttgtatcctcttaccattgtatgaaataaaactgttgagttgttattcaaagtaatatgatggtcttctggacatcatcttttgtcctatcagtttgtaatgattactttgctatgaagtaaaaatgatgtgtatttagagatagtcatgtgcatcacaactcctgttatgacactcttgcacccctcggatggttgtatttagtatggtttttgtcactatctctaaatgtgttgctcacatgacatattatgtcaaaacattggattcacaatcgtgcacacatttagggggagccatctacatacaatcattcaaaagaaattttctattgcaaatgtatatctttttgaccttaattgttttggcatc

SEQ ID NO: 7037 - DNA, 1142 bp, Zea mays
  Zm_smallRNAprecursor_2526
caaaaggcatgcccatggaggaagcttgacgacgaagattgtcgtcagtctcccgctgacgccgtgccacctcatggacatcagcagaaatgttgcggcacatggagaaaaatgccgcaagcccatggaccaagcgagcacccatcccgcggccacgaccacgaccacgaccacgagcacgtggcatgggagagccgcggccaggagagggacgcgaggcagcagcggggggagaggaggaaggatggtggggaggctggcgaggtggctcagaggaggaggcagggcctccagaccgtgagggaacccgcttcgtacgagcagctgggttggaggaatcaacccagtagggtacgtagcgggagtgtttgacgggttttttgaagtgggtctgggtgaccacttcgatcatcttcatgataaagggtgcatgaagacaccctctgtgaggagaccaggaagcacggacgatctcttcccagatcatgtcaaacacattgatgcgggcgagactgtttggagcaaggaggaggaggaggactcgactctccccaaggacgttcatttgattaccgccctttgggagaacggtcatccgggacaaggaattaaggtacctgtagtacctatgcttgttagcggttgtccagaactcccgctcagtagagacatgaatgaattccgtctcttcccgcatgggcagccgaatgccatgcactcgcatgttgctgccctgaatgtctgcatcagagaagcccagaatatgggcaaaacgacgataactgactttgtgccagttaccctggatgaagaaatacatgactgagtaatcatacccatcggcttcctcatctactttctttatccagagggtggcatagaactgagctaccacctcatcgttccaggggtattccatggtcataatgttacgtaacccctttctctctaagtttacgagagctgacgacatgtcagcatctcccatattctcacaaccctcccagtcaataaatctatgtcggacgactgggtgtttcttggaaagaatgacagaattgtagaagtcagcctggaaaagattccagaaccgagggtcctggacaccaggatgacgaggagtgagagtagggttggtaaac

SEQ ID NO: 7038 - DNA, 1058 bp, Zea mays
  Zm_smallRNAprecursor_2527
gcagaaatgttgcggcacatggagaaaaatgccgcaagcccatggaccaagcgagcacccatcccgcggccacgaccacgaccacgaccacgagcacgtggcatgggagagccgcggccaggagagggacgcgaggcagcagcggggggagaggaggaaggatggtggggaggctggcgaggtggctcagaggaggaggcagggcctccagaccgtgagggaacccgcttcgtacgagcagctgggttggaggaatcaacccagtagggtacgtagcgggagtgtttgacgggttttttgaagtgggtctgggtgaccacttcgatcatcttcatgataaagggtgcatgaagacaccctctgtgaggagaccaggaagcacggacgatctcttcccagatcatgtcaaacacattgatgcgggcgagactgtttggagcaaggaggaggaggaggactcgactctccccaaggacgttcatttgattaccgccctttgggagaacggtcatccgggacaaggaattaaggtacctgtagtacctatgcttgttagcggttgtccagaactcccgctcagtagagacatgaatgaattccgtctcttcccgcatgggcagccgaatgccatgcactcgcatgttgctgccctgaatgtctgcatcagagaagcccagaatatgggcaaaacgacgataactgactttgtgccagttaccctggatgaagaaatacatgactgagtaatcatacccatcggcttcctcatctactttctttatccagagggtggcatagaactgagctaccacctcatcgttccaggggtattccatggtcataatgttacgtaacccctttctctctaagtttacgagagctgacgacatgtcagcatctcccatattctcacaaccctcccagtcaataaatctatgtcggacgactgggtgtttcttggaaagaatgacagaattgtagaagtcagcctggaaaagattccagaaccgagggtcctggacaccaggatgacgaggagtgagagtagggttggtaaa

SEQ ID NO: 7039 - DNA, 1057 bp, Zea mays
  Zm_smallRNAprecursor_2528
cagaaatgttgcggcacatggagaaaaatgccgcaagcccatggaccaagcgagcacccatcccgcggccacgaccacgaccacgaccacgagcacgtggcatgggagagccgcggccaggagagggacgcgaggcagcagcggggggagaggaggaaggatggtggggaggctggcgaggtggctcagaggaggaggcagggcctccagaccgtgagggaacccgcttcgtacgagcagctgggttggaggaatcaacccagtagggtacgtagcgggagtgtttgacgggttttttgaagtgggtctgggtgaccacttcgatcatcttcatgataaagggtgcatgaagacaccctctgtgaggagaccaggaagcacggacgatctcttcccagatcatgtcaaacacattgatgcgggcgagactgtttggagcaaggaggaggaggaggactcgactctccccaaggacgttcatttgattaccgccctttgggagaacggtcatccgggacaaggaattaaggtacctgtagtacctatgcttgttagcggttgtccagaactcccgctcagtagagacatgaatgaattccgtctcttcccgcatgggcagccgaatgccatgcactcgcatgttgctgccctgaatgtctgcatcagagaagcccagaatatgggcaaaacgacgataactgactttgtgccagttaccctggatgaagaaatacatgactgagtaatcatacccatcggcttcctcatctactttctttatccagagggtggcatagaactgagctaccacctcatcgttccaggggtattccatggtcataatgttacgtaacccctttctctctaagtttacgagagctgacgacatgtcagcatctcccatattctcacaaccctcccagtcaataaatctatgtcggacgactgggtgtttcttggaaagaatgacagaattgtagaagtcagcctggaaaagattccagaaccgagggtcctggacaccaggatgacgaggagtgagagtagggttggtaaa

SEQ ID NO: 7040 - DNA, 1058 bp, Zea mays
  Zm_smallRNAprecursor_2529
cagaaatgttgcggcacatggagaaaaatgccgcaagcccatggaccaagcgagcacccatcccgcggccacgaccacgaccacgaccacgagcacgtggcatgggagagccgcggccaggagagggacgcgaggcagcagcggggggagaggaggaaggatggtggggaggctggcgaggtggctcagaggaggaggcagggcctccagaccgtgagggaacccgcttcgtacgagcagctgggttggaggaatcaacccagtagggtacgtagcgggagtgtttgacgggttttttgaagtgggtctgggtgaccacttcgatcatcttcatgataaagggtgcatgaagacaccctctgtgaggagaccaggaagcacggacgatctcttcccagatcatgtcaaacacattgatgcgggcgagactgtttggagcaaggaggaggaggaggactcgactctccccaaggacgttcatttgattaccgccctttgggagaacggtcatccgggacaaggaattaaggtacctgtagtacctatgcttgttagcggttgtccagaactcccgctcagtagagacatgaatgaattccgtctcttcccgcatgggcagccgaatgccatgcactcgcatgttgctgccctgaatgtctgcatcagagaagcccagaatatgggcaaaacgacgataactgactttgtgccagttaccctggatgaagaaatacatgactgagtaatcatacccatcggcttcctcatctactttctttatccagagggtggcatagaactgagctaccacctcatcgttccaggggtattccatggtcataatgttacgtaacccctttctctctaagtttacgagagctgacgacatgtcagcatctcccatattctcacaaccctcccagtcaataaatctatgtcggacgactgggtgtttcttggaaagaatgacagaattgtagaagtcagcctggaaaagattccagaaccgagggtcctggacaccaggatgacgaggagtgagagtagggttggtaaac

SEQ ID NO: 7041 - DNA, 1051 bp, Zea mays
  Zm_smallRNAprecursor_2530
tcggccgcgcgccacgccattatctctctcccatctcactactcacggccggctcatttcagtcccagtccgcccagctcctctccttcccaaccatggacgcgcacagcttcgtcaaggtccttcccatggttgttcgtcttggctgcggtttcctggcgtgcgcgcggtgtggagctccttgtgccgcatctctgctggccggagttccctctctcctgtcccggtgcgcgcactactcctcgagctcgctccggctcctcacctcacccatggtcgagcggttattcccccagcgcagctcggtgcctgctgctcgcccctgctgcgcgtgtcgcgttcttctattgcgcgcacaaagttctctcctcgcaacgacgtgtcgagcttccgcgtcgagcttatctcttccgtgccggttgtcgtctccaagccgactcttgtctgtcgttgtatttttaagttatcccggccgcgtctgtggtcgtcaggcgtgtctgttgccgtgaactcgcccctggtatccactttgtctctggtccgcgcttccttcagttcggccaggcggggcatcattccgtagtatgctcgcccaagtcaccactatcaaatcgtcagagtcgctcaactcaccaatcgtatcttggtcagtcatcgatgtcatgttcgtcatgatcttcacgttagccgtccctatccgaacttgccagctcaccgactgaccgtcgtgttccttgaaatccctcgtcggccggcctcgcgacttagttcgccgcgtcgtgtgtgcagctctatatatgccaccctcctatatcgtcgtcgaagttgtcatcccctactcgacccccacctcaccagctcactccaaacacgatctcgtcgtcgtttcttgtgtcgtcaagaaatcccaagcatcagatgaagacgtagccaacaacgcgatattccccaagcgctcgacaaattgcctggatcggaaaatcgctaccgatctcgcggattcgtgtcagctgttgaaacggtaagctgatgaattgtttagaatagttcg

SEQ ID NO: 7042 - DNA, 1051 bp, Zea mays; identical to SEQ ID NO: 7041
  Zm_smallRNAprecursor_2531

SEQ ID NO: 7043 - DNA, 1032 bp, Zea mays
  Zm_smallRNAprecursor_2532
tggttctagaatctttttcaggctgatttttataattcagtcatcttgaccaagaaacacccagtcgttaggcatcagtttattgactgggaaggatgtgagaacatgggagatgctgacatgaggtcagctctccgtaacttggagagaaaggggttaaaaaatattatgacaatggaataccccgagaacgacgaggtgatagctcagttctatgccaccctctgggtcaagaaagtagatgaagaagctgatgggtatgattacccactcatgtatttctttattcaggggaactggcacaaagtcagctaccgtcattttgcccataatttgggcttctctgatgctgatatttagggcagcaacatgcgagctcatgacattaggctgcccatgtgggaagagactgaatttattcatgtctctatggatcggaagttctggaccaccgccaacatgcataggtactacaggtaccttaactctttgtccaagatgaccgttctcccaaagggcgggaatcaaatgaacgtccttggggagagtcgggtcttccttctcctccttgctcccaacagtctcgcccgcatcaatgtgtttgacatgatctgggaagagatccttcgtgcttcctggtctcctctcaatgggtgtcttcatgcaccctttattatgaagatgatcgaagtggtcacccagactcacttcgaaaaacctgtcaaacactcccgctacgtaccctactgggttgattccaccaacccagctgctcgtacaaagtgggctccctcagggtttggaggccctgcctcttttgatgagccacctcctcagcctccacatcacccatcctcctctcacgtcgccgctgcctcacgtccgatggaccgcagcgggagaggaagtggtccgggccagggacggggtggaggccgaggacttttcattcgtctggccaagggccttcttggcgtcttcgccatgtgccgcatccgagcggttgaggagtctgtgcgccgtcgcaagcca

SEQ ID NO: 7044 - DNA, 1107 bp, Zea mays
  Zm_smallRNAprecursor_2533
tcttgtgttcaccttatttccgtgtgactctcatccaaacatcataaaaatgtagttgtctccttccttccctcatctacatccaaccaaacacacttttacttttcatacagagttctgaatttatcgagcatgttgaactaatctactctttttaaaaaacatttagagaataactaaattaatcaatttagctatttttttgctaatcgcctaaaaagtctaatccgacacatctcaaagtaatgggaacctcgaggtgaacaggcatgtcgccttgtgtcattgaatcctagtgttatttttcctcgccgattacaattataggacgcgaacatgagacagagggcatgtttgtaagtttttttttttttgagaatctagattcctcgagaatatggataagacagaggccacatttggttcattttttcgaacaagttttcctgagaatctggattcccgaagaatatggttatgcggagaatctggatatcatgaggcttatatgcggaggaagatgaaaacatccacaggatttaggatttagaaagtgaagaaacttagactcgtcggtttctagatcctgaaccctttgcaccgctttatcttcctccgcatgtaatccccacgatatttagattatttccacaaccagattctcagaaaagctggtaaaaatattgaaccacgcatacccatatgttctaggcttctagcatgatcagtttatatttttcgcagacatacactttggatataccgtatgtagaattacttgttttcactcatacagagcaaacctacatgatcttaaaattctctagaagcctggcatatagctcttctagttttctaacaaatggtattaacattattcaagaggtatttcatattatcaattggtatcattcaatttaatacatgtcaaagtttaaaatatagatgacttgctcctaaatatcacctatgagtaatgctcacactcatgtgatattatcctataagttgtatcctgaaattaaaagttccaagtacatgtctcatacaagtattcaaaacttgtatgcacacttttagagaaaagtcactctgtaagttagtatc

SEQ ID NO: 7045 - DNA, 1171 bp, Zea mays
  Zm_smallRNAprecursor_2534
gctcaaaagagatgtcgttagtaatacaagcaccaaattctcttttataacactttgaatatataaagtaaggcagatacttaaacaaagaaaccttattatatgaactaaaattctcttaatcttcaatgcttaattttaacaaattaaacatgcatgataaattgattaagtccaaaggctaattttaaatcatatcatggtgagtatttaatgtggaagaaataaatccaaatgtacaagagagaatacatcacatagttttggattgtttcttctttatacgtttaattgcatagtccattgagaaactcattctcattctgtgaaactacatagatcacttaggtaaaaacattagtttcacaactctagtcatatagagaattccctttttgataagtgctttaagaatttgaatttcttacttagcaccttattcattaacgaacacggggtttttcccttttatgtctagatcatggcaataatagagtaatcaaattgaaatgtgccaagaaatacttacaaccaatttaagtatttggattgccatatgtaagaaagaagattatgtaatctgttacatgataacctcaattttgatcatctttggtcttgatcttcaacttggagtaccaagataagtgccaaaatatttctcaacaaatatccttgtaccccttcactttccataattatagatcaattcaaaaccaaactatggtctctcaaacaacttatgtgatttatcctatatgagagccttccaatcaaagtgactttcaatatttcaaatacttgtcacttatgacagattctgtatactccaaagaaacatccataaattttgatgtacagatcctatgaccacgaaaattggtggagatgtgctttaataagtctgctaacagctgtaaaaagttgagactcatttgacttcatatgtgctgccagccacaacatctcccacaataggtacatgctgaaaactgctgtgtttgttttgacaagattgacttaatcaagaagtttcacttatccaacgattatgaaatttgcacagactttgctatcatatgcatagaccaagtaaactgaatttcaagccaatccaaatagatttgatcactcaaacatggctatgagcacagccttgtcagattttcaa

SEQ ID NO: 7046 - DNA, 1040 bp, Zea mays
  Zm_smallRNAprecursor_2535
tgcttgtgttatagtgatttcagacaccacccgcttcagttgccgcacctggagatggatctggtcaaaacgacacaacacattcgtgggtgaacaatcttttcaacacgcatagtccagccggaggaggtggcgatggatatgagtgataatgatgtaaaacacttgttgcaacctttcatgtgaaagcctatccgtcgaataatgttcattttggattttggacaactatgttgatgtaaacacttgttgcaaccatttggaactatgtcgttatgttaaatttgtgaatgtgaatacttatgtgattatatttgtgaatgtgtatacttatgtgagtatatttgtgattgtgaatgtgtatatgtgtatgaaatctgttttgtatttgcaaatgtcagattttttaaatttcagaattttgtgcaatttctgaaatatgttatgtccgacggtttagcgtaagccgtcggacataaggtgtatgttatgtccgacggcttaaaaccgtcggacataagttatatgttatgtccgacggcttaaaaccgtcggacataacagcagtgggccccaggcggcgggtaaaacggttaccacaccttacctccgacggtccgatggggccgtcggacataatgctatttccgacgccttatcctcgacggcttaaaaccgtcggagataggttaatgccgtcggacataacctacctccgacggtctgaatcttatgttcgacggcttcaaccgtcggaaattccttcgtttactgtagtgacgtaagtactctaacttttcgaatattctccacagacctaaaataacaaaacgataaacatatagacagattagacaaaatatatttaatcagaactaggcttcgtccgaccgaatacacaagaaagctagcaaacactacaagaaactaataaatgttcgtgggttaatttaagaacgtgggtaccgacgttcttaattgagttaagttcatgggtttgttgaagaacgtgggtacccacgtccttaacatgtggtcca

SEQ ID NO: 7047 - DNA, 1171 bp, Zea mays
  Zm_smallRNAprecursor_2536
cgcatgggcagccgaatgttatgcactcgcatgttgctgccctgaatatctgcatcagagaagcccagaatatgggcaaaacgacgataactgactttatgccagttaccctggatgaagaaatacatgactgggtaatcatacccatcggcttcctcatctactttctttatccagagggtggcatagaactgagctaccacctcgtcgttccaggggtattccatagtcataatgtttcgtaacccctttctctctaagttttcgagagctgacgtcatgtcagcatctcccatattctcacaaccctcccagtcaataaacctatgtctgacgactgggtgtttcttggaaagaattacagaattgtagaagtcagcctgaaaaagattctagaaccgagggtcttggacaccaggatgacgaggagtgagagtagggttggtgaacctcaggcgctgaagggtgtctattcccttcagagtgaagtcgacgggaggttcatgcggaccgcggctgacgttcgccggatgcatgtgcagtccggtgacgtagagagcatcaggcgccggaaggtcgatgaagtcgtcgaaagccccatcctcctcctggcagggagcatacccagaggaagacgtgctacgacgaggacgagaggcgccaaccttttggcgtctcccgcgagtcggctgtgagggcatggaagagccctcaccatccatctgaccagagccacgtcctctcttagagagggagcgacgaggcggaggagaggggacgggagattcctcctgaatctcgtccgagtcgctgctaaactcaatcactgaagggttgcgacgacgcaccatgattgaaaaagtggtgaactggttgaggtgtgtgaaagagaggctctaaatgttgtgaagcgactaaggcgagagtggatgaagtgggagaagagaaggggagtgtcaaatatatataggcagttgagctgggtcctcaggaccagttcaaccgccccatgggccagttcaactggttctgaccagtgtggtcagagagccagaaacagcagagggaagacgccaaaaaaattcaaatttctgacgtaggattctgaaaaagtggactgcaaagattccatgcgccaaaaaaaatcaaaaccaagtgtctgcgcagatga

SEQ ID NO: 7048 - DNA, 1040 bp, Zea mays
  Zm_smallRNAprecursor_2537
gcgccctgcaggatgctgaccggataaaaaaattcgcgcactgacgctagagcacagcggagaccaaaaaatactgcatggcgccctgacccgctgcatgcctgactgtgaccggacagaaaaaagacaaaaaaatctgcacgccaggccgccagcagagaggaagcgaccggtcaaaaaagatgctgcgcgactgaaaaaaggtgcagctgacagacctgcgcggacaggcctgcgcggacagacctgcgcggacagaccggtcagagaccggttcaaccggtccactatgccggttcaaccggttttaaccaggatggtcctggtaaaaactggttaaaaacagctgagctgaagttcagctccgaagttcagctggcctcctccaactgaactagaaagttcagctggtcaagccagttgagcccaaaaaaaatcttagcactaaaattcattcgaattttaacattttcaccaaattttttgaaagatcatcacaaagctttaaaactatcaatcaaaaatagtgaatcaaacaatttttgtgaccgttttcaagttaagttacgagaatccaagatatttaattcactcctaagaaagcaaaacctagtctcatagaggggttttgtgaagatatcggctagttcattttcggtgctcacatgaaacaattcgatatctcctttggcttcgtggtctctcaagaaatggtgtctgatgtcaatatgtttagttctagagtgttgcacagggttgtttgcaagttttatggcactctcattgtcacacaaaagtggaattttgttaaactcacaaccaaaatctctaagggtttgcttcatccataataactgtgcacaacatgccccagctgctatgtactcagcttctgcagtggaaagtgcaacacaattttatttcttggaactccatgatactaaggatcgcccaaggaattggcaagtcccagtagtgctttttcgatctactttgcaaccggcataatctgagtcagaatagccaagtaaatcgaaaag

SEQ ID NO: 7049 - DNA, 1133 bp, Zea mays
  Zm_smallRNAprecursor_2538
tcgagttttctggtgccgatcttgctgctgagcccagaggacttggaatttcctcttgagatggcctttttcttcctcctttgccctttccacttgcatggctttgttggagaggtgcgagaaactaaggaagtcttggctggccaggatggtcttgagttctggtctgagccccttcaggaagcgggccatcttcttgacttcggtgctgacgtcatccggcgcgtagcgggccaactccatgaacttgtgcacatattcactgacatatcttctgtcttgagtcagttcccggaattcatcttccttgagctgaacgatcccttggggcacatggtgctcccggaaagctgtttcaaactctgcctaggtagcatctctgatggtgacattgaaggtatcccactaggctaaggccatcccggaaagttgatgagcagctagttgaacacactgattttccgggcatccgattgcttccagctttcttttaattgtgcacagccaatcgtcagcatcgaggggattgctagatccggcaaacgtgggaggcttgagcctcaggaagtctcccatcctgtcttgtggtcttccaccattcggacgttgattttccagatttcgagtgaggacctcgatgagtcgggtttggttggctagaacttgggctagatctaagggtagttctggaggtgcggggaggtgggtctcactttcctctctaccggcttccctttcagctctcaggggaaaccctgctccaatcccagaggcggtaggcgtggttttatccgaagccatctaccagggggagagagtcactattatgcacatgccaattgttttcaaccaagttattttattcattacaccaaaacattacaagcatacgactactacaagtcgtactacacgcgagcgttctcataggtactcccgaactctttttctaaagtgtccccaaattccttgagaaggtcatcaaagctagctagggacatatcctcgatgtcatacaaattctctatcctggtgggagctggtgctgggggagccttcttcctccgctcagctttgcctccttggttcctggtcttcttttggattttctttgtgggggcgagctttttcag

SEQ ID NO: 7050 - DNA, 1178 bp, Zea mays
  Zm_smallRNAprecursor_2539
aggacattgcttgcatgatggagcaagattctctggtgttccaagagtatttggacaaggtcaacaacgtaacccaccagcctgacagcaactacgaaccctcagacttgtcctcaccaccccctggtgaagacaaccttagtccagactgggactttgccgagcacttcgaaaggttttggggtattgaatatgactccgatcagatgccttcctttagtgacaatgaggtttaagttagaacttggttaagcctgttgtttgtgtgcatgcagatgtgtgaccctgctgcacacacatatgatcatgacacggatgacagagatggacaattgcttgttgccctatatgctgtagacatttggggcaggccttccagtgaggtttctagaagaacaatggttgaaacaggtattcaatgggttgagcgaactttggggaatagtaacgactgctttgacatgtttcgcatgcgacatactgtttttagacgattgcatgatacgttggtggaaagttatggtctgcttccaagccgtggtgtcggtactatggaagctctaggtatttttcttgtgggcatgtgggggtccacaatcatttagacagataaggaataagtttggtcactccttggaaactattagtcgcaagtatagtgaagtacttaatgcactatataagatgtcatctgacgtaatcaagcccaaagacccaaatttcatagagattcatcctcgtttgcgagaggggagattttggccccacttcaaggattgcataggagcaattgatggtactcactttccagcgtctgtcccggcctcggagcaagccaaatatattggtcggcatggttacgcatcacagaatgtaatggccgtttgtgacttcgatatgaggttcacatttgttgtcacaggttggccaggttcagtacatgacactagagtattacaagatactttgataacttatgtagactggttcccccatccaccggaaggtaaataagtatgttgtacttttgtatcatacgatattcatttatgtcttaagtattaaactttatatttctgtttgtgcaggtaaatactatcttgtggattcaggttatccaaatagaaaggggtaccttgcaccttataagggtcagaagtaccacatttcagaatggc

SEQ ID NO: 7051 - DNA, 1058 bp, Zea mays
  Zm_smallRNAprecursor_2540
aacttgcagcagctcaggttgtagaactggtgagatgccacgtcttggcctttgcagcctgggcaaggttgttgccatgggatccagggagaccaaccttgtcatatgttaggttctttattttatttgcaaataaattaaagttgagatgtaaaaggcttctagttagggttgcactttcacgtgcatatcaaattagacaacaaggttgttgccatgcaccccattacagctcgaggacaaactgtcttcgaagggtgggggaatgtcatggggcggcaacccagggcatggaggccatagggataggctcagggttaggattagtggataaagattagattagataaaattgagttagttacttgggagccaagttttcctatctatataaggatggatgtacctccttaagagggaaagcgatgaagaagaattagtcccagatctatctaatactctatcccccccaagcatgctctgtccggctcttcccagcgttgtttatccccttatgaactaggattcataacatttcgatatcagatgttatgaatcctaattcataaggggataaacagcaccgggaagatagtcgggcggagtcggcttggggggactagtgtattagagagatctgagattaattcttcttcattactttccctcttaagaaggtacatccgcccttatatagataggaagacttggctcctaagtaactaaatcttatctaatctaatctatatcgactaatcctaaccctgagcctatccctatgggcctccatgccttgggttgctgccccatgacacggcgcatgcgggcttgtggctcgccttccacctttctcaacctcacaacaagttaacagaataggcactcatttaatttgaaccaatctcctgacagtttctcatgtgtgattaatcctttattgcacctagcatttatcatgggcaatggcggagctcgttcaaaaatttaggtgtggcgaactttgtttttgccaaatgcaaagcacatacgactcttggcttggcaatccctctacctct

SEQ ID NO: 7052 - DNA, 1059 bp, Zea mays
  Zm_smallRNAprecursor_2541
aacttgcagcagctcaggttgtagaactggtgagatgccacgtcttggcctttgcagcctgggcaaggttgttgccatgggatccagggagaccaaccttgtcatatgttaggttctttattttatttgcaaataaattaaagttgagatgtaaaaggcttctagttagggttgcactttcacgtgcatatcaaattagacaacaaggttgttgccatgcaccccattacagctcgaggacaaactgtcttcgaagggtgggggaatgtcatggggcggcaacccagggcatggaggccatagggataggctcagggttaggattagtggataaagattagattagataaaattgagttagttacttgggagccaagttttcctatctatataaggatggatgtacctccttaagagggaaagcgatgaagaagaattagtcccagatctatctaatactctatcccccccaagcatgctctgtccggctcttcccagcgttgtttatccccttatgaactaggattcataacatttcgatatcagatgttatgaatcctaattcataaggggataaacagcaccgggaagatagtcgggcggagtcggcttggggggactagtgtattagagagatctgagattaattcttcttcattactttccctcttaagaaggtacatccgcccttatatagataggaagacttggctcctaagtaactaaatcttatctaatctaatctatatcgactaatcctaaccctgagcctatccctatgggcctccatgccttgggttgctgccccatgacacggcgcatgcgggcttgtggctcgccttccacctttctcaacctcacaacaagttaacagaataggcactcatttaatttgaaccaatctcctgacagtttctcatgtgtgattaatcctttattgcacctagcatttatcatgggcaatggcggagctcgttcaaaaatttaggtgtggcgaactttgtttttgccaaatgcaaagcacatacgactcttggcttggcaatccctctacctctg

SEQ ID NO: 7053 - DNA, 1057 bp, Zea mays
  Zm_smallRNAprecursor_2542
acttgcagcagctcaggttgtagaactggtgagatgccacgtcttggcctttgcagcctgggcaaggttgttgccatgggatccagggagaccaaccttgtcatatgttaggttctttattttatttgcaaataaattaaagttgagatgtaaaaggcttctagttagggttgcactttcacgtgcatatcaaattagacaacaaggttgttgccatgcaccccattacagctcgaggacaaactgtcttcgaagggtgggggaatgtcatggggcggcaacccagggcatggaggccatagggataggctcagggttaggattagtggataaagattagattagataaaattgagttagttacttgggagccaagttttcctatctatataaggatggatgtacctccttaagagggaaagcgatgaagaagaattagtcccagatctatctaatactctatcccccccaagcatgctctgtccggctcttcccagcgttgtttatccccttatgaactaggattcataacatttcgatatcagatgttatgaatcctaattcataaggggataaacagcaccgggaagatagtcgggcggagtcggcttggggggactagtgtattagagagatctgagattaattcttcttcattactttccctcttaagaaggtacatccgcccttatatagataggaagacttggctcctaagtaactaaatcttatctaatctaatctatatcgactaatcctaaccctgagcctatccctatgggcctccatgccttgggttgctgccccatgacacggcgcatgcgggcttgtggctcgccttccacctttctcaacctcacaacaagttaacagaataggcactcatttaatttgaaccaatctcctgacagtttctcatgtgtgattaatcctttattgcacctagcatttatcatgggcaatggcggagctcgttcaaaaatttaggtgtggcgaactttgtttttgccaaatgcaaagcacatacgactcttggcttggcaatccctctacctct

SEQ ID NO: 7054 - DNA, 1080 bp, Zea mays
  Zm_smallRNAprecursor_2543
caattgactaaaaccagtcaagaccacaacagagaagatgatcacactttctttacaggataagaacatggttctcacgagcttattcaattgcacactactcactatatctaatgtaaaacatgcgcttctacatctgcacactatctgaacaacgatgttaacaggagcaatccgtactttcagttacctacttacctttgtctcaggaacaaccaagatatcctctttgaacagagatgaatgcctttgcaagagacatacaattgaacacaatttcatccaaacataaagggtgaccgtactttcgggcatccacctccgtccagtcctccgttcccatatacctcggcctcgcatttcgtaaccctaactaccaccacctcctccaacggcctctcggcggcagcagagaccttagggaaggatgggccgcaggaagagaaagacgggcgaccgtcatggaagggtcaagccatcagtggagctggaaggaagcgaagatccggatcagattcagatgggggatctagagatcgtgtgcggcggtgacggcgatccgctgatgcaagaaacagaacatctcgacccgacgaggatcgtcggcgatgagttggatgaaggccaggtccgatctgcctaccttgtggcatgccactgggattggtccaggaattccatgccctacgccgtgtacaagatgggcgtcgccacttcctttccttcgcgggtgaagcggaagcgcctgcaccgagttacctgtctggctaccgttgctggcggtatgaccttcacgtccctgcggtcagtgcaccgcgcgtggatcattggggtcggggtgattcgggtgacaccgtcatcttcgacaccaagacgaagaaggtcattcacgggccgactctcaattctacaaagtggtgccctgtcctgacaacagtggaggacaaggtttatgccctgtgcaagactccttgctggttcacagaccccgatttcccaccctggttcgaggtactcgatctttctaaagtcaaagttgtcactgttgacgaccgctccgacctggagggatgctcctgg

SEQ ID NO: 7055 - DNA, 1042 bp, Zea mays
  Zm_smallRNAprecursor_2544
ctgcacaaggagaacctatagcttattgcaagccttgcttttgagaaagaagcaaaaaaaaaaaaaaaagagcagtgaggccgtctaacttctgacaacaggaagcttttattggatatgtcaggtcttgagcttggcttatcttctgtgaaagaggaaatagatgctagcagtagatgtaaagttctggagtgtgacctgcgtccctccaatgaaaatttgaatcatactttaacagaattggcaaacccaggcattattggaaagattacataaagataatttgaaactatatgagagttttgactcagaaacggaaacaaaaaaagaaacatcaagaatacaatttgtatctatgtaatgaaaagggtaggctttcttcagatttatttcaaataaatgacaagttggaactttcgtaggccaagcatgagcaaatcaaaaggctcaaagaaagtgtctcatcataagcacgtgagataaaataaagtactccctccgtttctttttattagtcgccggatagtacaaatttgcactatccggcgactaataaaaagaaacggagggagtacaacatctttataattatttcctgcaataatcaatagaatgggaatccaaatgcacctttctatttagaagaaattcaaatacagaaatatgataatgagaacaaatatgcttatgcataacaaccatagtgctaatgtgtcattcctattattaaacacaggagcaaatcttgcttctcagtgtttactatcaaagacattcctttagattatttatgtcttcattgcattaatgattgctcactaggggatgacgcgccggagcacaatggcgaggtcgctgccgtttgcccgtgagactaggtgagccgtcccgcgggcacgcctcagcagctcagctgctgcctgctgccgtggatgtttcctctgttgcttctctttccggtttttttttttaagaaaggaatcctctggtagtcaggtgataattagtttgttcctttcatcgttcgtagttggcggaggag

SEQ ID NO: 7056 - DNA, 1034 bp, Zea mays
  Zm_smallRNAprecursor_2545
acaaggagaacctatagcttattgcaagccttgcttttgagaaagaagcaaaaaaaaaaaaaaaagagcagtgaggccgtctaacttctgacaacaggaagcttttattggatatgtcaggtcttgagcttggcttatcttctgtgaaagaggaaatagatgctagcagtagatgtaaagttctggagtgtgacctgcgtccctccaatgaaaatttgaatcatactttaacagaattggcaaacccaggcattattggaaagattacataaagataatttgaaactatatgagagttttgactcagaaacggaaacaaaaaaagaaacatcaagaatacaatttgtatctatgtaatgaaaagggtaggctttcttcagatttatttcaaataaatgacaagttggaactttcgtaggccaagcatgagcaaatcaaaaggctcaaagaaagtgtctcatcataagcacgtgagataaaataaagtactccctccgtttctttttattagtcgccggatagtacaaatttgcactatccggcgactaataaaaagaaacggagggagtacaacatctttataattatttcctgcaataatcaatagaatgggaatccaaatgcacctttctatttagaagaaattcaaatacagaaatatgataatgagaacaaatatgcttatgcataacaaccatagtgctaatgtgtcattcctattattaaacacaggagcaaatcttgcttctcagtgtttactatcaaagacattcctttagattatttatgtcttcattgcattaatgattgctcactaggggatgacgcgccggagcacaatggcgaggtcgctgccgtttgcccgtgagactaggtgagccgtcccgcgggcacgcctcagcagctcagctgctgcctgctgccgtggatgtttcctctgttgcttctctttccggtttttttttttaagaaaggaatcctctggtagtcaggtgataattagtttgttcctttcatcgttcgtagttggcgga

SEQ ID NO: 7057 - DNA, 1197 bp, Zea mays
  Zm_smallRNAprecursor_2546
ggtataggagtacaaggattgtcgtcactagaactatcctccccgctcccttcaccggagctgctcgttgtctgccattcaagtttggtcgcgtcttcatcaactttgttagacgcaccggtgcagaccacatccatactaggctgctcgttgtctgccattcaagctggttccatcgataaagggatatactgttagtctgatatactggttccatcaataagggaacttggagaaaaggtgattcaaaataaatcgagcccaaacccccctacggggcagaatcgggtcgggaagcaagctcgcagatagaagggcactttccaatgcagttagacagagaaggcatggctgtgatgttataatgctgaaggaccccaagaagagattatgccctatagtctaccacctctcgttatttgtgggcttcaccgagggcgggaaacatttggtgagatcaaacgaccttcgggctggggacgtctgcgagcttgttaaggggccagacgatgttgagccggtgtactctgtccggatgtgtggtcacaaaatttaaagccgccccggcttcatgtgtgcgcttctcttctcgtgtgcctcaaactaagaccacttagcaccccacctaagagaagagaagcacacacatgcagccggggcagcttttaattttgtgaccacacatccggacatagtacaccggctcaacatcgtctggcctcttaacaagctcgcagacgtcttcagcccgaaggtcgtttgctatcaccaaatgtttccagccatcggtgaagcccacaaataacgggaggtggtagactacaggacttaatctcttcttggggtccgccgattcaggcattccgccgatgccattctccatataagtcccaaacagagaatagggatgaggtagtcaagattgtagggcgctagtgctcaactactagcatctatagatatggacacaagtccaaatttggtgctactcggcaccatcgatatcactagaaaaaaaaaatacatcaaagagatccacttcccaatagtactcgaagatagttcattgacttgacactctctaagaggttcatacaaaatacattctctctaagagtgaaacctacgatactcatatcgtgttgtttaggactaaacatcaacaaccccttgactggtcgctatcatactcaattc

SEQ ID NO: 7058 - DNA, 1197 bp, Zea mays; identical to SEQ ID NO: 7057
  Zm_smallRNAprecursor_2547

SEQ ID NO: 7059 - DNA, 1198 bp, Zea mays
  Zm_smallRNAprecursor_2548
ggtataggagtacaaggattgtcgtcactagaactatcctccccgctcccttcaccggagctgctcgttgtctgccattcaagtttggtcgcgtcttcatcaactttgttagacgcaccggtgcagaccacatccatactaggctgctcgttgtctgccattcaagctggttccatcgataaagggatatactgttagtctgatatactggttccatcaataagggaacttggagaaaaggtgattcaaaataaatcgagcccaaacccccctacggggcagaatcgggtcgggaagcaagctcgcagatagaagggcactttccaatgcagttagacagagaaggcatggctgtgatgttataatgctgaaggaccccaagaagagattatgccctatagtctaccacctctcgttatttgtgggcttcaccgagggcgggaaacatttggtgagatcaaacgaccttcgggctggggacgtctgcgagcttgttaaggggccagacgatgttgagccggtgtactctgtccggatgtgtggtcacaaaatttaaagccgccccggcttcatgtgtgcgcttctcttctcgtgtgcctcaaactaagaccacttagcaccccacctaagagaagagaagcacacacatgcagccggggcagcttttaattttgtgaccacacatccggacatagtacaccggctcaacatcgtctggcctcttaacaagctcgcagacgtcttcagcccgaaggtcgtttgctatcaccaaatgtttccagccatcggtgaagcccacaaataacgggaggtggtagactacaggacttaatctcttcttggggtccgccgattcaggcattccgccgatgccattctccatataagtcccaaacagagaatagggatgaggtagtcaagattgtagggcgctagtgctcaactactagcatctatagatatggacacaagtccaaatttggtgctactcggcaccatcgatatcactagaaaaaaaaaatacatcaaagagatccacttcccaatagtactcgaagatagttcattgacttgacactctctaagaggttcatacaaaatacattctctctaagagtgaaacctacgatactcatatcgtgttgtttaggactaaacatcaacaaccccttgactggtcgctatcatactcaattcc

SEQ ID NO: 7060 - DNA, 1196 bp, Zea mays
  Zm_smallRNAprecursor_2549
gtataggagtacaaggattgtcgtcactagaactatcctccccgctcccttcaccggagctgctcgttgtctgccattcaagtttggtcgcgtcttcatcaactttgttagacgcaccggtgcagaccacatccatactaggctgctcgttgtctgccattcaagctggttccatcgataaagggatatactgttagtctgatatactggttccatcaataagggaacttggagaaaaggtgattcaaaataaatcgagcccaaacccccctacggggcagaatcgggtcgggaagcaagctcgcagatagaagggcactttccaatgcagttagacagagaaggcatggctgtgatgttataatgctgaaggaccccaagaagagattatgccctatagtctaccacctctcgttatttgtgggcttcaccgagggcgggaaacatttggtgagatcaaacgaccttcgggctggggacgtctgcgagcttgttaaggggccagacgatgttgagccggtgtactctgtccggatgtgtggtcacaaaatttaaagccgccccggcttcatgtgtgcgcttctcttctcgtgtgcctcaaactaagaccacttagcaccccacctaagagaagagaagcacacacatgcagccggggcagcttttaattttgtgaccacacatccggacatagtacaccggctcaacatcgtctggcctcttaacaagctcgcagacgtcttcagcccgaaggtcgtttgctatcaccaaatgtttccagccatcggtgaagcccacaaataacgggaggtggtagactacaggacttaatctcttcttggggtccgccgattcaggcattccgccgatgccattctccatataagtcccaaacagagaatagggatgaggtagtcaagattgtagggcgctagtgctcaactactagcatctatagatatggacacaagtccaaatttggtgctactcggcaccatcgatatcactagaaaaaaaaaatacatcaaagagatccacttcccaatagtactcgaagatagttcattgacttgacactctctaagaggttcatacaaaatacattctctctaagagtgaaacctacgatactcatatcgtgttgtttaggactaaacatcaacaaccccttgactggtcgctatcatactcaattc

SEQ ID NO: 7061 - DNA, 1057 bp, Zea mays
  Zm_smallRNAprecursor_2550
ataagccataagtcgtcggaaataggctatttctgacgaccgaatacttatatgtgacggtactcgtccctcggctgtaaagagtcgaaaatacccttatttccgacggcggtccaacggtctgtgtcggcttatccccgtaactatatctaccattgtaatcgtactaatacgcccggttattggcaacactaggatccaatggtgtccccacgctccagcagttagatgtaagtcaaaatatctcaagtgtatgaagtcagaactcgacactagtatataggagagagaagtaaaaatacactagcagcagagttttcactagctgtctagtttacggcaacataagataatgccatcggtctcggtcatcgaaagcaggttctcagaaacttaccgcaacgcagtagagctggagggggaggggctcgcgcatcgcaccagcgctgcctcggttgcgcttctgagttttttacttgcagacatagcgtagcagaaggaatggaagaggcaggcacaggagagctaacgaggggccaaccacacctcgttcgtgctcctctgcatgccccttccaccgctgctgctacagccaggaactcccagaactagagaggagaagatgctcgacctgccatggctttgcaggccactcgtgcccctatttgtagcactgatgcagtgatgctcgctccagtacgtactactagctggtagctgctgcagtacacctgggaagtaggaagaagagcgcggtggctcctttgtgtactgctccttccttccatgctcgcgaggtttccgagtgtactactagtggtcttgacctgtactgcagcccgagggagacccacccacacacatcccctcggcgagacggtctgcggccacccgtgaccgttgtcgtgacgtgatgttgcgtgcctaccgcccggggtaatctaacagctgaccgtcacatttgacaccaagcagaattttcgtattgagtacataaaattcactgttataaaggtccacatttctataataacaccattcttgagcaccccatgtt

SEQ ID NO: 7062 - DNA, 1057 bp, Zea mays; identical to SEQ ID NO: 7061
  Zm_smallRNAprecursor_2551

SEQ ID NO: 7063 - DNA, 1057 bp, Zea mays; identical to SEQ ID NO: 7061
  Zm_smallRNAprecursor_2552

SEQ ID NO: 7064 - DNA, 1057 bp, Zea mays; identical to SEQ ID NO: 7061
  Zm_smallRNAprecursor_2553

SEQ ID NO: 7065 - DNA, 1057 bp, Zea mays; identical to SEQ ID NO: 7061
  Zm_smallRNAprecursor_2554

SEQ ID NO: 7066 - DNA, 1057 bp, Zea mays; identical to SEQ ID NO: 7061
  Zm_smallRNAprecursor_2555

SEQ ID NO: 7067 - DNA, 1058 bp, Zea mays
  Zm_smallRNAprecursor_2556
ataagccataagtcgtcggaaataggctatttctgacgaccgaatacttatatgtgacggtactcgtccctcggctgtaaagagtcgaaaatacccttatttccgacggcggtccaacggtctgtgtcggcttatccccgtaactatatctaccattgtaatcgtactaatacgcccggttattggcaacactaggatccaatggtgtccccacgctccagcagttagatgtaagtcaaaatatctcaagtgtatgaagtcagaactcgacactagtatataggagagagaagtaaaaatacactagcagcagagttttcactagctgtctagtttacggcaacataagataatgccatcggtctcggtcatcgaaagcaggttctcagaaacttaccgcaacgcagtagagctggagggggaggggctcgcgcatcgcaccagcgctgcctcggttgcgcttctgagttttttacttgcagacatagcgtagcagaaggaatggaagaggcaggcacaggagagctaacgaggggccaaccacacctcgttcgtgctcctctgcatgccccttccaccgctgctgctacagccaggaactcccagaactagagaggagaagatgctcgacctgccatggctttgcaggccactcgtgcccctatttgtagcactgatgcagtgatgctcgctccagtacgtactactagctggtagctgctgcagtacacctgggaagtaggaagaagagcgcggtggctcctttgtgtactgctccttccttccatgctcgcgaggtttccgagtgtactactagtggtcttgacctgtactgcagcccgagggagacccacccacacacatcccctcggcgagacggtctgcggccacccgtgaccgttgtcgtgacgtgatgttgcgtgcctaccgcccggggtaatctaacagctgaccgtcacatttgacaccaagcagaattttcgtattgagtacataaaattcactgttataaaggtccacatttctataataacaccattcttgagcaccccatgttt

SEQ ID NO: 7068 - DNA, 1058 bp, Zea mays; identical to SEQ ID NO: 7067
  Zm_smallRNAprecursor_2557

SEQ ID NO: 7069 - DNA, 1058 bp, Zea mays; identical to SEQ ID NO: 7067
  Zm_smallRNAprecursor_2558

SEQ ID NO: 7070 - DNA, 1058 bp, Zea mays; identical to SEQ ID NO: 7067
  Zm_smallRNAprecursor_2559

SEQ ID NO: 7071 - DNA, 1059 bp, Zea mays
  Zm_smallRNAprecursor_2560
ataagccataagtcgtcggaaataggctatttctgacgaccgaatacttatatgtgacggtactcgtccctcggctgtaaagagtcgaaaatacccttatttccgacggcggtccaacggtctgtgtcggcttatccccgtaactatatctaccattgtaatcgtactaatacgcccggttattggcaacactaggatccaatggtgtccccacgctccagcagttagatgtaagtcaaaatatctcaagtgtatgaagtcagaactcgacactagtatataggagagagaagtaaaaatacactagcagcagagttttcactagctgtctagtttacggcaacataagataatgccatcggtctcggtcatcgaaagcaggttctcagaaacttaccgcaacgcagtagagctggagggggaggggctcgcgcatcgcaccagcgctgcctcggttgcgcttctgagttttttacttgcagacatagcgtagcagaaggaatggaagaggcaggcacaggagagctaacgaggggccaaccacacctcgttcgtgctcctctgcatgccccttccaccgctgctgctacagccaggaactcccagaactagagaggagaagatgctcgacctgccatggctttgcaggccactcgtgcccctatttgtagcactgatgcagtgatgctcgctccagtacgtactactagctggtagctgctgcagtacacctgggaagtaggaagaagagcgcggtggctcctttgtgtactgctccttccttccatgctcgcgaggtttccgagtgtactactagtggtcttgacctgtactgcagcccgagggagacccacccacacacatcccctcggcgagacggtctgcggccacccgtgaccgttgtcgtgacgtgatgttgcgtgcctaccgcccggggtaatctaacagctgaccgtcacatttgacaccaagcagaattttcgtattgagtacataaaattcactgttataaaggtccacatttctataataacaccattcttgagcaccccatgtttt

SEQ ID NO: 7072 - DNA, 1056 bp, Zea mays
  Zm_smallRNAprecursor_2561
taagccataagtcgtcggaaataggctatttctgacgaccgaatacttatatgtgacggtactcgtccctcggctgtaaagagtcgaaaatacccttatttccgacggcggtccaacggtctgtgtcggcttatccccgtaactatatctaccattgtaatcgtactaatacgcccggttattggcaacactaggatccaatggtgtccccacgctccagcagttagatgtaagtcaaaatatctcaagtgtatgaagtcagaactcgacactagtatataggagagagaagtaaaaatacactagcagcagagttttcactagctgtctagtttacggcaacataagataatgccatcggtctcggtcatcgaaagcaggttctcagaaacttaccgcaacgcagtagagctggagggggaggggctcgcgcatcgcaccagcgctgcctcggttgcgcttctgagttttttacttgcagacatagcgtagcagaaggaatggaagaggcaggcacaggagagctaacgaggggccaaccacacctcgttcgtgctcctctgcatgccccttccaccgctgctgctacagccaggaactcccagaactagagaggagaagatgctcgacctgccatggctttgcaggccactcgtgcccctatttgtagcactgatgcagtgatgctcgctccagtacgtactactagctggtagctgctgcagtacacctgggaagtaggaagaagagcgcggtggctcctttgtgtactgctccttccttccatgctcgcgaggtttccgagtgtactactagtggtcttgacctgtactgcagcccgagggagacccacccacacacatcccctcggcgagacggtctgcggccacccgtgaccgttgtcgtgacgtgatgttgcgtgcctaccgcccggggtaatctaacagctgaccgtcacatttgacaccaagcagaattttcgtattgagtacataaaattcactgttataaaggtccacatttctataataacaccattcttgagcaccccatgtt

SEQ ID NO: 7073 - DNA, 1056 bp, Zea mays; identical to SEQ ID NO: 7072
  Zm_smallRNAprecursor_2562

SEQ ID NO: 7074 - DNA, 1056 bp, Zea mays; identical to SEQ ID NO: 7072
  Zm_smallRNAprecursor_2563

SEQ ID NO: 7075 - DNA, 1056 bp, Zea mays; identical to SEQ ID NO: 7072
  Zm_smallRNAprecursor_2564

SEQ ID NO: 7076 - DNA, 1056 bp, Zea mays; identical to SEQ ID NO: 7072
  Zm_smallRNAprecursor_2565

SEQ ID NO: 7077 - DNA, 1056 bp, Zea mays; identical to SEQ ID NO: 7072
  Zm_smallRNAprecursor_2566

SEQ ID NO: 7078 - DNA, 1057 bp, Zea mays
  Zm_smallRNAprecursor_2567
taagccataagtcgtcggaaataggctatttctgacgaccgaatacttatatgtgacggtactcgtccctcggctgtaaagagtcgaaaatacccttatttccgacggcggtccaacggtctgtgtcggcttatccccgtaactatatctaccattgtaatcgtactaatacgcccggttattggcaacactaggatccaatggtgtccccacgctccagcagttagatgtaagtcaaaatatctcaagtgtatgaagtcagaactcgacactagtatataggagagagaagtaaaaatacactagcagcagagttttcactagctgtctagtttacggcaacataagataatgccatcggtctcggtcatcgaaagcaggttctcagaaacttaccgcaacgcagtagagctggagggggaggggctcgcgcatcgcaccagcgctgcctcggttgcgcttctgagttttttacttgcagacatagcgtagcagaaggaatggaagaggcaggcacaggagagctaacgaggggccaaccacacctcgttcgtgctcctctgcatgccccttccaccgctgctgctacagccaggaactcccagaactagagaggagaagatgctcgacctgccatggctttgcaggccactcgtgcccctatttgtagcactgatgcagtgatgctcgctccagtacgtactactagctggtagctgctgcagtacacctgggaagtaggaagaagagcgcggtggctcctttgtgtactgctccttccttccatgctcgcgaggtttccgagtgtactactagtggtcttgacctgtactgcagcccgagggagacccacccacacacatcccctcggcgagacggtctgcggccacccgtgaccgttgtcgtgacgtgatgttgcgtgcctaccgcccggggtaatctaacagctgaccgtcacatttgacaccaagcagaattttcgtattgagtacataaaattcactgttataaaggtccacatttctataataacaccattcttgagcaccccatgttt

SEQ ID NO: 7079 - DNA, 1057 bp, Zea mays; identical to SEQ ID NO: 7078
  Zm_smallRNAprecursor_2568

SEQ ID NO: 7080 - DNA, 1055 bp, Zea mays
  Zm_smallRNAprecursor_2569
aagccataagtcgtcggaaataggctatttctgacgaccgaatacttatatgtgacggtactcgtccctcggctgtaaagagtcgaaaatacccttatttccgacggcggtccaacggtctgtgtcggcttatccccgtaactatatctaccattgtaatcgtactaatacgcccggttattggcaacactaggatccaatggtgtccccacgctccagcagttagatgtaagtcaaaatatctcaagtgtatgaagtcagaactcgacactagtatataggagagagaagtaaaaatacactagcagcagagttttcactagctgtctagtttacggcaacataagataatgccatcggtctcggtcatcgaaagcaggttctcagaaacttaccgcaacgcagtagagctggagggggaggggctcgcgcatcgcaccagcgctgcctcggttgcgcttctgagttttttacttgcagacatagcgtagcagaaggaatggaagaggcaggcacaggagagctaacgaggggccaaccacacctcgttcgtgctcctctgcatgccccttccaccgctgctgctacagccaggaactcccagaactagagaggagaagatgctcgacctgccatggctttgcaggccactcgtgcccctatttgtagcactgatgcagtgatgctcgctccagtacgtactactagctggtagctgctgcagtacacctgggaagtaggaagaagagcgcggtggctcctttgtgtactgctccttccttccatgctcgcgaggtttccgagtgtactactagtggtcttgacctgtactgcagcccgagggagacccacccacacacatcccctcggcgagacggtctgcggccacccgtgaccgttgtcgtgacgtgatgttgcgtgcctaccgcccggggtaatctaacagctgaccgtcacatttgacaccaagcagaattttcgtattgagtacataaaattcactgttataaaggtccacatttctataataacaccattcttgagcaccccatgtt

SEQ ID NO: 7081 - DNA, 1055 bp, Zea mays; identical to SEQ ID NO: 7080
  Zm_smallRNAprecursor_2570

SEQ ID NO: 7082 - DNA, 1055 bp, Zea mays; identical to SEQ ID NO: 7080
  Zm_smallRNAprecursor_2571

SEQ ID NO: 7083 - DNA, 1056 bp, Zea mays
  Zm_smallRNAprecursor_2572
cagcaccgcagacgacgcccaataaggtcgtcggagccgacgccgacaatcgtgtgccggtgatggcggcaacagcaggctccggcgggacaatggcggacaaggtgatgacgagcgcggcgaacctggcgcagctgctgccgacgggcacggtgctggcgtaccaggcgctgtcgccgtccttcacgaggcacggcgtggactgcacggcgtccaaccagtggctgacggcggcgctggtgcaatctatgctcaggtaaagaaggtgtcgaggcggatctccaggagttccaggactttgacgagttcgacactaccggaattcggctctttgccgagtgccggcggctttgccgagtgctttttatcgggcactcggcaaagtcgactttgccgagggccgctctcggcagagtcctgcgctcggtaaagatcttgtttaccgagtgcagggcactcggcacagccaagcactcggcaaagactgttttgccgagcgtcaagcactcggcaaacatggctctcggcaaagggccgttagcggccgtctacaactgacggccgtcagcctttgccgagtgtcaaatatctggcactcggcaaagagagtctttgccgagtgtcctatgtagacactcggcaaagcgtatttttattttttttattttggtcaccaaactttttgtggtatgttcctacactatgtagacctacatgtaccattgtgggacgattataacagtgttttctatagctagtacatttagtgtaaatcgtctaggttcatggaggtagactctggtgatggacagaagaagcagctcgacatccccgtgacaatcctacgccaccttccgttcataccgaggatccagcgtctatacatgacagaggaatccgcgaaacagatgacatggcacaaaaaaggcaaacgatacaatcctgacaagatggttcacgcatccgatggtgaagcatggacccactttgatgccattcaccatgagaaagccaaagaggctcgacatgttcgtgttgcgctggccacagatgggt

SEQ ID NO: 7084 - DNA, 1171 bp, Zea mays
  Zm_smallRNAprecursor_2573
tttcctgtccggtctcatctgcgcagacacttggttttgttttttttttttgcatggaatctctgcagtacactttttcagaatcctgcgtcagaaatttgaatttttttgcatcttccctctgctatttctggttctctgaccacactggtcagaaccagctgaactggcccatgggggcggttgaactggtcctgaggaccagctcaactgcctatatatacttgactctccccttctcttctcccacttcattcactctcgccttggtcgcttcacaacctttagagcctctccttcacacacttcaaccggttcacagtttcaccaccttttcaatcatggggcgtcatcgcaacccctctgtggttgagtttagcagcgactccgacgagattcaggaggaatctcccgtcccctctcctccgcctcgtcgctccctctctaagagaggacgtggctctggtcggaaggatgccgagggctcttctatgccttcgcagccgactcgcgggagacgccaaaaggttggcgcctctcgtcctcgtcgtagcacgtcttcctctgggtatgctccctgccaggaggaggatggggcgttcgacgacttcgtcgaccttccggcgcctgatgctctctacgtcaccggactgcacatgcatccggcgaacgtcagccgcggtccgcatgaatctcccgtcgacttcactctgaagggaatagacacccttcagcgtctgaggtttaccaaccctactctcactccttgtcatcctggtgtccaggaccctcggttctggaatcttttccaggctgacttctacaattctgtcattctttccaagaaacacccagtcgtccgacatagatttattgactgggagggttgtgagaatatgggagatgctgacatgtcgtcagctctcgtaaacttagagagaaaggggttacgaaacattatgaccatggaatacccctggaacgatgaggtggtagctcagttctatgccaccctctggataaagaaagtagatgaggaagccgatgggtatgattacccagtcatgtatttcttcatccagggtaactggcacaaagtcaattatcgtcgttttgcccatattctgggcttctctgatgcagacattcagggcagcaacatgcgagtgca

SEQ ID NO: 7085 - DNA, 1058 bp, Zea mays
  Zm_smallRNAprecursor_2574
acacccttcagcgtctgaggtttaccaaccctactctcactccttgtcatcctggtgtccaggaccctcggttctggaatcttttccaggctgacttctacaattctgtcattctttccaagaaacacccagtcgtccgacatagatttattgactgggagggttgtgagaatatgggagatgctgacatgtcgtcagctctcgtaaacttagagagaaaggggttacgaaacattatgaccatggaatacccctggaacgatgaggtggtagctcagttctatgccaccctctggataaagaaagtagatgaggaagccgatgggtatgattacccagtcatgtatttcttcatccagggtaactggcacaaagtcaattatcgtcgttttgcccatattctgggcttctctgatgcagacattcagggcagcaacatgcgagtgcatggcattcggctgcccatgcgggaagagacggaattcattcatgtctctactgagcgggagttctggacaaccgctaacatgcataggtactacaggtaccttaattctttgtcccggatgaccgttctcccgaagggcggtaatcaaatgaacgtccttggggagagtcgagtcttcctcctcctccttgctccaaacagtctcgcccgcatcaatgtgtttgacatgatctgggaagagatcgtccgtgcttcctggtctcctcacagagggtgtcttcatgcaccctttatcatgaagatgatcgaagtggtcacccagacccacttcgaaaaacccgtcaaacactcccgctacgtaccctactgggtcgattcctccaacccagctgctcgtacgaagcgggctccctcacggtctggaggccctgcctcctcctctgagccacctcgccagcctccccatcatccatcctcctctccccccgctgctgcctcgcgtccctctcctggccgcggctctcccatgccacgtgctcgtggtcgaggtcgtggccacgggatgggtgctcgcttggtccatgggtttgcggcatttttctccatgtgc

SEQ ID NO: 7086 - DNA, 1141 bp, Zea mays
  Zm_smallRNAprecursor_2575
acacccttcagcgtctgaggtttaccaaccctactctcactccttgtcatcctggtgtccaggaccctcggttctggaatcttttccaggctgacttctacaattctgtcattctttccaagaaacacccagtcgtccgacatagatttattgactgggagggttgtgagaatatgggagatgctgacatgtcgtcagctctcgtaaacttagagagaaaggggttacgaaacattatgaccatggaatacccctggaacgatgaggtggtagctcagttctatgccaccctctggataaagaaagtagatgaggaagccgatgggtatgattacccagtcatgtatttcttcatccagggtaactggcacaaagtcaattatcgtcgttttgcccatattctgggcttctctgatgcagacattcagggcagcaacatgcgagtgcatggcattcggctgcccatgcgggaagagacggaattcattcatgtctctactgagcgggagttctggacaaccgctaacatgcataggtactacaggtaccttaattctttgtcccggatgaccgttctcccgaagggcggtaatcaaatgaacgtccttggggagagtcgagtcttcctcctcctccttgctccaaacagtctcgcccgcatcaatgtgtttgacatgatctgggaagagatcgtccgtgcttcctggtctcctcacagagggtgtcttcatgcaccctttatcatgaagatgatcgaagtggtcacccagacccacttcgaaaaacccgtcaaacactcccgctacgtaccctactgggtcgattcctccaacccagctgctcgtacgaagcgggctccctcacggtctggaggccctgcctcctcctctgagccacctcgccagcctccccatcatccatcctcctctccccccgctgctgcctcgcgtccctctcctggccgcggctctcccatgccacgtgctcgtggtcgaggtcgtggccacgggatgggtgctcgcttggtccatgggtttgcggcatttttctccatgtgccgcaacatttctgctgatgtccatgaggtggcacggcgtcagcgggagactgacgacaatcttcatcgtcaaacttcctccat

SEQ ID NO: 7087 - DNA, 1057 bp, Zea mays
  Zm_smallRNAprecursor_2576
cacccttcagcgtctgaggtttaccaaccctactctcactccttgtcatcctggtgtccaggaccctcggttctggaatcttttccaggctgacttctacaattctgtcattctttccaagaaacacccagtcgtccgacatagatttattgactgggagggttgtgagaatatgggagatgctgacatgtcgtcagctctcgtaaacttagagagaaaggggttacgaaacattatgaccatggaatacccctggaacgatgaggtggtagctcagttctatgccaccctctggataaagaaagtagatgaggaagccgatgggtatgattacccagtcatgtatttcttcatccagggtaactggcacaaagtcaattatcgtcgttttgcccatattctgggcttctctgatgcagacattcagggcagcaacatgcgagtgcatggcattcggctgcccatgcgggaagagacggaattcattcatgtctctactgagcgggagttctggacaaccgctaacatgcataggtactacaggtaccttaattctttgtcccggatgaccgttctcccgaagggcggtaatcaaatgaacgtccttggggagagtcgagtcttcctcctcctccttgctccaaacagtctcgcccgcatcaatgtgtttgacatgatctgggaagagatcgtccgtgcttcctggtctcctcacagagggtgtcttcatgcaccctttatcatgaagatgatcgaagtggtcacccagacccacttcgaaaaacccgtcaaacactcccgctacgtaccctactgggtcgattcctccaacccagctgctcgtacgaagcgggctccctcacggtctggaggccctgcctcctcctctgagccacctcgccagcctccccatcatccatcctcctctccccccgctgctgcctcgcgtccctctcctggccgcggctctcccatgccacgtgctcgtggtcgaggtcgtggccacgggatgggtgctcgcttggtccatgggtttgcggcatttttctccatgtgc

SEQ ID NO: 7088 - DNA, 1058 bp, Zea mays
  Zm_smallRNAprecursor_2577
cacccttcagcgtctgaggtttaccaaccctactctcactccttgtcatcctggtgtccaggaccctcggttctggaatcttttccaggctgacttctacaattctgtcattctttccaagaaacacccagtcgtccgacatagatttattgactgggagggttgtgagaatatgggagatgctgacatgtcgtcagctctcgtaaacttagagagaaaggggttacgaaacattatgaccatggaatacccctggaacgatgaggtggtagctcagttctatgccaccctctggataaagaaagtagatgaggaagccgatgggtatgattacccagtcatgtatttcttcatccagggtaactggcacaaagtcaattatcgtcgttttgcccatattctgggcttctctgatgcagacattcagggcagcaacatgcgagtgcatggcattcggctgcccatgcgggaagagacggaattcattcatgtctctactgagcgggagttctggacaaccgctaacatgcataggtactacaggtaccttaattctttgtcccggatgaccgttctcccgaagggcggtaatcaaatgaacgtccttggggagagtcgagtcttcctcctcctccttgctccaaacagtctcgcccgcatcaatgtgtttgacatgatctgggaagagatcgtccgtgcttcctggtctcctcacagagggtgtcttcatgcaccctttatcatgaagatgatcgaagtggtcacccagacccacttcgaaaaacccgtcaaacactcccgctacgtaccctactgggtcgattcctccaacccagctgctcgtacgaagcgggctccctcacggtctggaggccctgcctcctcctctgagccacctcgccagcctccccatcatccatcctcctctccccccgctgctgcctcgcgtccctctcctggccgcggctctcccatgccacgtgctcgtggtcgaggtcgtggccacgggatgggtgctcgcttggtccatgggtttgcggcatttttctccatgtgcc

SEQ ID NO: 7089 - DNA, 1186 bp, Zea mays
  Zm_smallRNAprecursor_2578
aaaagatgttccatgaaaaggatagtcggcttacgaggggaaatgaattcggaatcggacatattggtcccccaaatatcctgacggatttggcaatcctgatagaaattatgatcatcagcactttactaagtcaggtgaggcatttctcaaatttcataagttacctttcccccttaaaactacaacttgccctggttggactcctttgggtatctggataaattcaccaggcgtcaattaggtaaaatgatgacaattgaaaatttcttcaatgccattgaaatctacaaccatcccttatgtgacataaaaaagattaggttcccttcaacgctgtcaattctaatttttctttcccttgtgccattgctggttactttgtgtgttagttggcgctgaaaagacaatcatacgccttcgatttttctgtgtattgataaataggcccatgtccagcctactgttcctcttctaaagggcaacgattgttatgcaagcagtccttctgtgcaagcgtgcaagcaaaccatccgatccattagattacgatccaaccacagatacaaccatggtttgttaggggttttttataaagattattgagttggtggtggaagggtttaagtgttaaatgtgacctacggttggatcacgatctaatggatcatatggtttgcttgcacgcttacacagaaggactgcttgcatagcagtcgttgcccttctaaagagcatgcacgttcaatggaacattgtgattatgtctgtcttgacgaaaatataattcttctattaagtatgtataaaaatgaaattctgcagaaaaaatgcacaatcggcgatgtgtgatgggtaaaatagtcacaattggtgctactaaatgatgatttaaaggtgttagcttctaactttactaaaaattagtggtagtggcacagaagggaagaaaatatcctaatggatggcaataaagggacactttttcaatggaacataaggatagttataggttattggcgcaattttctaaaaatgttggggaataaatatattattttaaacttgaaacctatctacttaataagtacacgcagatatgttttgacaaaacagatatttccatgtgcatggagacatgtaattaccaggcattgaaatttgaattgaaataggctccatgcac

SEQ ID NO: 7090 - DNA, 1200 bp, Zea mays
  Zm_smallRNAprecursor_2579
gaaggcccggccgtatatggccaggcgcaagtggacggaccacacagggccccctaaaatttggggctctaacttttattgtgttagatattttaaatatatctgaataggtgagatataactgtatatagaaaaatgaacacgaacagtcatgccatcgccacactacgcaatagactgcaaggcacaaggtagctacaccgatctatatagctcttgtattaagcatatagtcatctctatagtcagcacatagcagcaacatgtactagcaaactgacaaggttgtacgcaagagtttaaaccttacatacgaatgcggtgacttaatcattggttgatttcaacatcatcaggtatatattagccaatcaaacaactagcattcatgttatgaaaagggcaagaaacactacagtaaacgaagaaatttccgacggctaaaaccgtcggacataagataaagaccgtcggagataggttatgtccgacggcattaacttatgtccgacggttttaagccgtcgaggataacgcgtcggaaatagcattatgtccgacggccgccgtcggacatagcttatgtccgacggcgccatcggaccgtcggagataagatgtcgtaaccgttttacccgccgcctgggcccacttctgttatgtccgacggtttaaagccgtcggacataacatataacttatgtccgacggttttaagccgtcggacataacatacaccttatgtccgacggcctacactaaaccgtcggacataacatttttcagaaattgcacaaaattctgaaatttaaaaaatctgacatttgcaaatacaaaacagatttcatacacatatacaaattcacattcacaaatatactcacataagtatacacattcacaaatataatcacttaagcattcacattcacaaatttaacataacgacatagttccaaatggttgcaacaagtgtttacataaacatagttgtccaaaatccaaaatgaacattattcgacggataggctttcacatgaaaggttgcaacaagtgttttacatcattatcactcatatccatcgccacctcctccggctggactatgcgtgctgaaaagattgttcacccacgaatgtgttgtgtcgtcttgaccagacccatctccaggtgcgacaactgaagcgggtggtgtctgaa

SEQ ID NO: 7091 - DNA, 1196 bp, Zea mays
  Zm_smallRNAprecursor_2580
aggcccggccgtatatggccaggcgcaagtggacggaccacacagggccccctaaaatttggggctctaacttttattgtgttagatattttaaatatatctgaataggtgagatataactgtatatagaaaaatgaacacgaacagtcatgccatcgccacactacgcaatagactgcaaggcacaaggtagctacaccgatctatatagctcttgtattaagcatatagtcatctctatagtcagcacatagcagcaacatgtactagcaaactgacaaggttgtacgcaagagtttaaaccttacatacgaatgcggtgacttaatcattggttgatttcaacatcatcaggtatatattagccaatcaaacaactagcattcatgttatgaaaagggcaagaaacactacagtaaacgaagaaatttccgacggctaaaaccgtcggacataagataaagaccgtcggagataggttatgtccgacggcattaacttatgtccgacggttttaagccgtcgaggataacgcgtcggaaatagcattatgtccgacggccgccgtcggacatagcttatgtccgacggcgccatcggaccgtcggagataagatgtcgtaaccgttttacccgccgcctgggcccacttctgttatgtccgacggtttaaagccgtcggacataacatataacttatgtccgacggttttaagccgtcggacataacatacaccttatgtccgacggcctacactaaaccgtcggacataacatttttcagaaattgcacaaaattctgaaatttaaaaaatctgacatttgcaaatacaaaacagatttcatacacatatacaaattcacattcacaaatatactcacataagtatacacattcacaaatataatcacttaagcattcacattcacaaatttaacataacgacatagttccaaatggttgcaacaagtgtttacataaacatagttgtccaaaatccaaaatgaacattattcgacggataggctttcacatgaaaggttgcaacaagtgttttacatcattatcactcatatccatcgccacctcctccggctggactatgcgtgctgaaaagattgttcacccacgaatgtgttgtgtcgtcttgaccagacccatctccaggtgcgacaactgaagcgggtggtgtctg

SEQ ID NO: 7092 - DNA, 1057 bp, Zea mays
  Zm_smallRNAprecursor_2581
ttatactaatcccttcaatgccatcaggttttatagcttcccttcaatgccatcaaatttaaattctaatcccttaaatgccattgccgttagtttcaagttaacgccgttagttatatttaaagcaaatctctctaatgccatcaaaaatctatatcaatctcttcaatgccactagaaattggtttaaactatttggattttaaaaattctagaataaaaaaatatgtaccaattccacactttttaaaaactgcagtacatattattttgtaaacaccaaaaattactccgctatatctgttcggtctatttgattcctaatattttttcaaactaacaacaaacactaatgataacagatggagataaattttaaaatcaatgtggtatatttgcgtttcaaaatttttgggttcaaaaaattttctattctgaaatttttaaaactcaaatagatcgaaccaatttctagtggcattgaagggatcggtatagattttgatggcattggagggatttgctttaaatataactaacggcgttaacttgaaactaacggcaatggcatttaagggattagaatttaaatttgatggcattgaagggaagctataaaatctgatggcattgaagggattggtataagtttggatggcattaaaggaattttctccactatctaatcttggcccctgccggaatgatctatggcccagatcgatttgcgaaccggtacgctattgtctaatccaagtcgtagatgctcgatcctacagcgcacgctacgtcttcctcctcctgcctcgtagccacgacgaagggtaatcccacccgacggcgcactcgccggaggtgcatgactgggtgcatgagtcatgagtgcactcaatccctacttaacttctgctacatgaagggatggctacggcgaacacgtgagggggaaaacttaccagggtattgtagcacggagggccaatccacgaagcgcagcgactccgcggcggagggagaagtccggcgagaaattcgccgcctccccgatcaccacgcc

SEQ ID NO: 7093 - DNA, 1041 bp, Zea mays
  Zm_smallRNAprecursor_2582
atggttaggatttgggaaaggaagacgagagtcctcaaccaagttaaatgtatcaaggatgtgtaacacctaatttctacaaaaataaaaatatgatatattatgtacatgcgatgtgaatgttcacaatcatttaaactcatacaaacctcatgcttaagtgactaaacttaatttacaaattacccataaataaataggtgcatgcatgttggaattttttgcttaactaggaaacacatttggattaaaaatttcaaactaaaccctaaacaagaaaaagagaaaaaagagtattattcccacggtggccccgagaccttgaattctggcccaacagcgtgggcgctcagcccggccacccgcccgaattttttgtattttagcccttaaacagaagtaaaatcacgtttagacctaaaaaaattttaaatgcagttttggaccctttgctcggcgccatagcctatggcgccgagctaacacagaggctatggcgccgaggtcgtgttgcgttggcacaacccagacgcgtggcgtcgacgtggaaccgagctcggcgccacagatcttggcgccgagctcggttgtgttattaaattatttgttgcaaacatgagcacaaagcccatctagcccacttggtagagcacaaggcttctaaccatgtggtcgtgggttcaagccccatagtttgcattttttttgttttttttgtttatgtcgttggtgtgtccgcttaaatttatttctcgcctagattttttttatgtcgttggcgtactgctgatttctaatgatgcatagaatacacatttacctgatatacaatacattagggcgaatcatatatagtctctgtggacggaagagcatgtggcgagccattccgtcccacccggacaaacatgatggactgccgagctgtcccggttcgcatcagccgtgtgtggtcaccgtcaaatgcgacaacgaactcccccttcttgacattttgaagctggaccagctagcgccgaacacagcctacatgtcgctcag

SEQ ID NO: 7094 - DNA, 1041 bp, Zea mays; identical to SEQ ID NO: 7093
  Zm_smallRNAprecursor_2583

SEQ ID NO: 7095 - DNA, 1042 bp, Zea mays
  Zm_smallRNAprecursor_2584
atggttaggatttgggaaaggaagacgagagtcctcaaccaagttaaatgtatcaaggatgtgtaacacctaatttctacaaaaataaaaatatgatatattatgtacatgcgatgtgaatgttcacaatcatttaaactcatacaaacctcatgcttaagtgactaaacttaatttacaaattacccataaataaataggtgcatgcatgttggaattttttgcttaactaggaaacacatttggattaaaaatttcaaactaaaccctaaacaagaaaaagagaaaaaagagtattattcccacggtggccccgagaccttgaattctggcccaacagcgtgggcgctcagcccggccacccgcccgaattttttgtattttagcccttaaacagaagtaaaatcacgtttagacctaaaaaaattttaaatgcagttttggaccctttgctcggcgccatagcctatggcgccgagctaacacagaggctatggcgccgaggtcgtgttgcgttggcacaacccagacgcgtggcgtcgacgtggaaccgagctcggcgccacagatcttggcgccgagctcggttgtgttattaaattatttgttgcaaacatgagcacaaagcccatctagcccacttggtagagcacaaggcttctaaccatgtggtcgtgggttcaagccccatagtttgcattttttttgttttttttgtttatgtcgttggtgtgtccgcttaaatttatttctcgcctagattttttttatgtcgttggcgtactgctgatttctaatgatgcatagaatacacatttacctgatatacaatacattagggcgaatcatatatagtctctgtggacggaagagcatgtggcgagccattccgtcccacccggacaaacatgatggactgccgagctgtcccggttcgcatcagccgtgtgtggtcaccgtcaaatgcgacaacgaactcccccttcttgacattttgaagctggaccagctagcgccgaacacagcctacatgtcgctcaga

SEQ ID NO: 7096 - DNA, 1042 bp, Zea mays; identical to SEQ ID NO: 7095
  Zm_smallRNAprecursor_2585

SEQ ID NO: 7097 - DNA, 1043 bp, Zea mays
  Zm_smallRNAprecursor_2586
atggttaggatttgggaaaggaagacgagagtcctcaaccaagttaaatgtatcaaggatgtgtaacacctaatttctacaaaaataaaaatatgatatattatgtacatgcgatgtgaatgttcacaatcatttaaactcatacaaacctcatgcttaagtgactaaacttaatttacaaattacccataaataaataggtgcatgcatgttggaattttttgcttaactaggaaacacatttggattaaaaatttcaaactaaaccctaaacaagaaaaagagaaaaaagagtattattcccacggtggccccgagaccttgaattctggcccaacagcgtgggcgctcagcccggccacccgcccgaattttttgtattttagcccttaaacagaagtaaaatcacgtttagacctaaaaaaattttaaatgcagttttggaccctttgctcggcgccatagcctatggcgccgagctaacacagaggctatggcgccgaggtcgtgttgcgttggcacaacccagacgcgtggcgtcgacgtggaaccgagctcggcgccacagatcttggcgccgagctcggttgtgttattaaattatttgttgcaaacatgagcacaaagcccatctagcccacttggtagagcacaaggcttctaaccatgtggtcgtgggttcaagccccatagtttgcattttttttgttttttttgtttatgtcgttggtgtgtccgcttaaatttatttctcgcctagattttttttatgtcgttggcgtactgctgatttctaatgatgcatagaatacacatttacctgatatacaatacattagggcgaatcatatatagtctctgtggacggaagagcatgtggcgagccattccgtcccacccggacaaacatgatggactgccgagctgtcccggttcgcatcagccgtgtgtggtcaccgtcaaatgcgacaacgaactcccccttcttgacattttgaagctggaccagctagcgccgaacacagcctacatgtcgctcagaa

SEQ ID NO: 7098 - DNA, 1043 bp, Zea mays; identical to SEQ ID NO: 7097
  Zm_smallRNAprecursor_2587

SEQ ID NO: 7099 - DNA, 1041 bp, Zea mays
  Zm_smallRNAprecursor_2588
atcagcccagttcctccgtgcatactaaaagtcttgtttattctgagtcaggcagtcaggcccatgaggagccggagctgaggcaactcatgcttgcacgatgatttaccggtcttattgtcgccatgcatgattcatgccatgccacacacacatagcatgcacactcctgcacggacacgtcattcgagctaggcgatgcatctggatctagactggagagggaacccgtccaaaccccacccatctatcgcttacagttcgccgtcgtcgtagctatccttatcaccagcacgcataaaaaaaatctaggcgagaaataaatttaagcggacacaccaacgacataaacaaaaaaaatgcaaaatatggggtttgaacccacgaccacatggttagaagccttgtgctctaccaagtgggctagatgggctttgtgctcatgtttgcaacaaatattttaataacacaaccgagctcggcgccaagatctgtggcgccgagctcggttccacgtcgacgccacgcgtctgggttgtgccaacgcaacacgacctcggcgccatagcctatggcgccgagctgtgttagctcggcgccataggctatggcgccgagcaaagggtccaaaactgcatttaaaatttttttaggtctaaacgtgattttacttctgtttaagggctaaaatacaaaaaattcgggccacccgcgcggtgctgacaagtggtagtttggcaatcctatttccacacgatttttattttctaaaaaaaaactaattattttcctttagaaaaataagaatcacttaaaaaataaaattgccaaaatagccctacattattttttcggtaagtacctacgctattaggcgtgaaaaaacggaaataaaagagaaggccacaaagggccttgagtggccccttttttgtcaggccatctagtaggccttggtacaataagccggactcctccacacaggcctagcccaatgagagggttccatggaaaccctaatcctcgcggtatataaccttc

SEQ ID NO: 7100 - DNA, 1040 bp, Zea mays
  Zm_smallRNAprecursor_2589
tcagcccagttcctccgtgcatactaaaagtcttgtttattctgagtcaggcagtcaggcccatgaggagccggagctgaggcaactcatgcttgcacgatgatttaccggtcttattgtcgccatgcatgattcatgccatgccacacacacatagcatgcacactcctgcacggacacgtcattcgagctaggcgatgcatctggatctagactggagagggaacccgtccaaaccccacccatctatcgcttacagttcgccgtcgtcgtagctatccttatcaccagcacgcataaaaaaaatctaggcgagaaataaatttaagcggacacaccaacgacataaacaaaaaaaatgcaaaatatggggtttgaacccacgaccacatggttagaagccttgtgctctaccaagtgggctagatgggctttgtgctcatgtttgcaacaaatattttaataacacaaccgagctcggcgccaagatctgtggcgccgagctcggttccacgtcgacgccacgcgtctgggttgtgccaacgcaacacgacctcggcgccatagcctatggcgccgagctgtgttagctcggcgccataggctatggcgccgagcaaagggtccaaaactgcatttaaaatttttttaggtctaaacgtgattttacttctgtttaagggctaaaatacaaaaaattcgggccacccgcgcggtgctgacaagtggtagtttggcaatcctatttccacacgatttttattttctaaaaaaaaactaattattttcctttagaaaaataagaatcacttaaaaaataaaattgccaaaatagccctacattattttttcggtaagtacctacgctattaggcgtgaaaaaacggaaataaaagagaaggccacaaagggccttgagtggccccttttttgtcaggccatctagtaggccttggtacaataagccggactcctccacacaggcctagcccaatgagagggttccatggaaaccctaatcctcgcggtatataaccttc

SEQ ID NO: 7101 - DNA, 1094 bp, Zea mays
  Zm_smallRNAprecursor_2590
gagaggttgaccttcaggaaaagaggatatatgtcccgtttctgatggttgaagaaccatacttctcgatacccactgtggttccaccagcagtcacaccaactgtgggtgaaacccctgctgcaaatgtggcatcatctagtgcaactactacagagcaagtagcttcaccttctgtgcatagaaagatacaaggctagacttgtggccaaagggttcacacagagagaaggcattgactaccatgaaaccttctcacctgtctcaacaaatattcattcaagatcataatggcactagttgctcattttgatctagagctccatcagatggatgtaaaagacataattcctaaatggagagttagaagaaaatgtgttcatggcacaaccaaagggttttgttgtgagcggtaaagaacacatgggatgtcacttgaggaggtccatttatggattaaaacaggcctccagacagtggtacatcaagtttgattagactataagaaagtttggtttcgaggaaaacaaggaagacaattgcatttatgcaaaatttagaaaaggaaagtatatcttccttgttctgtatgtcgatgacatactcttagctagtagtgataaggatctactagcggaaactaaagggtttctttcctcaaattttgatatgaaagacatgggagaagcctcctatgtttttggaatagaaattcacagagatagacaaaagggagtattaggactttcacagaagtcatatatagaaaatgtactaaagaggtataatatgcacaagtgtaatgcctcgcctggtccaatagtcaagggtgataagtttggggaatatccgtgtcccaagaatcagtatgagaaaaacaagatgaagtcagtaccatatgcttcaactatcagaagcattatgtatgctcaagtatgtactcaccctgacttagcttttaccaccgggatgcttggacactatcagaagaatccaggcatagaacactgaaaagcagtcaagaaggctctaaggtaccttcaaggtactaaaggtcccatgcttacgtacagaagatctaattccctacaaat

SEQ ID NO: 7102 - DNA, 1174 bp, Zea mays
  Zm_smallRNAprecursor_2591
tctctttctctgtggtttatggtcgatttagttccattttggaagttgaacatatatgttcatatagctgcagcacaaaagataaatgtaggcagtgcctattagtttactaatgttatgaagtagtggtttatgattgttgagtgattaatttggacatgattgatgaccatatttatgtgaaaaatatgatccagtaagtatataaaaagtgaaatgcattacagtttatttgaataatatatagtagcacgaagtcatgagcagcacacttgtttccacatcaaaatatcaacccctacttcataaaggtatgtataattcacatcattgcatatatcttcacccacacaatttgagcatacaatgagtctaaaagaacaggtccgtgaacctttatcaaagctaaaggctctatgataaataactgaaccataatcgcacaagaacagtaagatcaatgaagaccgttggtgggcatgtaaaatacctataggacgcggtggcggaggattgacagcagcggccggctcgacgacactgtcaacggcggcgccgattagggttgagttcgcgcggagacaaatgaaggcgattcacactgccggagtggggaaggagattaggaagttgcattgtaaagcataaaattaaaaaatcaactcgagcaccttggaatccggacgacatagcgaccgcggacgtgagccaatgtgacgcggggcgcgcaagattgacaacggcagcggctcgacgatgatgtcaacggcggcgacgattaatgttgagggcgtgcggcggtggaggacggcgaaacgggctggcggcggcggatgaacaagaatcgcccaggcgaccgctgaagaaacgcggcgagtcggccaggatggttgaccgcgcgggggttagggtatagaagtgtttgaccgcgtgggaagtggggtagtgggcccattcctttatttctggaacgtgggtcggctgaagtagttatgctaaatcactattatgtataaacggaagaatggaataacgtaaacatgtagggctcgcggttgttactctgtttacgctaaaatgggtttccgtttacgctaaatctgttcgcttgcgtaaaaagtgatcggacgtgggctggggctctctacagttatatagagcccagggctcttaa

SEQ ID NO: 7103 - DNA, 1060 bp, Zea mays
  Zm_smallRNAprecursor_2592
gatctcggtgtataacgcgcttctcgttatgcaaatagatcagtccttttagcatctgcacaaggaaggcgcaatttcaattataaggttcatgtaatgatagtgtagcattttagttttagcggaaagattattcatagcttctgccacatgtcactagcctgcgtacagatagcagcgaggtaggcctctggaatggttttaacagtcttcaggaaatctgcaagggagccaccatccatgtattccaaaacaatagaaatggcaccattgaaatagaaacactgatagaacacaacaacatattggcactgtgttgataagtttatcttcaactccttggcaatctgtttgcgtatactctcatcaatatttagttgaataacctgcaaacacagtggcagacgatgaaggagaagaccatttacaacagttaggaagattacacaaagaagatactccctccgttcttttttatttgtcgcggtttagttcaaaaataaactagcggacgacaaatattcgagaccggaggtagttctacctccgttgtcgaatatttgtcgtccgctagtttatttttgaactaaaccatgacaaataaaaaagaatggagggagtacaatgcagagatcgttctaaagtcttgactgtaaagaaccataaataagcagcatcaaagaatgattgtgtcagatataccttcagagcaaaaaactggccagtaaatttgtggcggaccaattgcacatttccgctgctacctttcccgatatcacttttataacgtctagatcatctaagctcagttgactatccaacggctctataggaggagcctgaagaacattttttagcaagtcagaaaaaagtgtgcgaacagtatcagaaatttttaataggtaaataaaaattaaaacaccaacaatggtattgttatgactggcatcacctatcagcagtaccaacgcatcagttgcccaattatcgtttgattggtttatttcccaattagctcccataaaaataggtgatgagatcttagattggtgtaagggtg

SEQ ID NO: 7104 - DNA, 1141 bp, Zea mays
  Zm_smallRNAprecursor_2593
tttatctcgcgtcaaaccgaaatacaggaaaatattcattgcgtataagttgtttgaatcaccagctgccatgggagcaaagctgatacgacgaattcctcacaattcttcatgcctcgtacaaatcatatgttcctccctagcctagcattaatttgactagtatataggaacaaatgcgtttgagaggggatatctttacagttctatccggcttgtgtgacggaaaatgacaaaacgtgccaaggcaaagtgttctgggccgactaaaagtatttatttcgtcgagagaagcaacgaagcccactcctccgagacactgttccctcccacgtgacctgtcatttagcaccacctcggcagtctcagtctgttcgtaccagcttaaatattcttcgtgactgcctggtctagccgagttctgtagctggagcttgtaacccgagcgggggcattaaggtggcgcggatgctttgcgatggtttctgggcctgggctcgttgtgactctagccggcttgcccatcccaagttggtagtgtctgacggggctctagcgaaagctttgggtctctgcagacctacagcggcaggaatggcgtaaggctggcttcacagagcagcgatcactgcccacttccaacggtgggaggataacaagccgctgcactttgagcccaacacagacccagatcctctcttagcaaaccaccatcttttttatttttgcccctgttcggacaactcatttttctttgtgaaaaaattcggctactgtttgttggtgggagagagaaaaagattatattttgaagttttgaggtcagtttccatccggcttgtgtgacggaaaatgacaaaacgtgccaaggcaaagtgttctgggccgactaaaagtatttatttcgtcgagagaagcaacgaagcccactcctccgagacactgttccctcccacgtgacctgtcatttagcaccacctcggcagtctcagtctgttcgtaccagcttaaatattcttcgcgaccgcctggtctcgccgagttctgtagctagagcttgttacccgagcgggggcattaaggtggcgcggatgctttgcgaatgtttctgggtctgggctcgttgtgacactggccggct

SEQ ID NO: 7105 - DNA, 1140 bp, Zea mays
  Zm_smallRNAprecursor_2594
ttatctcgcgtcaaaccgaaatacaggaaaatattcattgcgtataagttgtttgaatcaccagctgccatgggagcaaagctgatacgacgaattcctcacaattcttcatgcctcgtacaaatcatatgttcctccctagcctagcattaatttgactagtatataggaacaaatgcgtttgagaggggatatctttacagttctatccggcttgtgtgacggaaaatgacaaaacgtgccaaggcaaagtgttctgggccgactaaaagtatttatttcgtcgagagaagcaacgaagcccactcctccgagacactgttccctcccacgtgacctgtcatttagcaccacctcggcagtctcagtctgttcgtaccagcttaaatattcttcgtgactgcctggtctagccgagttctgtagctggagcttgtaacccgagcgggggcattaaggtggcgcggatgctttgcgatggtttctgggcctgggctcgttgtgactctagccggcttgcccatcccaagttggtagtgtctgacggggctctagcgaaagctttgggtctctgcagacctacagcggcaggaatggcgtaaggctggcttcacagagcagcgatcactgcccacttccaacggtgggaggataacaagccgctgcactttgagcccaacacagacccagatcctctcttagcaaaccaccatcttttttatttttgcccctgttcggacaactcatttttctttgtgaaaaaattcggctactgtttgttggtgggagagagaaaaagattatattttgaagttttgaggtcagtttccatccggcttgtgtgacggaaaatgacaaaacgtgccaaggcaaagtgttctgggccgactaaaagtatttatttcgtcgagagaagcaacgaagcccactcctccgagacactgttccctcccacgtgacctgtcatttagcaccacctcggcagtctcagtctgttcgtaccagcttaaatattcttcgcgaccgcctggtctcgccgagttctgtagctagagcttgttacccgagcgggggcattaaggtggcgcggatgctttgcgaatgtttctgggtctgggctcgttgtgacactggccggct

SEQ ID NO: 7106 - DNA, 1140 bp, Zea mays; identical to SEQ ID NO: 7105
  Zm_smallRNAprecursor_2595

SEQ ID NO: 7107 - DNA, 1138 bp, Zea mays
  Zm_smallRNAprecursor_2596
tatctcgcgtcaaaccgaaatacaggaaaatattcattgcgtataagttgtttgaatcaccagctgccatgggagcaaagctgatacgacgaattcctcacaattcttcatgcctcgtacaaatcatatgttcctccctagcctagcattaatttgactagtatataggaacaaatgcgtttgagaggggatatctttacagttctatccggcttgtgtgacggaaaatgacaaaacgtgccaaggcaaagtgttctgggccgactaaaagtatttatttcgtcgagagaagcaacgaagcccactcctccgagacactgttccctcccacgtgacctgtcatttagcaccacctcggcagtctcagtctgttcgtaccagcttaaatattcttcgtgactgcctggtctagccgagttctgtagctggagcttgtaacccgagcgggggcattaaggtggcgcggatgctttgcgatggtttctgggcctgggctcgttgtgactctagccggcttgcccatcccaagttggtagtgtctgacggggctctagcgaaagctttgggtctctgcagacctacagcggcaggaatggcgtaaggctggcttcacagagcagcgatcactgcccacttccaacggtgggaggataacaagccgctgcactttgagcccaacacagacccagatcctctcttagcaaaccaccatcttttttatttttgcccctgttcggacaactcatttttctttgtgaaaaaattcggctactgtttgttggtgggagagagaaaaagattatattttgaagttttgaggtcagtttccatccggcttgtgtgacggaaaatgacaaaacgtgccaaggcaaagtgttctgggccgactaaaagtatttatttcgtcgagagaagcaacgaagcccactcctccgagacactgttccctcccacgtgacctgtcatttagcaccacctcggcagtctcagtctgttcgtaccagcttaaatattcttcgcgaccgcctggtctcgccgagttctgtagctagagcttgttacccgagcgggggcattaaggtggcgcggatgctttgcgaatgtttctgggtctgggctcgttgtgacactggccggc

SEQ ID NO: 7108 - DNA, 1139 bp, Zea mays
  Zm_smallRNAprecursor_2597
tatctcgcgtcaaaccgaaatacaggaaaatattcattgcgtataagttgtttgaatcaccagctgccatgggagcaaagctgatacgacgaattcctcacaattcttcatgcctcgtacaaatcatatgttcctccctagcctagcattaatttgactagtatataggaacaaatgcgtttgagaggggatatctttacagttctatccggcttgtgtgacggaaaatgacaaaacgtgccaaggcaaagtgttctgggccgactaaaagtatttatttcgtcgagagaagcaacgaagcccactcctccgagacactgttccctcccacgtgacctgtcatttagcaccacctcggcagtctcagtctgttcgtaccagcttaaatattcttcgtgactgcctggtctagccgagttctgtagctggagcttgtaacccgagcgggggcattaaggtggcgcggatgctttgcgatggtttctgggcctgggctcgttgtgactctagccggcttgcccatcccaagttggtagtgtctgacggggctctagcgaaagctttgggtctctgcagacctacagcggcaggaatggcgtaaggctggcttcacagagcagcgatcactgcccacttccaacggtgggaggataacaagccgctgcactttgagcccaacacagacccagatcctctcttagcaaaccaccatcttttttatttttgcccctgttcggacaactcatttttctttgtgaaaaaattcggctactgtttgttggtgggagagagaaaaagattatattttgaagttttgaggtcagtttccatccggcttgtgtgacggaaaatgacaaaacgtgccaaggcaaagtgttctgggccgactaaaagtatttatttcgtcgagagaagcaacgaagcccactcctccgagacactgttccctcccacgtgacctgtcatttagcaccacctcggcagtctcagtctgttcgtaccagcttaaatattcttcgcgaccgcctggtctcgccgagttctgtagctagagcttgttacccgagcgggggcattaaggtggcgcggatgctttgcgaatgtttctgggtctgggctcgttgtgacactggccggct

SEQ ID NO: 7109 - DNA, 1139 bp, Zea mays; identical to SEQ ID NO: 7108
  Zm_smallRNAprecursor_2598

SEQ ID NO: 7110 - DNA, 1156 bp, Zea mays
  Zm_smallRNAprecursor_2599
gcagcgatcactgcccacttccaacggtgggaggataacaagccgctgcactttgagcccaacacagacccagatcctctcttagcaaaccaccatcttttttatttttgcccctgttcggacaactcatttttctttgtgaaaaaattcggctactgtttgttggtgggagagagaaaaagattatattttgaagttttgaggtcagtttccatccggcttgtgtgacggaaaatgacaaaacgtgccaaggcaaagtgttctgggccgactaaaagtatttatttcgtcgagagaagcaacgaagcccactcctccgagacactgttccctcccacgtgacctgtcatttagcaccacctcggcagtctcagtctgttcgtaccagcttaaatattcttcgcgaccgcctggtctcgccgagttctgtagctagagcttgttacccgagcgggggcattaaggtggcgcggatgctttgcgaatgtttctgggtctgggctcgttgtgacactggccggcttgcccatcccaagttggtagtgtctggcggggctctagcgtctctgcagacctggagtggcaggaatggcgtgaggctggcttcacagagcagcgaacactgtccacttccaacggtgggaggataacaagagccgctgcactttgaacccaacacaggcccagaacctcactaagcaaaccaccatcttttttcatttttgccctgttctaccactcattttcctttgtgaaaaattgcgcctaacgtgttttaattttgcatatgtttctttctgggtttcacatctgatttacctttgttactagattctatcattagtcttttctttcgttgttgatactgtttgtttggtgggagggagaaaaagattatattttgaagttttgaggtcagtcatgtctttaaatgtattcagttgggcactgttgcttgtcggccacactcggagtaatcacacttccactcattttatttaagtgttggagatgagagtgacgtctcatggccggtgagagtcgaagaatggttgagagcgaaacacagcagtcgaagaacagtctgcattttttttcaattgtatttaaccaaactggctaaaacaaagtggtgatcgacgccctacaagtacgc

SEQ ID NO: 7111 - DNA, 1172 bp, Zea mays
  Zm_smallRNAprecursor_2600
cttttgccgtccggtctcatctgcgcagacacttggttttgtttttttttttgcatagaatccctgcagtacactttttcagaatcctgtgtcagaaatttgaatttttggcatcttccctctgctgtttctggttctctgaccacactggtcagaaccagctgaactggcccatgggggcggttgaaccggtcctgaggaccagctcaactgcctatatatacttgactctccccttctcttctcccacttcattcactctcgccttagtcgcttcgcaacctttagagcctctctttcacacacctcaaccggttcacagtttcaccaccttttcaatcatggtgcgtcgtcgcaacccctctgtggttgagtttagcagcgactccgacgagattcaggaggaatctcccgccccctctcctccgcctcgtcgctccctctctaagagaggacgtggctctggtcggatggatggcgagggctcttccatgccctcgcagccgactcgcgggagacgccaaaaggttggcgcctctcgtcctcgtcgtagcacgtcttcctctgggtatgctccctgccaggaggaggatggggctttcgacgacttcgtcgaccttccgacgcctgatgctctctacgtcaccggactgcacatgcatcccggcgaacgtcagccgcggtccgcatgaatctcccgtcgacttcactctgaagggaatagacaccctttcagcgcctgaggttcaccaaccctactctcactcctcgtcatcctggtgtccaggaccctcggttctggaatcttttccaggctgacttctacaattctgtcattctttccaagaaacacccagtcgtccgacatagatttattgactgggagggttgtgagaatatgggagatgctgacatgtcgtcagctctcgtaaacttagagagaaatgggttacgaaacattatgaccatggaatacccctggaacgatgaggtggtagctcagttctatgccaccctctggataaagaaagtagatgagaaagccgatgggtatgattacccagtcatgtatttcttcatccagggtaactggcacaaagtcagttatcgtcgttttgcccatattctgggcttctctgatgcagatattcagggcagcaacatgcgagtgc

SEQ ID NO: 7112 - DNA, 1148 bp, Zea mays
  Zm_smallRNAprecursor_2601
atatccatcggcttcctcatctactttctttatccagagggtggcatagaactgagctaccacctcatcgttccaggggtattccatggtcataatgtttcgtaacccatttctctctaagtttacgagagctgacgacatgtcagcatctcccatattctcacaaccctcccagtcaataaatctatgtcggacgactgggtgtttcttggaaagaatgacagaattgtagaagtcagcctggaaaagattccagaaccgagggtcctggacaccaggatgacgaggagtgagagtagggttggtgaacctcaggcgctgaagggtgtctattcccttcagagtgaagtcgacgggagattcatgcggaccgcggctgacgttcgccggatgcatgtgcagtccggtgacgtagagagcatcaggcgtcggaaggtcgacgaagtcgtcgaaagccccatcctcctcctggcagggagcatacccagaggaagacgtgctacgacgaggacgagaggcgccaaccttttggcgtctcccgcgagtcggctgcgagggcatggaagagccctcgccatccatccgaccagagccacgtcctctcttagagagggagcgacgaggcggaggagaggggacgggagattcctcctgaatctcgtcggagtcgctgctaaactcaatcacagaggggttgcgacgacgcaccatgattgaaaaggtggtgaaactgtgaaccggttgaggtgtgtgaaagagaggctctaaaggttgcgaagcgactaaggtgagagtgaatgaagtgggagaagagaagggagagtcaagtatatatacgcagttgagctggtcctcaggaccggttcaaccgcccccatgggccagttcagctggttctgaccagtgtggtcagagaaccagaaacagcagagggaagatgccaaaaattcaaatttctgacacaggattctgaaaaagtgtactgcagggattctatgcaaaaaaaaacaaaaccaagtgtctgcgcagatgagaccggacggcaaaagaaaaggaactgcgcaaaagaaaagttctgcgcgccctgtatccctcacactgcagcacgaaagtgacagaaaaaaatagtttccttgctgcgcgggtga

SEQ ID NO: 7113 - DNA, 1096 bp, Zea mays
  Zm_smallRNAprecursor_2602
cacacggcagtagagtggggctgtgacaaaaaaaaaactgtgcgcgcagctgctggaagcgactggacaggaaaaaaaactggcgagaaaaaaatctgtagcatggcgtgcgggctgagcagaagcgtccaaaaaaaaatctgcgcgcgcccagcagaggagaagtgaccggacagaaaaaagattctgcatgcacaccgctgctgaccggactccacaaaaaaaaaatctgtgcgcgcattgacgctagagcacagcggatactgcatggcgccctgacatttgcatgcaaactgagaccagacagccctcaaataaaaagttctggcgctctgacacggcggtggagaagcgaccggacagaaaaaaatggcgcgcacagaccctgctgagcggcagcaagcagaagaaaaaaaatctgagcgcccagcagaggaagtgaccgttcaaaataaatgttgcgcgccctgcagagataagaaaaaaaggtgatgcgcgccctgcaggatgcgaccggattaaaaaatttgcacgtcaggctgccagcagaagtggaagcgaccggtcaagagagaaaaagatgctgcgcgactgaaaaaaggtgcagctgacagacctgcgcgaacaggcctgcgcggacagacctgcgcggacagacctgtcagagaacggttcaaccggtccactatgccggttcaaccggttttaaccaggatggtcctggtaaaaaaactggttaaaagcagctgagctgaagttcagctccgaagttcagctgatcaagccagttgagcccaaaaaaaatcttagcactaaaatgcattcgaattttaacattttcaccaagtttttgaaagatcatcacaaagctttaaaactatcaatcaaaaatagtgaatcaaacaaattttgtgaccgttttcaagttaagttacgagaatccaagatatttaattcactcctaagaaagcaaaacctagtctcatcgaggggttttgtgaagatatcggctagttgattttcggtgctcacatgaaacaatttgatatcttctttggcttcgtggtctctcaagaaatggtgtctgatgtcaata

SEQ ID NO: 7114 - DNA, 1141 bp, Zea mays
  Zm_smallRNAprecursor_2603
agaaggtacataaagtacgtctctcaacaacagtacaaaaccattatgtaatttaagatgtagatctccaatggcctcggctgctgcttcaactccatttgccactctaattgttcttcggccctttgggagcctttagcttgtacggagttcctgtagagagtttgcaacatgaacagttgcacctgagtcaatccaccaagaataactgggatattctaagtataaagactcatttacaaaagtaacttggtccttaccactctctagtagatactgcaggaattcagggcactttctcttgtaatgacctgtcttcttgcaatagaggcatgtatcagggggaactgaaaaactgcctccttgtcttggctgattattgttgctcaaggaagcctggttattctgtttaccttgcttcttgaactttttctttgagttcttgttctgtctggggatattgcctttgatgaggttgactgagtctccagtctgctttaacctctcttcctcctggacacactgtgccaagagttggtctatattccacttatcagtgacactggtgttgtactgtatgtgaaaagtctcaaactccttaggcagagacttcattatcataaacactacaaattcctcgtgtaaaggagacccgaggtacttgtttatcttagctacgatggatatcattttctaaatgaatggtctgacaccatttccatcgtattttgcattgacaaattctgtcattagagagcaagcataagccttagaagacccttggtgatgagaggctaccctctcaaggtattctttggcagtctcgcactctggtatggaactcttaagaggctccttgatgctcctcttaagaataatcatacatttgtcatttgatctctcccacttgaccttgtcgatgctgtattgcatccacctgtggtcatagttgggagtgcccactgtgggctcaactggtttatcaaacctcagtgcgtaatctatctcacccactgtggttatcatgtctatatcctcccgccaagaatggtaattactaccatctagcggtttcatctgagcaatctggctaatcagcatggcggtatgagcacctttgcaaaattaaaatagaaaatat

SEQ ID NO: 7115 - DNA, 1160 bp, Zea mays
  Zm_smallRNAprecursor_2604
acttggtccttaccactctctagtagatactgcaggaattcagggcactttctcttgtaatgacctgtcttcttgcaatagaggcatgtatcagggggaactgaaaaactgcctccttgtcttggctgattattgttgctcaaggaagcctggttattctgtttaccttgcttcttgaactttttctttgagttcttgttctgtctggggatattgcctttgatgaggttgactgagtctccagtctgctttaacctctcttcctcctggacacactgtgccaagagttggtctatattccacttatcagtgacactggtgttgtactgtatgtgaaaagtctcaaactccttaggcagagacttcattatcataaacactacaaattcctcgtgtaaaggagacccgaggtacttgtttatcttagctacgatggatatcattttctaaatgaatggtctgacaccatttccatcgtattttgcattgacaaattctgtcattagagagcaagcataagccttagaagacccttggtgatgagaggctaccctctcaaggtattctttggcagtctcgcactctggtatggaactcttaagaggctccttgatgctcctcttaagaataatcatacatttgtcatttgatctctcccacttgaccttgtcgatgctgtattgcatccacctgtggtcatagttgggagtgcccactgtgggctcaactggtttatcaaacctcagtgcgtaatctatctcacccactgtggttatcatgtctatatcctcccgccaagaatggtaattactaccatctagcggtttcatctgagcaatctggctaatcagcatggcggtatgagcacctttgcaaaattaaaatagaaaatatttaggacatctaaaataaatactgaatattgaatcatagaacatgcatgaattaaatattcaacgttggtcaaataataaccatgtcatatctatgaaaatttcttatcacaaaaattctaaaccatcgttggatgatctagaaaacataaacttgtattaaattgtggtaacaatatccaacgttggttaaaatattcaatcatcacaaaatttctgaattctatgcaatttaaacaataattaattcacgttggtttcataata

SEQ ID NO: 7116 - DNA, 1048 bp, Zea mays
  Zm_smallRNAprecursor_2605
gcaactgagcacaacaagcaccatcagctatgtattcggcctcggcagtgaaaagtgcaacacagttttgcttcttagagctccaagacaccagggaccgcccaaggaattggcaagtccccgaggtgctttttcgatctactttacaactggcatagtctgaatcagagtagccaaataaatcgaaaaaggagcccttgggataccaaagacctagattttgggtgtgaactagatatctcaaaattctcttaacggccactaagtgacactcttttgggctagcttgaaaacgggcacacatgcacacactaagcatgatatctggcctagatgcacataaatatagtagagatcctatcattgatctataaagcttttgatctacagttttaccttcttcatttaagtcgagatgaccacttgaagccattggtgtcttggcgtgctttgccttttccatgccaaactttttgagcatgtcttgtgtgtacttagtttggcacagaaaggttccttccttgagttgtttaacttgaaaacccaggaagtacttgagctcacccatcatggacatctcaaacctatttgtcataaccctactaaattcctcacaaaaagtttcatcagtactgccaaatataatgtcgtcgacatatatttgacaaacaaataattgattgtcaactttgcgagtgaataaagtagagtctacttttcctatttcaaaaccatttttaagcaagaaatctttaaggcaatcataccaagctctaggggcttgtttaagcccgtagagtgccttgtgaagtaggtaaacatggtttggcttctttggatcttcaaagcccggtggttgctccacatagatcctctcttgtagtggtccatttagaaatgcgctcttgacatccatttgatataacttgaaatcatggttagtagcataggcaattaatattctaattgactctaaccttgctaccggcgcatatgtttcaccaaaatcaagtccttccacttgagtgtagccttgggcaaccaaccg

SEQ ID NO: 7117 - DNA, 1154 bp, Zea mays
  Zm_smallRNAprecursor_2606
cagagtagccaaataaatcgaaaaaggagcccttgggataccaaagacctagattttgggtgtgaactagatatctcaaaattctcttaacggccactaagtgacactcttttgggctagcttgaaaacgggcacacatgcacacactaagcatgatatctggcctagatgcacataaatatagtagagatcctatcattgatctataaagcttttgatctacagttttaccttcttcatttaagtcgagatgaccacttgaagccattggtgtcttggcgtgctttgccttttccatgccaaactttttgagcatgtcttgtgtgtacttagtttggcacagaaaggttccttccttgagttgtttaacttgaaaacccaggaagtacttgagctcacccatcatggacatctcaaacctatttgtcataaccctactaaattcctcacaaaaagtttcatcagtactgccaaatataatgtcgtcgacatatatttgacaaacaaataattgattgtcaactttgcgagtgaataaagtagagtctacttttcctatttcaaaaccatttttaagcaagaaatctttaaggcaatcataccaagctctaggggcttgtttaagcccgtagagtgccttgtgaagtaggtaaacatggtttggcttctttggatcttcaaagcccggtggttgctccacatagatcctctcttgtagtggtccatttagaaatgcgctcttgacatccatttgatataacttgaaatcatggttagtagcataggcaattaatattctaattgactctaaccttgctaccggcgcatatgtttcaccaaaatcaagtccttccacttgagtgtagccttgggcaaccaaccgtgctttgtttcttgtaaccacgccatgttcatcttgtttgttcctaaagacccaatttgtcccaatcacattttgtttgggtctttggactaaggactaaacttcattctgggtgaagttgttcaactcctcttgcatggcaattatccaatctggatcacccaatgcttcttcaaccttaagtggctcaagagaggaaacaaacgagtaaaattcacaaaaattagctaaacgagatcgagttgttacccctctcctgatgctacacagg

SEQ ID NO: 7118 - DNA, 1126 bp, Zea mays
  Zm_smallRNAprecursor_2607
atgtctctgtcatcaacgtatccactggctgagacacgaagccgtggatagcttcctttatggccgtgtccacgcttccgcatctcatattttttcttatcaaaagatgcatcgacgttcaccatcacttttccctcaggaggtttctatcatccgtgctgtatttttgtttctttgttccttgtttgttgctagcttggagtaatttctttgtagagctggagctccccagcaatgtccttaatattaacggcctctttaatctgaaaacggaaaaataaagaagagagaaacgggagaagaagaaagaaaggatggagagcaagtgggtcctgtggcatggaggaacatggagcacagaaaagagtagtaatataatgtgatggaacggccggaattgagatggtgctcataagatacggtgtcgtggagggaaaccgttccacccatctcaatgacaccgtatcttatgagcaaggagccctgctgctcccatgagcaaaatcaatccagaccacatcctccacatccaacggtgctgcgttaggggggttttgtaaaatgtacagagttgcaaagaacattttacaaaaccccctgatatagcaccgttggatgtggagggtgtggtctggattgattttgctcatgggagcaccaacgctctttgcgcacaagatacgttctctccctccacaaccacttgctcctcatctacttttctcctccgccttccactcatccttgctcctgcctgccgtcgtgcatcatcatctccggccagggccagggcattcgtctccgcctccggtccggcctcctccacaccgcgccccccccccccccccagacgcgtcgctgcgtagctgctggccgccatggccaccgtcatggccgcggccgtctagtccttcccgtcctcctcggccgtcgtcgccaaggcgtcgccggcgtccccctgtgccgccccgcacttccgcccgagggccgtgcgggccgctatccgggcgcaggcgtccgccgtcgaggcgcccgccacggccaaggccaagaaggagtccaagaagcaggaggagggcgtcgtcaccaacctatacaagcccaaggagccgtacgtcggcaggtg

SEQ ID NO: 7119 - DNA, 1116 bp, Zea mays
  Zm_smallRNAprecursor_2608
tctgtcatcaacgtatccactggctgagacacgaagccgtggatagcttcctttatggccgtgtccacgcttccgcatctcatattttttcttatcaaaagatgcatcgacgttcaccatcacttttccctcaggaggtttctatcatccgtgctgtatttttgtttctttgttccttgtttgttgctagcttggagtaatttctttgtagagctggagctccccagcaatgtccttaatattaacggcctctttaatctgaaaacggaaaaataaagaagagagaaacgggagaagaagaaagaaaggatggagagcaagtgggtcctgtggcatggaggaacatggagcacagaaaagagtagtaatataatgtgatggaacggccggaattgagatggtgctcataagatacggtgtcgtggagggaaaccgttccacccatctcaatgacaccgtatcttatgagcaaggagccctgctgctcccatgagcaaaatcaatccagaccacatcctccacatccaacggtgctgcgttaggggggttttgtaaaatgtacagagttgcaaagaacattttacaaaaccccctgatatagcaccgttggatgtggagggtgtggtctggattgattttgctcatgggagcaccaacgctctttgcgcacaagatacgttctctccctccacaaccacttgctcctcatctacttttctcctccgccttccactcatccttgctcctgcctgccgtcgtgcatcatcatctccggccagggccagggcattcgtctccgcctccggtccggcctcctccacaccgcgccccccccccccccccagacgcgtcgctgcgtagctgctggccgccatggccaccgtcatggccgcggccgtctagtccttcccgtcctcctcggccgtcgtcgccaaggcgtcgccggcgtccccctgtgccgccccgcacttccgcccgagggccgtgcgggccgctatccgggcgcaggcgtccgccgtcgaggcgcccgccacggccaaggccaagaaggagtccaagaagcaggaggagggcgtcgtcaccaacctatacaagcccaaggagccgtacgtcggc

SEQ ID NO: 7120 - DNA, 1068 bp, Zea mays
  Zm_smallRNAprecursor_2609
gaatgaattccgtctcttcccgcatgggcagccgaatgtcatgcactcgcatgttgctgccctgaatatctgcatcagagaagcccaaaatgtgggcaaaacgacgataactgactttgtgccagttaccctggatgaagaaatacatgactgggtaatcatacccatcggcttcctcatctactttctttatccagagggtggcatagaactgagctaccacctcatcgttccaggggtattccatggtcataatgttccataacccctttctctctaagtttacgagagctgacgacatgtcagcatctcccatattctcacaaccctcccagtcaataaatctatgtcggacgactgggtgtttcttggaaagaatgacagaattgtagaagtcagcctggaaaagattccagaaccgagggtcctggacaccaggatgacgaggagtgagagtagggttggtaaacctcagacgctgaagggtgtctattcccttctgagtgaagtcgacgggagattcatgcggaccgcggctgatgttcgccggatgcatgtgcagtccggtgacgtagagagcatcaggcgctggaaggtcgacgaagtcgtcgaaagccccatcctcctcctggcagggagcatacccagaggaagacgtgctacgacgaggacgagaggcgccaaccttttggcgtctcccgcgagtcggctacgagggcatggaagagccctcgccatccatccgaccagagccacgtcctctcttagagagggagcgacgaggcggaggagaggggacgggagattcctcctgaatctcgtcggagtcgctgctaaactcaatcaccgagggattgcgacgacacaccatgattgaaaaggtggtgaaactgcgaaccggtggaagtgtgtgaaggagaggctctaaaggttgtgaagcgactaaggcgagagagaatgaagtgggagaagagaagaggagagtcaagtatatataggcagttgagctggtcctcaggaccagttcaaccgcccccatgggccagttcagctggttctgaccagtgt

SEQ ID NO: 7121 - DNA, 1148 bp, Zea mays
  Zm_smallRNAprecursor_2610
atacccatcggcttcctcatctactttctttatccagagggtggcatagaactgagctaccacctcatcgttccaggggtattccatggtcataatgttccataacccctttctctctaagtttacgagagctgacgacatgtcagcatctcccatattctcacaaccctcccagtcaataaatctatgtcggacgactgggtgtttcttggaaagaatgacagaattgtagaagtcagcctggaaaagattccagaaccgagggtcctggacaccaggatgacgaggagtgagagtagggttggtaaacctcagacgctgaagggtgtctattcccttctgagtgaagtcgacgggagattcatgcggaccgcggctgatgttcgccggatgcatgtgcagtccggtgacgtagagagcatcaggcgctggaaggtcgacgaagtcgtcgaaagccccatcctcctcctggcagggagcatacccagaggaagacgtgctacgacgaggacgagaggcgccaaccttttggcgtctcccgcgagtcggctacgagggcatggaagagccctcgccatccatccgaccagagccacgtcctctcttagagagggagcgacgaggcggaggagaggggacgggagattcctcctgaatctcgtcggagtcgctgctaaactcaatcaccgagggattgcgacgacacaccatgattgaaaaggtggtgaaactgcgaaccggtggaagtgtgtgaaggagaggctctaaaggttgtgaagcgactaaggcgagagagaatgaagtgggagaagagaagaggagagtcaagtatatataggcagttgagctggtcctcaggaccagttcaaccgcccccatgggccagttcagctggttctgaccagtgtggtcagagaaccagaaacagcagagggaagatgcccaaaaaaaattcaaatttcttgctgcgcgggtgacacagcgactggtcaggaaaaatttgcgcccctgacacgcatgcatggctagtgcgcgggcagagcagaaatgtccaagaaaaatgctgcgcagcgtccagcagaggagaagtgaccggatagaacaaataaaaaaaattcctgcatgcgcacccctgctgttgaccggac

SEQ ID NO: 7122 - DNA, 1128 bp, Zea mays
  Zm_smallRNAprecursor_2611
aaagttatgattttataactatattattatgcagaaaaagaaaaaacgggtacccgaattccgggtacccgtatccgacccgaatatccgggtatttaccgggtagtactcgctccgtatccgacccgaatccgaagctatactatccgggtattacccgtatccgtcccgaatctaaaaaatacccgtatccgtatccgaaaaatggtcccgaatcagtatccgtatccggtacccgtttcgggtaccctgcccgttttcacccctaaccatttatgcgctggagagaccgttttgtcttttgtgccgaagcaatttataaagcacaagccgaaactggtgaaatcaaggggcattacttgaatgcgactgcaggtacatgcgaagaaatgattaagagagctgtatttgcaagggaattaggggttcctattgtaatgcatgactacttaacaggaggattcaccgcaaatactactttgtctcattattgccgcgacaacggcctacttcttcacattcaccgagcaatgcatgcagttattgatagacagaaaaatcatggtatgcatttccgtgtattagctaaagcattgcgtatgtcggggggagatcatatccactccggtacagtagtaggtaagttagaaggggaacgcgaaataactttaggttttgttgatttattgcgcgatgattttattgaaaaagatcgttctcgcggtatctttttcactcaggactcggtatccatgccaggtgttataccggtggcttctgggggtattcatgtttggcatatgccagctctgaccgaaatctttggagatgattccgtattacaatttggtggaggaactttaggacatccttggggaaatgcacctggtgcagcagctaatcgtgtggctttagaagcctgtgtacaagctcgtaacgaagggcgcgatcttgctcgtgaaggtaatgaaattatcaaagcagcttgcaaatggagtgctgaactagccgcagcttgtgaaatatggaaggagatcaaatttgatggtttcaaagcgatggataccatataaaataaaaaaaagcaaaatagaaagagaaaaaataagttaagaaatgcagtaattc

SEQ ID NO: 7123 - DNA, 1031 bp, Zea mays
  Zm_smallRNAprecursor_2612
aacgcgaaataactttaggttttgttgatttattgcgcgatgattttattgaaaaagatcgttctcgcggtatctttttcactcaggactcggtatccatgccaggtgttataccggtggcttctgggggtattcatgtttggcatatgccagctctgaccgaaatctttggagatgattccgtattacaatttggtggaggaactttaggacatccttggggaaatgcacctggtgcagcagctaatcgtgtggctttagaagcctgtgtacaagctcgtaacgaagggcgcgatcttgctcgtgaaggtaatgaaattatcaaagcagcttgcaaatggagtgctgaactagccgcagcttgtgaaatatggaaggagatcaaatttgatggtttcaaagcgatggataccatataaaataaaaaaaagcaaaatagaaagagaaaaaataagttaagaaatgcagtaattcttctttattcctctaattgattgcaattcaattcggctcaatcttttctaaaaaaaagactgagccgaattgaaatagatcttgatacgatcatgagacttgacaaatcgagattcttctatttgcaagaagctccctgttcagttctccgtagtccaccgtttttggttcgcgtcctgctcgcctttgctccacacgcgtagtgctccgttattcctgcgcgtgctaccgcgaagctccctgttcagttctcctccgtcgcgttgtcatgcgcgcaaaactgctcgcagtcgacaccgagacacgcgctggacacgatgcaatgctgcgtgtcgtgtgatgcacatcctaggtcctcatcgtcgcgtcgtcgtcttcacactgtgtgcgaccagcatcgtcgttttccctgtcctgtgctcgcgtggctttttgctcgccagcacgtcctctcggcccgcttgatcttcatccctatctcgtcatcgacctcgccgcgacatagttcgtccgtcgtgctagtcgttgtcccatactgtacctattagctcggatcc

SEQ ID NO: 7124 - DNA, 1031 bp, Zea mays; identical to SEQ ID NO: 7123
  Zm_smallRNAprecursor_2613

SEQ ID NO: 7125 - DNA, 1040 bp, Zea mays
  Zm_smallRNAprecursor_2614
aaacaattaaggtcaaaaagataaacatttgcaatagaaaatttcttttgaatggttgtatgtagatggctccccctaaatgtgtgcacgattgtgaatccaatgttttgacataatatgtcatgtgagcaacacatttagagatagtgacaaaaaccatactgaatacaaccatccgaggggtgcaagagtgtcataacaggagttgtgatggatatgactatctctaaatgcacatcatttttacttcatagtaaagcaatcattacaaactgatgggacaaaagatgatggccagaagaccatcatatcactttgaataataacccagcagttttatttcatacaatgataaaaggatacaagccacaacagtggccaaaacaaaaataatccaaaagaaatacataaccgaaagaaccacaaacagaaagactagaaattttggattttctccccctttttggcaacaagtaccaaaaacgaagagagagacatggatacatgaatcaatatcctccagaaggaggataggatggaggatatgatggagggtatgatgtgtagtcagggaagagggtcctcatcacatcttcctcgaatgtggagtccctaggtggctcatcagccgcagaaaaaacagatgccgaagatgtacgatgatcaggaggaggtggagggtggtgatggtaaccagagccggatggcctagggtcaccaggaatgggtcccagacccgggtagggaggcggagggtgagaggatgattgacccggatccccatggtagggaggcggggcaaactgctcgcgatcatcaacgtaggcttcttcttcttcttcgtcgtctgctgacataaatggcaccccgtaggcctgctggtgccactcattgatctccgggggaggaggatggagaggcacgtcaagcgagcaaggggcaaagggcatacccatagtggaagcttgacgacgaagattgtcgttagtctcccgctgacgcgttgccagctcatgtacatcagcagaaatgtttcggca

SEQ ID NO: 7126 - DNA, 1151 bp, Zea mays
  Zm_smallRNAprecursor_2615
ggtgtctggttttgggttaagtagactcgatctttgagcacccgtcatgctgcagctcgaggacgagctgcttgtccaggaggggtgtagtgtcagggcctaaggaggcccacggaggggctgcggcagtagcaaccatgggcactctaagggggattatataaggatagttagagataagattagaatattagttgagattatttaggagattagttgagattatctaggaaggttattagttagtttcttgagagtttttaggagagttttaaggagataaggatctctagctagacaggggtggccagctggcctatttatgtaatcaatggatgagaaataaagtaagcaagaattagaagggaaacccccctcttgctcggctttgggcagaggccccgaccgacgccatgtgaacagtaaccgcgagtactgttcacgcatgaacaataccgcaccacctccactagcagctccaaccatcgaattccctccaatccctcaccgatctagcaaccataacagtaggctacatctatgatccatacaccatatgcatgtagccagcctcatcactgggctccttcgatggccgacagggccaacaacagatgttcaccatgctggccggtgtccaactgttatggtcgctagatcgttgagggattggagaggggtatcgatgggcaggaacatcggtcggggcctctgcccacagccgagcaagaggagggtttctcccttctaattcttgcctactttatttctcatccattgattacataaataggccggctggccgcccctgtctagctagagatccttatctccttaaaattcttctaaaaactctcaacaaactaactaataaccttcctagataatctcaactaatctcctaaataatctcaactaatcttctaatcttatctctaactatccttatctaatcccccttggagggcccatggctgctgtgactgtcggagcccctccgtgggcctccttaggccctgacaacaaccctgtggaccaatttcacccacacatcgcgcccctgcccatcctgccgccgcagcaccgcctcaagctactcccctggcacacccgagcatcaacaattctctagtgcccacaacccacctctg

SEQ ID NO: 7127 - DNA, 1149 bp, Zea mays
  Zm_smallRNAprecursor_2616
gtgtctggttttgggttaagtagactcgatctttgagcacccgtcatgctgcagctcgaggacgagctgcttgtccaggaggggtgtagtgtcagggcctaaggaggcccacggaggggctgcggcagtagcaaccatgggcactctaagggggattatataaggatagttagagataagattagaatattagttgagattatttaggagattagttgagattatctaggaaggttattagttagtttcttgagagtttttaggagagttttaaggagataaggatctctagctagacaggggtggccagctggcctatttatgtaatcaatggatgagaaataaagtaagcaagaattagaagggaaacccccctcttgctcggctttgggcagaggccccgaccgacgccatgtgaacagtaaccgcgagtactgttcacgcatgaacaataccgcaccacctccactagcagctccaaccatcgaattccctccaatccctcaccgatctagcaaccataacagtaggctacatctatgatccatacaccatatgcatgtagccagcctcatcactgggctccttcgatggccgacagggccaacaacagatgttcaccatgctggccggtgtccaactgttatggtcgctagatcgttgagggattggagaggggtatcgatgggcaggaacatcggtcggggcctctgcccacagccgagcaagaggagggtttctcccttctaattcttgcctactttatttctcatccattgattacataaataggccggctggccgcccctgtctagctagagatccttatctccttaaaattcttctaaaaactctcaacaaactaactaataaccttcctagataatctcaactaatctcctaaataatctcaactaatcttctaatcttatctctaactatccttatctaatcccccttggagggcccatggctgctgtgactgtcggagcccctccgtgggcctccttaggccctgacaacaaccctgtggaccaatttcacccacacatcgcgcccctgcccatcctgccgccgcagcaccgcctcaagctactcccctggcacacccgagcatcaacaattctctagtgcccacaacccacctct

SEQ ID NO: 7128 - DNA, 1150 bp, Zea mays
  Zm_smallRNAprecursor_2617
gtgtctggttttgggttaagtagactcgatctttgagcacccgtcatgctgcagctcgaggacgagctgcttgtccaggaggggtgtagtgtcagggcctaaggaggcccacggaggggctgcggcagtagcaaccatgggcactctaagggggattatataaggatagttagagataagattagaatattagttgagattatttaggagattagttgagattatctaggaaggttattagttagtttcttgagagtttttaggagagttttaaggagataaggatctctagctagacaggggtggccagctggcctatttatgtaatcaatggatgagaaataaagtaagcaagaattagaagggaaacccccctcttgctcggctttgggcagaggccccgaccgacgccatgtgaacagtaaccgcgagtactgttcacgcatgaacaataccgcaccacctccactagcagctccaaccatcgaattccctccaatccctcaccgatctagcaaccataacagtaggctacatctatgatccatacaccatatgcatgtagccagcctcatcactgggctccttcgatggccgacagggccaacaacagatgttcaccatgctggccggtgtccaactgttatggtcgctagatcgttgagggattggagaggggtatcgatgggcaggaacatcggtcggggcctctgcccacagccgagcaagaggagggtttctcccttctaattcttgcctactttatttctcatccattgattacataaataggccggctggccgcccctgtctagctagagatccttatctccttaaaattcttctaaaaactctcaacaaactaactaataaccttcctagataatctcaactaatctcctaaataatctcaactaatcttctaatcttatctctaactatccttatctaatcccccttggagggcccatggctgctgtgactgtcggagcccctccgtgggcctccttaggccctgacaacaaccctgtggaccaatttcacccacacatcgcgcccctgcccatcctgccgccgcagcaccgcctcaagctactcccctggcacacccgagcatcaacaattctctagtgcccacaacccacctctg

SEQ ID NO: 7129 - DNA, 1143 bp, Zea mays
  Zm_smallRNAprecursor_2618
tctggttttgggttaagtagactcgatctttgagcacccgtcatgctgcagctcgaggacgagctgcttgtccaggaggggtgtagtgtcagggcctaaggaggcccacggaggggctgcggcagtagcaaccatgggcactctaagggggattatataaggatagttagagataagattagaatattagttgagattatttaggagattagttgagattatctaggaaggttattagttagtttcttgagagtttttaggagagttttaaggagataaggatctctagctagacaggggtggccagctggcctatttatgtaatcaatggatgagaaataaagtaagcaagaattagaagggaaacccccctcttgctcggctttgggcagaggccccgaccgacgccatgtgaacagtaaccgcgagtactgttcacgcatgaacaataccgcaccacctccactagcagctccaaccatcgaattccctccaatccctcaccgatctagcaaccataacagtaggctacatctatgatccatacaccatatgcatgtagccagcctcatcactgggctccttcgatggccgacagggccaacaacagatgttcaccatgctggccggtgtccaactgttatggtcgctagatcgttgagggattggagaggggtatcgatgggcaggaacatcggtcggggcctctgcccacagccgagcaagaggagggtttctcccttctaattcttgcctactttatttctcatccattgattacataaataggccggctggccgcccctgtctagctagagatccttatctccttaaaattcttctaaaaactctcaacaaactaactaataaccttcctagataatctcaactaatctcctaaataatctcaactaatcttctaatcttatctctaactatccttatctaatcccccttggagggcccatggctgctgtgactgtcggagcccctccgtgggcctccttaggccctgacaacaaccctgtggaccaatttcacccacacatcgcgcccctgcccatcctgccgccgcagcaccgcctcaagctactcccctggcacacccgagcatcaacaattctctagtgcccacaacccacc

SEQ ID NO: 7130 - DNA, 1036 bp, Zea mays
  Zm_smallRNAprecursor_2619
gtgtttgccagcgtgttctctcggctcgcttggcccgaattcctatcgcgtcgtcgatcttgccaagtatcgtcgttcgtcgtcgcgctgtgcgtgcaacagccctgagtctatgtcgccccggtcttgttgtcgacaccgctcgccgtagctcagcttgctagttcgtcgtgtcgcgtcgtgtgccgatattctctcccggcaggcctcgccgtcgacgatgttcaagtgattgtttggctcctcgcatcccgcctattcaataaaacacccaaatccatagactgtcgagacactgctgccatacgcagctgtctccgtcacttgcgtcagctcgccagacctacagctccatatatgtcactctcccgtatcgtcgtcgagcccggcgaacctcgttcttctctgctcgatctcgtcgaaccacgaatcccggactttagacaaaaataagcgaggtccttatgcatcgcttatcaagtactcggtcgaagacttcaatcgaagatcgtcgtcatttcgtgcgtcatcgaggaatcccaaggatcggatgaagacgaagctagcagcgatattccccaagcgcttgacaaattgcctgaatcggaaaatcgctaccgatctcgtggattcatgtcagctgtggaaacggtaagctgataaattattcagaatagttcgatcggtgcatttaatgtgctagtgcgatgctcatttaggtgctcaataaattgcgcaagtcatgaaactctcgtcgacttcgcagttcttgcgattatcgagccagattcagttatagtgagttatttcactatttcggtcaattagcggaattagtgtaccgagtagaatatgagtaggcctatgtgatgataaaatattttaatcacttctatatatatatatatatatatatatatatatatatatttacgataaagaaatgtttgagtaattgttgacatgaaaaacatgtgaggagtaaaataaaattaaaatagttctgtgggagcgatgtagtataatttattaaacg

SEQ ID NO: 7131 - DNA, 1199 bp, Zea mays
  Zm_smallRNAprecursor_2620
tgacccaccattttatcactcatttgctatctttggtcgtgcttctcttcagcatccaaaaaatgtccctttggtttttaatgcttgcactatagttagggcatgatcaactagttgtctcgctattaacctctgacactattaccatgtcctatgatcatgccgacctagccccgttcctcccacgcagcttccacccttcatcggtgatgttcctacttgttatggcttgggctatttcgcatttgaaaaactcactatcatcatggttgcgcccgtgctagtgaatgctatgaattttggcaacattagtcatgtcacagggacttcattgaaggccaccttcgcattcgggttcgtgacatccaacctatcaacttggggtatagacacaaattgatttccaatatccccatcagaattaaggatggcaatcgggcgggtagtacacggatatataggggtgtttggtttaaggaatcactacatccaaattaaggtggtgcatcatgggttcattcctcaaatttggtgggatggccccatttctcatattagtactaactaactaactatgaggaatgaggtggtgatggattaactcattccattccacaaaccaaacaaaaatagtgaggagtgagaagtgatggactagctcattcctcaaaccaaacaccctaatagttcgtgaatccatacccgcgagacaaaactcaacccatacctgtacccataaacatttgtgggtatgaatctatatccatacccgtacccgccgggtatccgctatccagtggatatccgttacctgcccgcccactacaattttagcattaaacactaaacaacaattttattacatttcaaaataattatcattccaatagaatcaaatgataatttcagcaccaaacaacatgttatggataaaaattgaaaaataagaatttatgataatatataaatctggatgacccacatgttagatatccgttgggtaacgggtatggatactggatatccatacccgcgaaaaaaatatctgcggataccttattatatccataatcgtacccgtggatatcaaattccaccatacccatatccaatggataattatcagcggttatttacccatacctgtacccattgccatccctaatcagaatggagttgtctcttttttactttacttg

SEQ ID NO: 7132 - DNA, 1134 bp, Zea mays
  Zm_smallRNAprecursor_2621
tatgatatattggtattttcctatgttgtttaaaactacgtttaaacgaagtttaaacatttaaaagtcaaaacttcacccatgagcgtttcaacgttttatcgttttaaggcccgtttggtaaaacgttttaaggcccgtttggtttgagggactaaatattagtccctccattttagtctcatttaatccctaaattgccaaacagtgggactaaaatagggacaagactgtttgtctctagtcccttaaggagtgactgaaagggactaaaccatataaattccattttttgcccctccgctattttagttgcactaatggcgggtgaatgctaaggggtattttagtcctcttatgattcatttaatgtgttttgaatagtttgtttctagaaccaaacagggtagggattaaactttagtcttctaactaaactttagtccctggactaaaggaaccaaacggggccttaataacctggcaacgactgctatgcaagcagtccttctgtgcaagcgtgcaagcaaaccatctaatctattagatcgtgatccaaggtcacatttaacacttaaaccgtagatctgtggttggatcgtaatctaatggatcagatgatttgcttgcacgcttgcacagaaggactgcttgcataacagtcgttgcctaataaaatggagagggttttcctaatccatttgcttttgttgacccaacaccattgacacataactatgtggttagaaagatcaagagctgctcacgcacttgttttacaggctgttccctggggatggacaaacaagcactcttgattcaacaaaccagagccaggccgcagggcctgtccaccctttccatccgaagatagccatcaggcgtggtgtgctgtcggccgagtgctcagagataatgcagcagttcttccagctgaggaggaagaagaaaccacagtcaccaccgcaggcccaccgccatgggcaccatcatcctgtcaagttcttcagcaagatgcaccacatgttcggcacgatattctgtttataacttcgcctctctgttttattttagcttcctaaatttcgtattatggaagtgtgaaaaatgcatttctttctgtgcatctagtgt

SEQ ID NO: 7133 - DNA, 1132 bp, Zea mays
  Zm_smallRNAprecursor_2622
atgatatattggtattttcctatgttgtttaaaactacgtttaaacgaagtttaaacatttaaaagtcaaaacttcacccatgagcgtttcaacgttttatcgttttaaggcccgtttggtaaaacgttttaaggcccgtttggtttgagggactaaatattagtccctccattttagtctcatttaatccctaaattgccaaacagtgggactaaaatagggacaagactgtttgtctctagtcccttaaggagtgactgaaagggactaaaccatataaattccattttttgcccctccgctattttagttgcactaatggcgggtgaatgctaaggggtattttagtcctcttatgattcatttaatgtgttttgaatagtttgtttctagaaccaaacagggtagggattaaactttagtcttctaactaaactttagtccctggactaaaggaaccaaacggggccttaataacctggcaacgactgctatgcaagcagtccttctgtgcaagcgtgcaagcaaaccatctaatctattagatcgtgatccaaggtcacatttaacacttaaaccgtagatctgtggttggatcgtaatctaatggatcagatgatttgcttgcacgcttgcacagaaggactgcttgcataacagtcgttgcctaataaaatggagagggttttcctaatccatttgcttttgttgacccaacaccattgacacataactatgtggttagaaagatcaagagctgctcacgcacttgttttacaggctgttccctggggatggacaaacaagcactcttgattcaacaaaccagagccaggccgcagggcctgtccaccctttccatccgaagatagccatcaggcgtggtgtgctgtcggccgagtgctcagagataatgcagcagttcttccagctgaggaggaagaagaaaccacagtcaccaccgcaggcccaccgccatgggcaccatcatcctgtcaagttcttcagcaagatgcaccacatgttcggcacgatattctgtttataacttcgcctctctgttttattttagcttcctaaatttcgtattatggaagtgtgaaaaatgcatttctttctgtgcatctagtg

SEQ ID NO: 7134 - DNA, 1133 bp, Zea mays
  Zm_smallRNAprecursor_2623
atgatatattggtattttcctatgttgtttaaaactacgtttaaacgaagtttaaacatttaaaagtcaaaacttcacccatgagcgtttcaacgttttatcgttttaaggcccgtttggtaaaacgttttaaggcccgtttggtttgagggactaaatattagtccctccattttagtctcatttaatccctaaattgccaaacagtgggactaaaatagggacaagactgtttgtctctagtcccttaaggagtgactgaaagggactaaaccatataaattccattttttgcccctccgctattttagttgcactaatggcgggtgaatgctaaggggtattttagtcctcttatgattcatttaatgtgttttgaatagtttgtttctagaaccaaacagggtagggattaaactttagtcttctaactaaactttagtccctggactaaaggaaccaaacggggccttaataacctggcaacgactgctatgcaagcagtccttctgtgcaagcgtgcaagcaaaccatctaatctattagatcgtgatccaaggtcacatttaacacttaaaccgtagatctgtggttggatcgtaatctaatggatcagatgatttgcttgcacgcttgcacagaaggactgcttgcataacagtcgttgcctaataaaatggagagggttttcctaatccatttgcttttgttgacccaacaccattgacacataactatgtggttagaaagatcaagagctgctcacgcacttgttttacaggctgttccctggggatggacaaacaagcactcttgattcaacaaaccagagccaggccgcagggcctgtccaccctttccatccgaagatagccatcaggcgtggtgtgctgtcggccgagtgctcagagataatgcagcagttcttccagctgaggaggaagaagaaaccacagtcaccaccgcaggcccaccgccatgggcaccatcatcctgtcaagttcttcagcaagatgcaccacatgttcggcacgatattctgtttataacttcgcctctctgttttattttagcttcctaaatttcgtattatggaagtgtgaaaaatgcatttctttctgtgcatctagtgt

SEQ ID NO: 7135 - DNA, 1130 bp, Zea mays
  Zm_smallRNAprecursor_2624
tgatatattggtattttcctatgttgtttaaaactacgtttaaacgaagtttaaacatttaaaagtcaaaacttcacccatgagcgtttcaacgttttatcgttttaaggcccgtttggtaaaacgttttaaggcccgtttggtttgagggactaaatattagtccctccattttagtctcatttaatccctaaattgccaaacagtgggactaaaatagggacaagactgtttgtctctagtcccttaaggagtgactgaaagggactaaaccatataaattccattttttgcccctccgctattttagttgcactaatggcgggtgaatgctaaggggtattttagtcctcttatgattcatttaatgtgttttgaatagtttgtttctagaaccaaacagggtagggattaaactttagtcttctaactaaactttagtccctggactaaaggaaccaaacggggccttaataacctggcaacgactgctatgcaagcagtccttctgtgcaagcgtgcaagcaaaccatctaatctattagatcgtgatccaaggtcacatttaacacttaaaccgtagatctgtggttggatcgtaatctaatggatcagatgatttgcttgcacgcttgcacagaaggactgcttgcataacagtcgttgcctaataaaatggagagggttttcctaatccatttgcttttgttgacccaacaccattgacacataactatgtggttagaaagatcaagagctgctcacgcacttgttttacaggctgttccctggggatggacaaacaagcactcttgattcaacaaaccagagccaggccgcagggcctgtccaccctttccatccgaagatagccatcaggcgtggtgtgctgtcggccgagtgctcagagataatgcagcagttcttccagctgaggaggaagaagaaaccacagtcaccaccgcaggcccaccgccatgggcaccatcatcctgtcaagttcttcagcaagatgcaccacatgttcggcacgatattctgtttataacttcgcctctctgttttattttagcttcctaaatttcgtattatggaagtgtgaaaaatgcatttctttctgtgcatctagt

SEQ ID NO: 7136 - DNA, 1131 bp, Zea mays
  Zm_smallRNAprecursor_2625
tgatatattggtattttcctatgttgtttaaaactacgtttaaacgaagtttaaacatttaaaagtcaaaacttcacccatgagcgtttcaacgttttatcgttttaaggcccgtttggtaaaacgttttaaggcccgtttggtttgagggactaaatattagtccctccattttagtctcatttaatccctaaattgccaaacagtgggactaaaatagggacaagactgtttgtctctagtcccttaaggagtgactgaaagggactaaaccatataaattccattttttgcccctccgctattttagttgcactaatggcgggtgaatgctaaggggtattttagtcctcttatgattcatttaatgtgttttgaatagtttgtttctagaaccaaacagggtagggattaaactttagtcttctaactaaactttagtccctggactaaaggaaccaaacggggccttaataacctggcaacgactgctatgcaagcagtccttctgtgcaagcgtgcaagcaaaccatctaatctattagatcgtgatccaaggtcacatttaacacttaaaccgtagatctgtggttggatcgtaatctaatggatcagatgatttgcttgcacgcttgcacagaaggactgcttgcataacagtcgttgcctaataaaatggagagggttttcctaatccatttgcttttgttgacccaacaccattgacacataactatgtggttagaaagatcaagagctgctcacgcacttgttttacaggctgttccctggggatggacaaacaagcactcttgattcaacaaaccagagccaggccgcagggcctgtccaccctttccatccgaagatagccatcaggcgtggtgtgctgtcggccgagtgctcagagataatgcagcagttcttccagctgaggaggaagaagaaaccacagtcaccaccgcaggcccaccgccatgggcaccatcatcctgtcaagttcttcagcaagatgcaccacatgttcggcacgatattctgtttataacttcgcctctctgttttattttagcttcctaaatttcgtattatggaagtgtgaaaaatgcatttctttctgtgcatctagtg

SEQ ID NO: 7137 - DNA, 1046 bp, Zea mays
  Zm_smallRNAprecursor_2626
gagcgcaacgaggcggcctgcccggtctgggtgggctgctctgttggcgtgccgccccctacctctttgtcgatgccggcgagtcgcttggccatcggacagctgcgtggagacgagaagcagcgggggcggaggcggtagtctctgcgagtggttgtggtcggcgtcggcgccgccatggcggtggtggtcgagtggcggcggaacgactcaaggaaatggccggagagaaccctttttccacttaggaaagtagcgaggccgactgaatggcacgattgccggtggggggcccaccaatggtccttactcttcggcctgattgttggccatcctgatgcgctaacttcctagagtcagccgtaggaagttagcggatcgtttaaccacacccgtggatcagcaactgaaagctaactttgtagaggaggccgtaggaagttagctgcccatgctaactttctagagacaaccataggaagttagctgcccatgctaacttactagagacagccgtaggaagttagctgcacatgctaacttcctacggccgtctctaggaagttagcggctcgcttaaccgaacacacatgggtcaacatgtgaaagctaacttcctacagcttttataaaataccgtaggaagttatgattatttcctagagctaccagttgcctctcggaagttatttatttcctacggtttgttataaaagctgtaggaagttaaaaacccgtaggaagtgtatgattttggtgtatggccaggggaggtgttccaatgccggcgagaaatctttgattccccagtaacccccctgagctaggaactgatacccccgacttcgctaaatacaggtgaacatccccgcccgccacccaagagtccgacgttcaagaaactggctccggacggcgatggcctccggggtatccgattctctctccttctctctgatcgcttggttgggacggctgcgctcgaatggttgagctcggggagggtcttggggtttgcatatatacatgatgatgtgcgagaacct

SEQ ID NO: 7138 - DNA, 1063 bp, Zea mays
  Zm_smallRNAprecursor_2627
ttagcactatatctaagatatttcttgcatgtgtctttatgatctacaataaataagtaaacaaaatactcaggtacatagataaccgttgagtcgtaggaggagtaactggtagtgacaacaaaaggagagagcaggcacgccgtccccttccccctctataaaatccatcttctccccctttcttctacctcactcttccactgttctcccctaccttagccgctcacaagactttagcagctcttccaggccggctcctcttccttctcttggtgcgtgctcatatcatggccaagatttgctcatgcctctttccacttcaagcatgcatatgcgtcgtctctgctggcagcccggccgttctgacgctagctgatcgatctactccatcaccgagctggctcttctatggattattcgtcctcgtccaccgtgggacgccatgatagcaatattaagctagcaggtttggtcgatcgatcggctcgtgtcgtgtgtgcctggctccctgtatgccacacatgtagccaacccgtggcgtgattggatgctgtgggtggcgtgcaaggagccaagcatgcataacaggccatgatcacttcctctctatcctctgatctgttgaatatatctgtatcgtgttttttttcccgagatgatgatgcacttatttcatgctgttacatgcatctgtatgcttgtcttgggttcgaattgcttctgcagggttagaatttaggactggtttggagaaggcaggtgagttccaatcctctttcaaagctccatcaatcgacatcacgaaattgagagagagtttacagttcgcccattttttatcctaaaaacacatctacttttcttttgcttacatgagagcctagccgcctcttgccgctgaatctgtgttgatttgtttggtttccgtcgtatccataggaaaccacccgttgtctgctagatgtagtccatttgatcaccgatctgagctaagctagtggttgtccaccttttgtttgttttggtttttgtctctacgaccatttgcggccactggaat

SEQ ID NO: 7139 - DNA, 1070 bp, Zea mays
  Zm_smallRNAprecursor_2628
tatattgcagaaacttttcgcatcaggctccagaccttggcttctcacggcccacacgaagatattcagccttataattgcttcgggggtaagttggtgaagatagacttcgaatattttcagcacctctacgacaaaggtgctcaggggaaatctaagtccagctttcaaaaagcttcggtacactacgacttcattttcttcagggtgcggacaagttttttctccttcgtcggccctaacaacggacaagtcccagaaataccttcctctcatgttgacaagatgattttccttgatacttgatttgccgaaaaccgcatggcttggtcgccaagggtgatcttcggagtcttcaccaccactatccacatcataactgtcgctgtcatcagtatcttcggacaaaccttctaaaatctctttggtgattttttcagtattggtcttcgacattgctataagaaagggccaattccctgtatgccactagaaaatatactcattccttgtatgccactgaccccacatgtcatagacaccaaaaaatatacctatatgccactcagtggcacacaaggaatgagtataaaatttgatggcataccaggaattttctctataagaaaccccagattcttctcttcatcgagactcagcttcatctcggcagcaaccttcttatcttcagacatcttcggagacactaaaaaactcttttcaatgccgaagcttcaaaacttaaaagctaagcaaattttggtgcgcaagagctaaaaattgagtgagcgggagcagatggcaagagagcgtgctaaatgagcttgcggtatgatcttatttatacgctcagtgcgttgaaagttgaaagaccccgcctgtcagtgaatgttgctattctagcaaagggaaggtgttttttcggaccttcggcttaaagccttcgtccatgtcgcaatctaaatttattattttaaaacaaattaatattgcgagggactactgttgggggccttcggcttacgaaggtcctcaaaaacaggatttaacagtatttctggagcataatg

SEQ ID NO: 7140 - DNA, 1075 bp, Zea mays
  Zm_smallRNAprecursor_2629
cgctctaggccgtactcgacgttggcctcgaggagccccccatggacgaacaccgagtcacccactacaagcacggtagtgaggtcagccaggaaccggcgcaaaatgggcccgtcgggtcagaaggcggcgaggcgggaccgcatcccatcccagaactccggcttgacaccggggaaggacatgggcacgccgagaaaggggttcctcggctacgggttgaggtgctcgccgcagcggcgcttgatggcgagcaccgcggtaccaccctacccaggcgcgcggtggggcggcggggcgggcgcgaggtagcggcggcgggcatgtagcggtgggctggcggcgaggcaggtagcggcgggcgtgcgcgtggtagacagggaaaagaagacagatgcgcggggtgagaccgtgagagagatttaggtttttagttaagttcgacggtgtccacgtggcccatgaatttaagttaagaacgtgggtacccacgttcctaatacgataagttcgacggttttacgacgggctcacgaatttaatataagaacgtgggtacccacgttcttaagttaacccacgaacataactcaattaaaaatgtcggtacccacgttcttaaattaacccacgaacatttattagtttcttgtagtgtgaaccatcactcctaaaaatagatacatcaatatttgtaaataaacaattgtagcccatatgacacaattgacttacagacaataaattatacccaagcgactctactaaaaatacatttgatattgagtgctcggtcgtgatggctatcttgcccaatcatttaaccttgccttgattcccatctccaaaaatgatggtgtcttgggaatccctgttcttgacgtaggaggtgaacattttcttctcccccgtcatgtggtttgtgcatccactgtcgataatctagcttgagcccccggatgcataaacctacaaggcaattaagcttgggttttaggtacccaactcttgttgggtcatacaaggttagttacaacaatttttggaacccaaatgcaagttttgtctcccttgc

SEQ ID NO: 7141 - DNA, 1172 bp, Zea mays
  Zm_smallRNAprecursor_2630
gctcgagcagcgcaggagcagtccggacagatatggcttcttatttcaggtaattcgtctatctcatcacgtgtcattgaattcaagcataatgttgcgattctaacgtttcatccatttgcaggaaatgactacttcgactcggccctgatatgaacttgaccgcttttcgccctccccaggtaacactatctgaacacttcaattccatagcaactctttttttattatgaaaaatggctcacaggcacaaggatggggacagtggccaggacaagctccagcgtcgcagccactgtggaccggtgttgggtggacacaggcacctccaggcacttggacgactccaccaccccaaggatcgcagcctgtcccgggatgggtgccaccgatcgcccagccaccggcgggctttcagccatttcaagcgtggatggcaccgccaccgacggggtgggtgccaccacctcaggggtggctagcacaacaggtgcaagagactgattcggacttcttgcagagtggaacaatgcagtaccagacacgagatatatctttcaaagaagaaggcttttttcgaataagccaattgatttgggaccttcggatccattctttttcctattcaaagatcaggcctttgtctctgtgttttcatgtcgagaattctttgcagatgaagatgaagagatggcaaagcggcttagtaccagtacctggagaaaaaaggctcctaaacatatggctagcaactggttcaccaggagtacgcaagaaaggcaaaagcactacgaattattgatttaggaatgggaatgggctagaaccctgggctcttccttatataattaatggtcttttcattctaatactctatccgagagttctcagtatttagcaaagctgttcctatctaacggaaggctcctggatcaaatgacaaagacattgtttgtggagaaagaggtggcttttcccgtggatgcatgcacagcctcctcatcaccatggatcacaggtgacgttccatgtttagttttatgcaaatagtgaacaaacatagcaatgtataggtatagggatagcaaaacacaaccttatttgaataattgatgaattgcagggttaagtgtcacatgctcagggatcggagggtgctgccaacgtccaag

SEQ ID NO: 7142 - DNA, 1121 bp, Zea mays
  Zm_smallRNAprecursor_2631
ggatttctgcaagcaaatcgtgtatcggtgttccagggtgatatgtcatcccttgcgccccaacaattttaaacaatggtcagagaagtgaaacacaaaatattacaactatttcttggactgggcaattattgattatgtgctgagacaaagctgacactcgatacttctgtagcaagcaatcctattaagtgctttataatttaccactggattccaatattccacaagaaccaagaaccctaggacccaagaaccctacttcgtggtcagcagatgcgaaggaagaggaggtacctgtcaatcgactggaccgacaaggtgaagaccgagtcaaacgagaactgcaaccggcgatgcgacgactgaacctcaccaaagagccaccaccgatccagcaagaatatgggccgactatgtgtcggctgtattggtaagaaaatttgccggcaatgcgtcggctggatctccgcgcatggccactgtcgttcgggcgcggaccagaggactcgcccttgcccttcatttgttgggggagagaatggagggagggggagaacttcaatgcaggcagtgaaggccagaaggggcacgcgggcggctgtagccagtgactcagagcaatggcgattagacaggctcgggggcagcgactcggaggcagaggactcggctggatctccgcgcatggccactgccgtccaggcccggaccagaggactcgcccttcatttgttgggggagagaatggaggttggagggaggggcagaacttcaatgcgggcagtgaaggccagaaaggggcacgccggcggcggcgacagcggagaccgaggtgttctgtgcagtggctaaatttatcaaacgcttaggctgactccaacaatgttgcatatcggagaggcgcgcgcgagagagatgggcctgttgggctcatttcttctgtatgggtggcctatcttctcgacaggcaaaaacaacaccgccccactgcctggctacccatcttcttctgacctctttcttcctccgcatccactgccgcgacgggacctcgccgccccactatcgcgacgggacctcgccgccccactgacgcaacctcgtcggctgtgtcgtgg

SEQ ID NO: 7143 - DNA, 1169 bp, Zea mays
  Zm_smallRNAprecursor_2632
tcttgtaatcgtagcatcgtcgctgtccgcggcgccaaaggcgaatgtgcgcttactttgcttttgcatggccatggggggtcggccgtcggagggggatgcgaggacctggtggacgtgcaccgcggactggctggcctcctggtcctggtcctgttcctgtggggtgggcagcagcagttcgttgcgtcgctcgcagacgcagtcgcagcgctggcttcggtattcgtaggacgtacgtacgtaccagcgctgttcctgaacgaccgtccatcatcgcccccgccctcctttcgatacggttcacacaaacaacgccgcgcgcgccgaaagcgacgtggacgacgtatagctacctcgccaccgggagattttgtggacgcggctcagacagacaggggaataagactaaccgcagcgcaaccccctacgcagccccctccccttgcatgcggcgcgtagggggcaccctatagccgcagcggtgccccctacagcgccccctacgtgtcggtccccttctctctccccccagatttagcgtgtcactgttcatcacccttaacactgtgctgtggatccacgagtaattgttagtagataaaaaattgatagttggtatagaaaatgatattttatagtggtagtggggtatagggggagtatttaggggaaccgctgcgggagatgaaaaaataggggagaaaataggtggaaaagtgatatagggaaaaaaatttaggggtaacggttgcggatagcctaaaggatcggggatggctggctgggctggcttcggcgctattgcagacagttagtggtacagaaattcgtggagctaagcgtctcgattgacgtaccaaaccataaatcggactagtagcgacaactgtctcagacgttttctttacgttttcattcgtggagcagtgctgtaactctcgcccgcccaccaccacaggattaccgccgacgtcgacgtcgtccatgcttccacagccacacggactccgcctccggcaatcttgcttgcttgctctgaacgaatgatggctccgatccactctcgatctgcctgcgctgcacgactccatggaccgaccgcactgcagacatccgtgcaggaggaagcgcgcgtgcgtacaactgcgcgtgtgtgcacgctgttg

SEQ ID NO: 7144 - DNA, 1190 bp, Zea mays
  Zm_smallRNAprecursor_2633
ccagagccggatggcctagggtcaccaggaatgggtcccggacccgggtaaggaggcggagggtgggaggatgattgacccggatcccccatggtagggaggcggggcaaactcctcgcggtcatcaacatagacatcttcatcttcatcgtctgcagacataaaaggcaccccgtaggcctgctggtgccactcattgatctccgggggaggaggatggagaggcacatcaggcgaacgagggacaaaaggcatgcccatggaggaagcttgacgacgaagattgtcgtcagtctcccgctgacgccgtgccacctcatggacatcagcagaaatgttgcggcacatggagaaaaatgccgcaagcccatggaccaagcgagcacccatcccgcggccacgaccacgaccacgaccacgagcacgtggcatgggagagccgcggccaggagagggacgcgaggcagcagcggggggagaggaggaaggatggtggggaggctggcgaggtggctcagaggaggaggcagggcctccagaccgtgagggaacccgcttcgtacgagcagctgggttggaggaatcaacccagtagggtacgtagcgggagtgtttgacgggttttttgaagtgggtctgggtgaccacttcgatcatcttcatgataaagggtgcatgaagacaccctctgtgaggagaccaggaagcacggacgatctcttcccagatcatgtcaaacacattgatgcgggcgagactgtttggagcaaggaggaggaggaggactcgactctccccaaggacgttcatttgattaccgccctttgggagaacggtcatccgggacaaggaattaaggtacctgtagtacctatgcttgttagcggttgtccagaactcccgctcagtagagacatgaatgaattccgtctcttcccgcatgggcagccgaatgccatgcactcgcatgttgctgccctgaatgtctgcatcagagaagcccagaatatgggcaaaacgacgataactgactttgtgccagttaccctggatgaagaaatacatgactgagtaatcatacccatcggcttcctcatctactttctttatccagagggtggcatagaactgagctaccacctcatcgttccaggggtattccatggtcataatgttacgtaacccctttc

SEQ ID NO: 7145 - DNA, 1096 bp, Zea mays
  Zm_smallRNAprecursor_2634
agtgagagtagggttggtaaacctcagacgctgaagggtttctattcccttctgagtgaagtcgacgggagattcatgcggaccgcgactgacgttcgccggatgcatgtgcagtccggtgacatagagagcatcaggcgccggaaggtcgacgaagtcgtcgaaagccccatcctcctcttggcagggagcataccctgaggaagacgtgctacgacgaggacgagaggcgccaaccttttggcgtctcccgcgagtcggctgcgagggcatggaagagccctcgccagccatccgaccagagccacgtcctctcttagagagggagcgacgaggcggaggagaggggacgggagattcctcctgaatctcgtcagagtcgctgctaaactcgaccacagaggggttgcgacgacgcaccatgatttgaaaaggtggtgaaactgtgaagcggatgaagtatgtgaaggagaggctctaaaggttgtgaagcgaccaaggcgagagtgaatgaagtgggagaagagaaggggagagtgaagtatatataggcagttgagctggtcctcaggaccagttcaaccgcccccatgggccagttcagctggttctgaccagtgtggtcagagaaccagaaacaacagattcaaatttgcgcgcagctgctggaagtgactggacagaaaaaaaatatgggcgcccctgacacgcatgcacggctagtgcgcgggcagagcagaaatgtccaagaaaatctgcgcgcgatgagcagagaagaggtgaccgaacagaacaaataaaaaaatctgcatgcgcacccctgccgttgaccaaataaaagattctccactcgcatgtcttcatgcaaagccaaaagaacaaaaaatctgcgcgcgcggcaggaagggaagtgaccagacgctgcatgcaaaaaaagattctgcatgcacaccagaccggactccacacaaaaaaattttggcgcgcacaggtcctgctgtcccgctgagcggcagcaagcaaaaaatctgcgcgccagggaggtgaccgcacaaagaaatggcgctgacagacgctgctgtctgtagagcggcag

SEQ ID NO: 7146 - DNA, 1048 bp, Zea mays
  Zm_smallRNAprecursor_2635
gaaactgagcacaacaagcaccagcagctatatattcggcctcgacagtggaaagtgcaacacagttttgcttcttagagctccaagacaccagggaccgcccaaggaattggcaagtccccgaggtgctttttcgatctactttgcaaccggcatagtttgaatcagagtagccaaataaatcgaaaaaggagcccttaggataccagaggcctagattttgggtgtgaactagatatctcaaaattctcttaacggccactaggtgacactctttcgggttagcttgaaaacgggcacacatgcacacactaagcatgatatctggcctagatgcacataaatacagtagagatcctatcattgatctataaagcttttgatctatagttttaccttcttcatttaagtcgagatgaccacttgaagccattggtgtcttggcgtgctttgccttttccatgccaaacttcttgagcatgtcttgtgtgtacttggtttggcacagaaaggttccttccttgagttgtttaacttgaaaacccaggaagtacttgagctcacccatcatggacatctcaaacctgtttgtcatgaccctactaaattcctcacagaaagtttcatcggtactgccaaatataatgtcgtcgacatatatttgacaagcaaataattgattgtcaactttgcgagtgaataaagtagagtctacttttcctatctcaaaaccatttttaagcaagaaatctttaagacattcataccatgctccaggagcttgtttaagcccatagagcgctttgtgaagaaggtagacatggtttggcttcttaggatcttcaaagcccggtggttgctccacatagaccaactcttgcagtggtccgtttaggaaagcacttttgacatccatttgatacaatttgaaatcatggttagtagcataggcaattaatattcttatggactctaaccttgctactggtgcataggtttctccaaagtcaagtccttccacttgagtgaaaccctgagcaaccaggcg

SEQ ID NO: 7147 - DNA, 1128 bp, Zea mays
  Zm_smallRNAprecursor_2636
caaatcataaactttgtaatgaatatagttcgacttttttaggcagtatttggggcctgtttggttcagcttttttctgaccaacttttctgaaaatctagctgtggagagaatctggctgtggagagaatctgagtatcattacgattacgtgtggaggaagataaagttgttcatagggctcaggatctagaaagtgacggattcctactattacaacgactcaaccgattatgtgtttatgttgattttggatggtttttgccgcaacgaattttatagaagctggctgaaaagctgagcgtttggcagtccgcagcagcttttggtggccagaagctgccagaagccgaaacaaacaggttggtttagaggatgggttggcgtttggttgaggacgggacgagacgcagtggggcgatatcactaacaccggtgtaccggtgtttgttttgaggatataagggacttcgccccgtttagtttactccctccgtctcaggatataaggcgtaaccactttttattcttgtcccacaatataaggcgtgctctctctatgcatacgtatatcgatgcagtggtatagagacaattaaatgcatttcttggtctttgaaccagaggtggttacgccttatatactgagacggagggagtagttccgttagtcctaggctaacacaggtgtaccgaaatactctttttcttttactatgtatgacgtcagttttctagacaaaagtaattatggtaaatgttgtcctttaatcctctttagcaccatgtgattgactagaggttaaagctaattaatctttattttaattcttccgtttggtaaaatagagactaaacggaactataaaccagagactaaagattagtcccactaactaaacagggcttcgtcctagtgaagaattcatgtcctcgctcgatcccaagcgaacgggctgaaggttccccatttacctatcccatgatattcaaaattagtcctttgatgtgttaaaattctactaaaattcaacacataatctagtataattagtaaactgaactctaaagtaaatgtaagtaaatgtctcttgttattttaaatcttgcttgtttaattaagattgg

SEQ ID NO: 7148 - DNA, 1141 bp, Zea mays
  Zm_smallRNAprecursor_2637
ggaaggtacataaagtacgtctctcaacaacagtacaaaaccattatgtaatttaagatgtagatctccaatggcctcgactgctgcttcaactccatttgccactctaattgttcttcggccctttgggagcctttggcttgtacggagtccctgtagagggtttgcaacatgaacagttgcacctgagtcaatccaccaagaataactgggatattctaagtataaagactcatttacaaaagtaacttggtccttaccactctctagtagatactgcaggaattcagggcattttctcttgtaatgacctgtcttcttgcaatagaggcaggtatcaggggggactgaaaaactgcctccttgtcttggctaattattgttgcttgaggaagcctggttattctgtttaccctgcttcttgaactttttctttgaattcttgttctgtctggggatattgcctttgatgaggttgatagagtctccagtctgctttaacctctcttcctcctggacacactgtgccaagagttggtctatattccacttatcagtgacactggtgttgtactgtatgtgaaaagtctcaaactccttaggcagagacttcattatcataaatactacaaattcctcgtgtaaaggagacccgaggtacttgtttatcttagctacgatggatatcattttctgaatgaatgatctgacaccatttccatcgtattttgcattgacaaattctgtcattagagagcaagcataagccttaaaaggccctttatgatgagaggctaccctctcaaggtattccttgacagtctcgcactctggtatggaactcttaagaggctccttaatgctcctcttaataataatcatacatttgtcatttgatctttcccacttgaccttgtcgatgctgtattggatccacatgtggtcatagttgggagtgcccactgtgggctcaactggtttatcaaacctcagtgcgtaatctatctcacccactgtggttatcatgtcaatatcctcccgccaagaatggtaattactaccatctagcggtttcatctaagcaatctggctaatcagcatggcagtatgagcacctttgcaaaattaaaatagaaaatat

SEQ ID NO: 7149 - DNA, 1160 bp, Zea mays
  Zm_smallRNAprecursor_2638
acttggtccttaccactctctagtagatactgcaggaattcagggcattttctcttgtaatgacctgtcttcttgcaatagaggcaggtatcaggggggactgaaaaactgcctccttgtcttggctaattattgttgcttgaggaagcctggttattctgtttaccctgcttcttgaactttttctttgaattcttgttctgtctggggatattgcctttgatgaggttgatagagtctccagtctgctttaacctctcttcctcctggacacactgtgccaagagttggtctatattccacttatcagtgacactggtgttgtactgtatgtgaaaagtctcaaactccttaggcagagacttcattatcataaatactacaaattcctcgtgtaaaggagacccgaggtacttgtttatcttagctacgatggatatcattttctgaatgaatgatctgacaccatttccatcgtattttgcattgacaaattctgtcattagagagcaagcataagccttaaaaggccctttatgatgagaggctaccctctcaaggtattccttgacagtctcgcactctggtatggaactcttaagaggctccttaatgctcctcttaataataatcatacatttgtcatttgatctttcccacttgaccttgtcgatgctgtattggatccacatgtggtcatagttgggagtgcccactgtgggctcaactggtttatcaaacctcagtgcgtaatctatctcacccactgtggttatcatgtcaatatcctcccgccaagaatggtaattactaccatctagcggtttcatctaagcaatctggctaatcagcatggcagtatgagcacctttgcaaaattaaaatagaaaatatttaggacatctgaaataaatactgaatacaaaatcatagaacatgcatgaattaaatattcaacattggtcaaataataatcatgccatatctatgaaaatttctgatcacaaaaattctaaaccatcgttggatgatctagaaaacataaacttgtataaaactatggtaacaatatccaacgttggctaaaatattcaatcaccacaaaattttctgaattctatgcaatttaaacaataattaatccacgttggtttcataat

SEQ ID NO: 7150 - DNA, 1123 bp, Zea mays
  Zm_smallRNAprecursor_2639
taatgatggccaggctgtctccacccgagactcagtgaaattgcactcgctgtgaagatgcagtgtacccgcggcaagacggaaagaccccgtgaacctttactatagcttgacactgaacattgagccttgatgtgtaggataggtgggaggcttgaagtgtggacgccagtctgcatggagccgaccttgaaataccaccctttaatgtttgatgttctaacgttgacccgtaatccgggttgcggacagtgtctggtgggtagtttgactggggcggtctcctcctaaaagagtaacggaggagcacgaaggttggctaatcctggtcggacatcaggaggttagtgcaatggcataagccagcttgactgcgagcgtgacggcgcgagcaggtgcgaaagcaggtcatagtgatccggtggttctgaatggaagggccatcgctcaacggataaaaggtactccggggataacaggctgataccgcccaagagttcatatcgacggcggtgtttggcacctcgatgtcggctcatcacatcctggggctgaagtaggtcccaagggtatggctgttcgccatttaaagtggtacgcgagctgggtttagaacgtcgtgagacagttcggtccctatctgccgtgggcgctggagaactgaggggggctgctcctagtacgagaggaccggagtggacgcatcactggtgttcgggttgtcatgccaatggcactgcccggtagctaaatgcggaagagataagtgctgaaagcatctaagcacgaaacttgccccgagatgagttctccctgactccttgagagtcctgaaggaacgttgaagacgacgacgttgataggccgggtgtgtaagcgcagcgatgcgttgagctaaccggtactaatgaaccgtgaggcttaaccttacaacgccgaaggtgttttggcggattgagagaagattttcagcctgatacagattaaatcagaacgcagaagcggtctgataaaacagaatttgcctggcggcagtagcgcggtggtcccacctgaccccatgccgaactcagaagtgaaacgccgtagcgccgatggtagtgtggggtctccccatgcgaga

SEQ ID NO: 7151 - DNA, 1161 bp, Zea mays
  Zm_smallRNAprecursor_2640
aacttgattatttagcaagttgtccattcaatcatcttacaacaagcaacatatgcatatatatccaattcaatcaactcatatgcattcaaatcaatttgatcaacaaatattatactttatatacctcatgatcatccaatagcaagtttgaacttaacttatttgcaatccattcataatttaaccaacttgaataaagcacttgtatttggtagaatttggacttcacttattattgacttggcattgggatagaattttattagtcttcaacacttaattcaacatgatgattaaatgaatattattgaatcaagcctccaacgcccaaggtacctgttcatgatcatccatgttttgatggtacccaaactaagttgggtcctcttaagttaggagcaacatacttaggcattgccttagtatgaatagcgggatgttttgcaattgcaacaaatgaggtaccattgccatcctttctaagcataatattattatgaattaaaataggcttagaattgttacctaagggacatgaatttgccatgtgtcccctttcccgacatgtgtagcaagttctctttgtttgagccttctctttctttctcaaattttgcttcacattgtcctgcctcttctcatttgcttgagccttcttctcaagattgttaggacaccttgaggcaaagtgacccatatcatcacacatgtagcacttgatttgagctaaatcatccttcttcttttgatttgtgctcatcatgtcatcttgattatatattgaatgtcttcttcttactcttcttgttttctttttcttccccacatcaccattatatacatggttaatcttgatttgcttttggggattcttcttttgctcaactcgtgactttggtttaggcttcacttgtggcttcactaatttcttggttgggcacattgaggtgaggtgaccccaagtgtggcacttgaagcacttgtcatgctttagccttctttcttccttcttcaacttgagcttccttttattggggcatgcctttgcaagatgacccatctcatggcacttatagcacatgaagtgagatatcttatttccttttaatttcaattgcctgcctttgatattgctcttgttgaaaccaaggccactct

SEQ ID NO: 7152 - DNA, 1102 bp, Zea mays
  Zm_smallRNAprecursor_2641
gtttttttatttcctctagatagctgatggtctacttttctaggtttttctttttcctatcctgcttgctttctggtccttgtcggatcttgtacatattttaactcttctaatatattgtggtggcaaagcttttgccacttaattaaaaaaaagatttagcaagttgttaaatatatattgggaacaaaagctagctagcctccaacatttcgtaattcttaggttgttaaatatttttaaattatgctaactcgatgataaattcattatttttacaacttaaatcatttaaaatacatcacttatacacgggtgcaaagttaatagtaaacaagtgattttacggtgtgattgatgagcaaaacatgttattgggaatgcgaaacaactctccaagttttagaactaaatatgaatatttaggaaagaaccgttagaacataatttttgagggattttttttctagaaactacggtacgggagatgttctaagggcttgtttgggagcaagtggaatgaagggtattgataggactataatcccttgctatctaaaattgaatagtggaggattatatgccctccaatccactccattacctttactcccaaacaagccctaaaggggatatcggagatcaactcggcggtgactggtgaactgccaaataatggaaataccttgcggttctaaacaccatgtgaaacatgtcccatacctgctgattgctgactgtgtactagtttctcatccaactttctgaattatttgcaggtttttatggtacacctgactaataccatctgaagaaacagaattgcttaataaaactagtgcaggtattatgattgctcggttatcgaacatgttcatcaattacaagtttttgtgcaatttctgtagaaattttgtagttttgctatgtcacattgctcggctgtctttgagatttgcactgtagcatgctgttcttttactggagctattctcaagaccaattctggttcatgttatctattttatatatctaatcacataactgttttgaaggcatattctggttcatgtcatgcattttatatatctaagtcacaaat

SEQ ID NO: 7153 - DNA, 1178 bp, Zea mays
  Zm_smallRNAprecursor_2642
caataggttgcctcgcattttgccattctgaaatgtggtacttctgacccttataaggtgcaaggtacccctttctatttggataacctgaatccacaagatagtatttacctgcacaaacagaaatataaagtttaatacttaagacataaatgaatatcgtatgatacaaaagtacaacatacttatttaccttccggtggatgggggaaccagtctacataagttatcaaagtatcttgtaatactctagtgtcatgtactgaacctggccaacctgtgacaacaaatgtgaacctcatatcgaagtcacaaacggccattacattctgtgatgcgtaaccatgccgaccaatatatttggcttgctccgaggccgggacagacgctggaaagtgagtaccatcaattgctcatatgcaatccttgaagtggggccaaaatctcccctctcgcaaacgaggatgaatctctatgaaatttgggtctttgggcttgattacgtcagatgacatcttatatagtgcattaagtacttcactatacttgcgactaatagtttccaaggagtgaccaaacttattccttatctgtctaaatgattgtggacccccacatgcccacaagaaaatacctagagcttccatagtaccgacaccacggcttggaagcagaccataactttccaccaacgtatcatgcaatcgtctaaaaacagtatgtcgcatgcgaaacatgtcaaagcagtcgttactattctccaaagttcgctcaacccattgaatacctgtttcaaccattgttcttctagaaacctcactggaaggcctgccccaaatgtctacagcatatagggcaacaagcaattgtccatctctgtcatccgtgtcatgatcatatgtgtgtgcagcagggtcacacatctgcatgcacacaaacaacaggcttaaccaagttctaacttaaacctcattgtcactaaaggaaggcatctgatcggagtcatattcaataccccaaaacctttcgaagtgctcggcaaagtcccagtctggactaaggttgtcttcaccagggggtggtgaggacaagtctgagggttcgtagttgctgtcgggctggtgggttacgttgttgaccttgtccaaatactcttggaacaccagagaatcttgctc

SEQ ID NO: 7154 - DNA, 1080 bp, Zea mays
  Zm_smallRNAprecursor_2643
ggtggatgtggtagctcaatccaggagcatccctccaggtgggagcggtcgtcaacaatgacaactttggctttggaaagatcgagtacctcgaaccagggtgggaaatcggggtctgtgaaccagcagagagtcttgcacagagcataaaccttgtcccccattgttgttaggacagggcaccactttgtagaattgagagtcggcccgtgaatgaccttcttcgtcttggtgtcgaagatgacggtgtcacccggatcacccccgaccctaatgatccacgcgcggtgcactgaccgtagggacgtgaaggtcataccgccagcaacggtggtcagacgggtaactcggtgcaggctcttccgcttcacccgcgaaggaaaggaagtggcgacgcccatcttgtacacgacgtagggcatggaattcctagaccaatcccagtggcatgccacaaggtaggcagatcagacctggccttcatacaactcatcgctgacgatcctcgtcgggtcgagatgttctgtttcttgcatcagcggatcgccgtcaccgccgcacacgatctctagatcccccatctgaatctgatccggatcttcgcttccttccagctccactgatggcttgacccttccatgacggtcgcccgtctttctcttcctgtggcccatccttccttaaggtctctgctgtcgccgagaggccgccggaggaggtggtggtagttagggttacgaaatgcgaggctgaggtatatggcggcggaggactggacagaggtggatgcccgatacgactcgtgggtggttgttgggcctgtggatgtgaacgctgaggcacagctgctactagcatctatccgtgcagtggcctagttgctcttggatgacacctaacacgtgagtgatgttagttttatttcaagatctaaacccatggttttcacgtactagctactgcacttgtatgtatggccaacataaatatttgtgatgtgatatgatacataaatatttgtttgaaaatagcaacaagcttttcactaaatctacatatgtacaaattcagatcaacacg

SEQ ID NO: 7155 - DNA, 1071 bp, Zea mays
  Zm_smallRNAprecursor_2644
gtttgcgtgcgtagaaaacgatggggattatggtctgaacctcgcagattatcaaagctgattacgagatttatcactgctgaagcgtcgtgcgccgaacaaacgtggccgtcgtcgccttcaaaggaaaatagaaaataacacctgggtgctgagggcaaggcccggccacaaggtgggtcacacgacgcccaccaggccaccagggagaggaggcgcagatcatcgctcaatgactgcgcttctataaaatacgtccatgattggtcaaggttttaacttgcggttggggatccggatcctttgagatgatggcgtgcgtgacaactgagcgagcgccgcatgtgatggcctgatgggactgaagtgaactgcccagccagaggcagagggtacggcatgatgggacaatcatgtgagttctcctggcacttggcggcggcctacttggctgtctggttgttaagagggccaattccctgtatgccactgtaaaatatactcattccttgtatgccactggccccacatgtcatagacaccaaaaaaatatacctatatgccactcagtggcacacaagggatgagtataaaatctgatggcataccaggaattttctcttgttaagaataatgtgcaatatatttgtatgaaacaaatgttgtcatttaaataatataatatcatcttggtgtagggttcatacattcatacgtacggggcgaagccacctgctagggggcggatggaccgaccgccccagcggcggtgttgctccagagcccgagtcccagacccccacatgatggcgagaagcagcgagccggtgcctgagctaggcccaggcagcaacgacccattgaaggcccaacgccctaaactaacccacgtaacgattccccgatccacatcggcattcgtctcttcgttacgaaccggagccaggagcgctgcttgcttgtgttctttgcaagcgtacattatgctcgtcgtttgcaagcgtttgcttctgttgatgcgatactcctgcttcgcgacggcgtgcagcgccgttctgtgtacggcacggt

SEQ ID NO: 7156 - DNA, 1042 bp, Zea mays
  Zm_smallRNAprecursor_2645
gcacaaggagaacctatagcttattgcaagccttgcttttgagaaagaagcaaaaaaaaaaaaaaaagagcagtgaggccgtctaacttctgacaacaggaagcttttattggatatgtcaggtcttgagcttggcttatcttctgtgaaagaggaaatagatgctagcagtagatgtaaagttctggagtgtgacctgcgtccctccaatgaaaatttgaatcatactttaacagaattggcaaacccaggcattattggaaagattacataaagataatttgaaactatatgagagttttgactcagaaacggaaacaaaaaaagaaacatcaagaatacaatttgtatctatgtaatgaaaagggtaggctttcttcagatttatttcaaataaatgacaagttggaactttcgtaggccaagcatgagcaaatcaaaaggctcaaagaaagtgtctcatcataagcacgtgagataaaataaagtactccctccgtttctttttattagtcgccggatagtacaaatttgcactatccggcgactaataaaaagaaacggagggagtacaacatctttataattatttcctgcaataatcaatagaatgggaatccaaatgcacctttctatttagaagaaattcaaatacagaaatatgataatgagaacaaatatgcttatgcataacaaccatagtgctaatgtgtcattcctattattaaacacaggagcaaatcttgcttctcagtgtttactatcaaagacattcctttagattatttatgtcttcattgcattaatgattgctcactaggggatgacgcgccggagcacaatggcgaggtcgctgccgtttgcccgtgagactaggtgagccgtcccgcgggcacgcctcagcagctcagctgctgcctgctgccgtggatgtttcctctgttgcttctctttccggtttttttttttaagaaaggaatcctctggtagtcaggtgataattagtttgttcctttcatcgttcgtagttggcggaggagca

SEQ ID NO: 7157 - DNA, 1034 bp, Zea mays
  Zm_smallRNAprecursor_2646
aaggagaacctatagcttattgcaagccttgcttttgagaaagaagcaaaaaaaaaaaaaaaagagcagtgaggccgtctaacttctgacaacaggaagcttttattggatatgtcaggtcttgagcttggcttatcttctgtgaaagaggaaatagatgctagcagtagatgtaaagttctggagtgtgacctgcgtccctccaatgaaaatttgaatcatactttaacagaattggcaaacccaggcattattggaaagattacataaagataatttgaaactatatgagagttttgactcagaaacggaaacaaaaaaagaaacatcaagaatacaatttgtatctatgtaatgaaaagggtaggctttcttcagatttatttcaaataaatgacaagttggaactttcgtaggccaagcatgagcaaatcaaaaggctcaaagaaagtgtctcatcataagcacgtgagataaaataaagtactccctccgtttctttttattagtcgccggatagtacaaatttgcactatccggcgactaataaaaagaaacggagggagtacaacatctttataattatttcctgcaataatcaatagaatgggaatccaaatgcacctttctatttagaagaaattcaaatacagaaatatgataatgagaacaaatatgcttatgcataacaaccatagtgctaatgtgtcattcctattattaaacacaggagcaaatcttgcttctcagtgtttactatcaaagacattcctttagattatttatgtcttcattgcattaatgattgctcactaggggatgacgcgccggagcacaatggcgaggtcgctgccgtttgcccgtgagactaggtgagccgtcccgcgggcacgcctcagcagctcagctgctgcctgctgccgtggatgtttcctctgttgcttctctttccggtttttttttttaagaaaggaatcctctggtagtcaggtgataattagtttgttcctttcatcgttcgtagttggcggagg

SEQ ID NO: 7158 - DNA, 1065 bp, Zea mays
  Zm_smallRNAprecursor_2647
ggggggctgcaaggacggctcgtcggacagcgactcgagcgtggtcctcaacgacgacgtggacgcgtcgccgtactccggcgcggcgttcgagcagccgggcgccttcgccgggttcggtgcgccgttcttggccgcatcggcggcggcggcgccgccaccgacgggctgctcgtctccccccgtgttcgagaccaagtggcagcacgggccgacgacgtacgctttcgaatcgtacaagagctgctgcgccggatacggcttcacggaggaatggctcgccagctcggacgtcgtcggcagcgacggcgcggccggcttcttctcggaggatcacgcctccagcctcaactttagctggtgtgcgagtggcgcccaggactgggagtgagcgaggtttttggtctctgcacggttactgtaaagacaccatatcttatgagcaaggagccctgctgctcccatgagcaaaatcaattcagaccacaccctccatatccaacggtgctgcgtcaggggggtttttgtaaaatgtacagagttacaaagaacattttacaaaaccccctgacacagcaccgttggatgtggagggtgtggtctggattgattttgctcatgggagcaccaacgctccttgcgcacaagatacgttctctactgtaaaaccaatgttacggctgcattgtacattgggctcgtttccacaacaaggcgcctgcactagctagtagctagtggccaacgcggcaaagcgagcggacatccatcgcacggcgggaaaagaggattagttatgtccaaacgggctacaagggatggctaagcagagcctcatcagacacgtcggtcttgcagtaccgcgccaatgtgatcaggttgagattcagccacgacaccacggagttgtcgagcccgacacactatgtcctctaaacaactttttttctaaacagcttttctgcaaatctggattcctagacaatttagctgtattaggaatatgaatatcacggagtttacgtagggagaaagataaatgagtttgcacgatttagggtttag

SEQ ID NO: 7159 - DNA, 1197 bp, Zea mays
  Zm_smallRNAprecursor_2648
tataggagtacaaggattgtcgtcactagaactatcctccccgctcccttcaccggagctgctcgttgtctgccattcaagtttggtcgcgtcttcatcaactttgttagacgcaccggtgcagaccacatccatactaggctgctcgttgtctgccattcaagctggttccatcgataaagggatatactgttagtctgatatactggttccatcaataagggaacttggagaaaaggtgattcaaaataaatcgagcccaaacccccctacggggcagaatcgggtcgggaagcaagctcgcagatagaagggcactttccaatgcagttagacagagaaggcatggctgtgatgttataatgctgaaggaccccaagaagagattatgccctatagtctaccacctctcgttatttgtgggcttcaccgagggcgggaaacatttggtgagatcaaacgaccttcgggctggggacgtctgcgagcttgttaaggggccagacgatgttgagccggtgtactctgtccggatgtgtggtcacaaaatttaaagccgccccggcttcatgtgtgcgcttctcttctcgtgtgcctcaaactaagaccacttagcaccccacctaagagaagagaagcacacacatgcagccggggcagcttttaattttgtgaccacacatccggacatagtacaccggctcaacatcgtctggcctcttaacaagctcgcagacgtcttcagcccgaaggtcgtttgctatcaccaaatgtttccagccatcggtgaagcccacaaataacgggaggtggtagactacaggacttaatctcttcttggggtccgccgattcaggcattccgccgatgccattctccatataagtcccaaacagagaatagggatgaggtagtcaagattgtagggcgctagtgctcaactactagcatctatagatatggacacaagtccaaatttggtgctactcggcaccatcgatatcactagaaaaaaaaaatacatcaaagagatccacttcccaatagtactcgaagatagttcattgacttgacactctctaagaggttcatacaaaatacattctctctaagagtgaaacctacgatactcatatcgtgttgtttaggactaaacatcaacaaccccttgactggtcgctatcatactcaattcca

SEQ ID NO: 7160 - DNA, 1198 bp, Zea mays
  Zm_smallRNAprecursor_2649
tataggagtacaaggattgtcgtcactagaactatcctccccgctcccttcaccggagctgctcgttgtctgccattcaagtttggtcgcgtcttcatcaactttgttagacgcaccggtgcagaccacatccatactaggctgctcgttgtctgccattcaagctggttccatcgataaagggatatactgttagtctgatatactggttccatcaataagggaacttggagaaaaggtgattcaaaataaatcgagcccaaacccccctacggggcagaatcgggtcgggaagcaagctcgcagatagaagggcactttccaatgcagttagacagagaaggcatggctgtgatgttataatgctgaaggaccccaagaagagattatgccctatagtctaccacctctcgttatttgtgggcttcaccgagggcgggaaacatttggtgagatcaaacgaccttcgggctggggacgtctgcgagcttgttaaggggccagacgatgttgagccggtgtactctgtccggatgtgtggtcacaaaatttaaagccgccccggcttcatgtgtgcgcttctcttctcgtgtgcctcaaactaagaccacttagcaccccacctaagagaagagaagcacacacatgcagccggggcagcttttaattttgtgaccacacatccggacatagtacaccggctcaacatcgtctggcctcttaacaagctcgcagacgtcttcagcccgaaggtcgtttgctatcaccaaatgtttccagccatcggtgaagcccacaaataacgggaggtggtagactacaggacttaatctcttcttggggtccgccgattcaggcattccgccgatgccattctccatataagtcccaaacagagaatagggatgaggtagtcaagattgtagggcgctagtgctcaactactagcatctatagatatggacacaagtccaaatttggtgctactcggcaccatcgatatcactagaaaaaaaaaatacatcaaagagatccacttcccaatagtactcgaagatagttcattgacttgacactctctaagaggttcatacaaaatacattctctctaagagtgaaacctacgatactcatatcgtgttgtttaggactaaacatcaacaaccccttgactggtcgctatcatactcaattccaa

SEQ ID NO: 7161 - DNA, 1196 bp, Zea mays
  Zm_smallRNAprecursor_2650
ataggagtacaaggattgtcgtcactagaactatcctccccgctcccttcaccggagctgctcgttgtctgccattcaagtttggtcgcgtcttcatcaactttgttagacgcaccggtgcagaccacatccatactaggctgctcgttgtctgccattcaagctggttccatcgataaagggatatactgttagtctgatatactggttccatcaataagggaacttggagaaaaggtgattcaaaataaatcgagcccaaacccccctacggggcagaatcgggtcgggaagcaagctcgcagatagaagggcactttccaatgcagttagacagagaaggcatggctgtgatgttataatgctgaaggaccccaagaagagattatgccctatagtctaccacctctcgttatttgtgggcttcaccgagggcgggaaacatttggtgagatcaaacgaccttcgggctggggacgtctgcgagcttgttaaggggccagacgatgttgagccggtgtactctgtccggatgtgtggtcacaaaatttaaagccgccccggcttcatgtgtgcgcttctcttctcgtgtgcctcaaactaagaccacttagcaccccacctaagagaagagaagcacacacatgcagccggggcagcttttaattttgtgaccacacatccggacatagtacaccggctcaacatcgtctggcctcttaacaagctcgcagacgtcttcagcccgaaggtcgtttgctatcaccaaatgtttccagccatcggtgaagcccacaaataacgggaggtggtagactacaggacttaatctcttcttggggtccgccgattcaggcattccgccgatgccattctccatataagtcccaaacagagaatagggatgaggtagtcaagattgtagggcgctagtgctcaactactagcatctatagatatggacacaagtccaaatttggtgctactcggcaccatcgatatcactagaaaaaaaaaatacatcaaagagatccacttcccaatagtactcgaagatagttcattgacttgacactctctaagaggttcatacaaaatacattctctctaagagtgaaacctacgatactcatatcgtgttgtttaggactaaacatcaacaaccccttgactggtcgctatcatactcaattcca

SEQ ID NO: 7162 - DNA, 1196 bp, Zea mays; identical to SEQ ID NO: 7161
  Zm_smallRNAprecursor_2651

SEQ ID NO: 7163 - DNA, 1197 bp, Zea mays
  Zm_smallRNAprecursor_2652
ataggagtacaaggattgtcgtcactagaactatcctccccgctcccttcaccggagctgctcgttgtctgccattcaagtttggtcgcgtcttcatcaactttgttagacgcaccggtgcagaccacatccatactaggctgctcgttgtctgccattcaagctggttccatcgataaagggatatactgttagtctgatatactggttccatcaataagggaacttggagaaaaggtgattcaaaataaatcgagcccaaacccccctacggggcagaatcgggtcgggaagcaagctcgcagatagaagggcactttccaatgcagttagacagagaaggcatggctgtgatgttataatgctgaaggaccccaagaagagattatgccctatagtctaccacctctcgttatttgtgggcttcaccgagggcgggaaacatttggtgagatcaaacgaccttcgggctggggacgtctgcgagcttgttaaggggccagacgatgttgagccggtgtactctgtccggatgtgtggtcacaaaatttaaagccgccccggcttcatgtgtgcgcttctcttctcgtgtgcctcaaactaagaccacttagcaccccacctaagagaagagaagcacacacatgcagccggggcagcttttaattttgtgaccacacatccggacatagtacaccggctcaacatcgtctggcctcttaacaagctcgcagacgtcttcagcccgaaggtcgtttgctatcaccaaatgtttccagccatcggtgaagcccacaaataacgggaggtggtagactacaggacttaatctcttcttggggtccgccgattcaggcattccgccgatgccattctccatataagtcccaaacagagaatagggatgaggtagtcaagattgtagggcgctagtgctcaactactagcatctatagatatggacacaagtccaaatttggtgctactcggcaccatcgatatcactagaaaaaaaaaatacatcaaagagatccacttcccaatagtactcgaagatagttcattgacttgacactctctaagaggttcatacaaaatacattctctctaagagtgaaacctacgatactcatatcgtgttgtttaggactaaacatcaacaaccccttgactggtcgctatcatactcaattccaa

SEQ ID NO: 7164 - DNA, 1180 bp, Zea mays
  Zm_smallRNAprecursor_2653
acaaggattgtcgtcactagaactatcctccccgctcccttcaccggagctgctcgttgtctgccattcaagtttggtcgcgtcttcatcaactttgttagacgcaccggtgcagaccacatccatactaggctgctcgttgtctgccattcaagctggttccatcgataaagggatatactgttagtctgatatactggttccatcaataagggaacttggagaaaaggtgattcaaaataaatcgagcccaaacccccctacggggcagaatcgggtcgggaagcaagctcgcagatagaagggcactttccaatgcagttagacagagaaggcatggctgtgatgttataatgctgaaggaccccaagaagagattatgccctatagtctaccacctctcgttatttgtgggcttcaccgagggcgggaaacatttggtgagatcaaacgaccttcgggctggggacgtctgcgagcttgttaaggggccagacgatgttgagccggtgtactctgtccggatgtgtggtcacaaaatttaaagccgccccggcttcatgtgtgcgcttctcttctcgtgtgcctcaaactaagaccacttagcaccccacctaagagaagagaagcacacacatgcagccggggcagcttttaattttgtgaccacacatccggacatagtacaccggctcaacatcgtctggcctcttaacaagctcgcagacgtcttcagcccgaaggtcgtttgctatcaccaaatgtttccagccatcggtgaagcccacaaataacgggaggtggtagactacaggacttaatctcttcttggggtccgccgattcaggcattccgccgatgccattctccatataagtcccaaacagagaatagggatgaggtagtcaagattgtagggcgctagtgctcaactactagcatctatagatatggacacaagtccaaatttggtgctactcggcaccatcgatatcactagaaaaaaaaaatacatcaaagagatccacttcccaatagtactcgaagatagttcattgacttgacactctctaagaggttcatacaaaatacattctctctaagagtgaaacctacgatactcatatcgtgttgtttaggactaaacatcaacaaccccttgactggtcgctatcatact

SEQ ID NO: 7165 - DNA, 1056 bp, Zea mays
  Zm_smallRNAprecursor_2654
ccggtgcacccagaccgcagccaactcttttccaattctttttctcatgtttctagcacttagacaatatatgttagtactcaaaacaatgtaataagtctaaaaacatactttgttacatgatttgcactttttcaatctttggcacattcagaacttagagaatgtgtgttggacacttaatcaccaaaacattataaaaatatttccctttcagttcggtgtagtagtagatctggagatctatgtggttctagaaacattggggttaatctgagccattgtgcggcttttctttgattgtaacctagcactaccggaattcggctctttgccgagtgccggcggctttgccgagtactttttatcgggcactcggcaaagtcgactttgccgagggccgctctcggcagagtcctgcgctcggtaaagatcttgtttaccgagtgcagggcactcggcacagccaagcactcggcaaagactgttttgccgagcgtcaagcactcggcaaacatggctctcggcaaagggccgttagcggccgtctacaactgacggccgtcagcctttgccgagtgtcaaatatctggcactcggcaaagagagtctttgccgagtgtcctatgtagacactcggcaaagcatatttttattttttttattttggtcaccaaactttttgtggtatgttcctacactatgtagacctacatgtaccattgtgggacgattataacagtgttttctatagctagtacatttagtttgtttatttgaatttcttcggaaaattcagatttgaactgcaggtcactcgaaacttggaaaaccgtgcatgcaaaaatgatatccatactacttagcacaagttacgaccgatttcaggagcggaccagaaacttcgagcaacatgctcactcaacatgaccgtaaactttccatctaggtgtttaaaaaattgtataaaacagaaacaaagtcagaaaatcatgaaacctgtccacgtgtcatgatatcatatgtagaggctgtgataaaaatttgaaaaagttt

SEQ ID NO: 7166 - DNA, 1134 bp, Zea mays
  Zm_smallRNAprecursor_2655
aagatggattacgataagaagctaaagaagctcgcccctagaagaaaatccaaaagaagatcaagaacccaggaggctaggctgggcggaagaagaaagctcctccagcaccacctcctgccaggatagaaaatttgtccgacattgaggatatgtccctagctagccttgacgaccttctcaaggaatttggggatactttagaaaaagagttcggtagtacctcagagaacgctcgcgtgtagtacgacttgtagtagttgtatgcttgtaatgtattggtgtaatgaataaaataatttggttgaaaacaattggcatgtgcataatagtgactctctcccccctcgcagatggatttggataaaaccacgcctaccgcctccgggattggagcagggtttcccctaagagctgaaagagaagccggtagggaaggaagtgagactcacctccctgcacctccagaactacccctagatttagcccaagttctagccaaccaaacccgactcatcgaggtcctcactcgaagtctagaaaatcaacgcccgaatggtggaagaccacaagacaggatgggagatttcctgaggctcaagcctcccacgtttgccggatctagcaatcccctcgatgctgacgattggctgcgcacgattaagaggaagctggaagccatcggatgcccggaaaattagcgtgttcaactggctgctcatcaactttccggaatggctttagcctggtgggataccttcaatgttaccatcagagatgctacctgggcagagtttgaaacggcttttcgggagcaccatgtgccccaagggatcgttcagctcaaggaagatgaattccgggaactgactcaagacagaagatctgtcagtgagtacgtgcacaaattcacagagttggcccgctacgcgccggatgacgtcagcaccgaagtcaagaagatggcccgcttcctgaaggggcttagaccagaactcaagaccatcctagccagccaagacttcctcagtttctcgcacctctcgaacaaagccatgcaagtggaaagggcaaaggaagaagaaaaaggccatctcaagaggaaattccatgtcctccgagcacagcagcaag

SEQ ID NO: 7167 - DNA, 1072 bp, Zea mays
  Zm_smallRNAprecursor_2656
agaagctgatgatctcccacggcgctatcgggtacctgaagaagctctcggagtcggagaaggacgtggccggcgcgaagaagctgctcgagaagctggaccgaggaaggctacgcagcctgttcggcaggaagtagccaccaggcgatcgatcgttcttcatgtacaaagatcccgtccgtcctgtttgtgtcatagcctctatgactatgatgaagtgaagtgcggcaggcagctgttcgttcatgtgaagtccctaacaatggccaaacgaatttctttctagcggtcccctcgcaatgctaatataaaatttcttcatggtgtcgtgggcctcagagaacttctgaagatctgcgaaggagaaacaacgagttgccctaagcgtcaataaccggctgattggttccctgtgtctgtggcagcacgctcgctcgagtctggctagtcggacacgggcgttttggcggtacgagcagatgcaggcaattagccttcaaatagcttgttttgcatcggatcgtatagcccacaccttcgatatcaatgcatacagtggtccagaacaaaacgatgcggacaaccaatcatatggtcccccgcagactcgcctcgtgcgagtccctcccccctcgtaggtgtttcgcaccgctccgctcctcatgtcgcctcacttccaaggcgatcagcttctgcggaggatgcgttctacggtctccaagctcctgtcggctcggtcgaaggccgcctcgataaggtgccactcctccgcttccatctcattcccttctgagccctcaaggatgaaaggggaggtccccgagggctccttcgggagcgggcagcgcgggcatcacgaccctaggggaggaggaggtagcggtgactcacggtggtagatcacggagttcagcgatcgccgtgggcaacagcgccgcctcggactacccaaccgttgtcgcggtgcctggagactcagagggccaggggcggcagcaacgaagaggtagccaccgtgttcgccgtgggggtcccacccgtggcgacatccacgaccgcttggaccacctct

SEQ ID NO: 7168 - DNA, 1051 bp, Glycine max
  Gm_smallRNAprecursor_1
cttctattttttttttttttttataaaaaagtttttatattattaaaattaaatattatattatataaaattatttttaaataatttgaaaattagttatttattaaattaatttatgtaatattattttataatttaattttgttattaagaaaatgatattattaaatttaagtgtttttgttatattatttaaattatttaagatattttttggtgaatatatgttttaaaatttaaattttgtataataatatatttattttagtaaatatttattttgtataataatctgaattttaaaatttttaatttaactattttactaaatataattagtttgtttatgtttttagatttaattaaaaatgataaaactaaagcttttaacaatttatttatataagaacattatactacgtcatcaataaaatatttaaacaatgacatttgtctaaggaaaaactaagatgaggatacattaggacaattatttctgctatgaccatgttgccgacaaagtccacatttttttctacttgctcgttcattttcgtcttcgtccatctcagtaggaatgcgagttgaaacgggacgaccctttacagtcctctttctccttggatcaggaccccactgatctccttcatattcttgccacattgattcgtgtggcaataaaccaaaggagttgtcgtagatgtgcaaaatgtgttgtaaagtgaatatcatcggcacataggtcatgggatcaacattgacagatttacaggcagccatgacgtgagaacacggtaaatgtttagcctgaaattcaccacaatcacacttttgggattgtaacattactctaaaccttccaggtggtctgggtgtttcaagtggggattgagtctcggttataataaaagtgtgattgtgtctgtcgaattcatttacaatgtgtgtattagattcttgttgaccactattgattgcatcgaagacgacttcagaatactgtgagccggagttgatcattgcctgagtttgtcgacctctattagcaaag

SEQ ID NO: 7169 - DNA, 1051 bp, Glycine max
  Gm_smallRNAprecursor_2
atttaagatattttttggtgaatatatgttttaaaatttaaattttgtataataatatatttattttagtaaatatttattttgtataataatctgaattttaaaatttttaatttaactattttactaaatataattagtttgtttatgtttttagatttaattaaaaatgataaaactaaagcttttaacaatttatttatataagaacattatactacgtcatcaataaaatatttaaacaatgacatttgtctaaggaaaaactaagatgaggatacattaggacaattatttctgctatgaccatgttgccgacaaagtccacatttttttctacttgctcgttcattttcgtcttcgtccatctcagtaggaatgcgagttgaaacgggacgaccctttacagtcctctttctccttggatcaggaccccactgatctccttcatattcttgccacattgattcgtgtggcaataaaccaaaggagttgtcgtagatgtgcaaaatgtgttgtaaagtgaatatcatcggcacataggtcatgggatcaacattgacagatttacaggcagccatgacgtgagaacacggtaaatgtttagcctgaaattcaccacaatcacacttttgggattgtaacattactctaaaccttccaggtggtctgggtgtttcaagtggggattgagtctcggttataataaaagtgtgattgtgtctgtcgaattcatttacaatgtgtgtattagattcttgttgaccactattgattgcatcgaagacgacttcagaatactgtgagccggagttgatcattgcctgagtttgtcgacctctattagcaaagagttgtgcggtcttgaaataggtctcctcaaccaatgatgacaccggcaaatgtcttgtgtttttgaacatggaattaacagactccgacaaattggtagtcatatgtccccaacgcttcccctcatcaaagcattgtacccatttttgtttgggtaattgatcaagccattcagctgcacttggcttattcgcacgaa

SEQ ID NO: 7170 - DNA, 1167 bp, Glycine max
  Gm_smallRNAprecursor_3
aataatatatttattttagtaaatatttattttgtataataatctgaattttaaaatttttaatttaactattttactaaatataattagtttgtttatgtttttagatttaattaaaaatgataaaactaaagcttttaacaatttatttatataagaacattatactacgtcatcaataaaatatttaaacaatgacatttgtctaaggaaaaactaagatgaggatacattaggacaattatttctgctatgaccatgttgccgacaaagtccacatttttttctacttgctcgttcattttcgtcttcgtccatctcagtaggaatgcgagttgaaacgggacgaccctttacagtcctctttctccttggatcaggaccccactgatctccttcatattcttgccacattgattcgtgtggcaataaaccaaaggagttgtcgtagatgtgcaaaatgtgttgtaaagtgaatatcatcggcacataggtcatgggatcaacattgacagatttacaggcagccatgacgtgagaacacggtaaatgtttagcctgaaattcaccacaatcacacttttgggattgtaacattactctaaaccttccaggtggtctgggtgtttcaagtggggattgagtctcggttataataaaagtgtgattgtgtctgtcgaattcatttacaatgtgtgtattagattcttgttgaccactattgattgcatcgaagacgacttcagaatactgtgagccggagttgatcattgcctgagtttgtcgacctctattagcaaagagttgtgcggtcttgaaataggtctcctcaaccaatgatgacaccggcaaatgtcttgtgtttttgaacatggaattaacagactccgacaaattggtagtcatatgtccccaacgcttcccctcatcaaagcattgtacccatttttgtttgggtaattgatcaagccattcagctgcacttggcttattcgcacgaatatccccaagatgtcgccagtgcatcttctttgtgtatgcgtaccctgtaaatatttaatcaatgtattatgttataaaatttgattgaaagaaaattataacgaataaataaaatagattctcaccagccaacataagtggtttctttaaatgtttgcagtttga

SEQ ID NO: 7171 - DNA, 1092 bp, Glycine max
  Gm_smallRNAprecursor_4
ggacaattatttctgctatgaccatgttgccgacaaagtccacatttttttctacttgctcgttcattttcgtcttcgtccatctcagtaggaatgcgagttgaaacgggacgaccctttacagtcctctttctccttggatcaggaccccactgatctccttcatattcttgccacattgattcgtgtggcaataaaccaaaggagttgtcgtagatgtgcaaaatgtgttgtaaagtgaatatcatcggcacataggtcatgggatcaacattgacagatttacaggcagccatgacgtgagaacacggtaaatgtttagcctgaaattcaccacaatcacacttttgggattgtaacattactctaaaccttccaggtggtctgggtgtttcaagtggggattgagtctcggttataataaaagtgtgattgtgtctgtcgaattcatttacaatgtgtgtattagattcttgttgaccactattgattgcatcgaagacgacttcagaatactgtgagccggagttgatcattgcctgagtttgtcgacctctattagcaaagagttgtgcggtcttgaaataggtctcctcaaccaatgatgacaccggcaaatgtcttgtgtttttgaacatggaattaacagactccgacaaattggtagtcatatgtccccaacgcttcccctcatcaaagcattgtacccatttttgtttgggtaattgatcaagccattcagctgcacttggcttattcgcacgaatatccccaagatgtcgccagtgcatcttctttgtgtatgcgtaccctgtaaatatttaatcaatgtattatgttataaaatttgattgaaagaaaattataacgaataaataaaatagattctcaccagccaacataagtggtttctttaaatgtttgcagtttgagttaccacgaagaaagttttgtgcaatgtggcgcaggcaaaagaaatgggatgtgtcctggacccataagttacttgggttgttgtaggcacttataattgaggggtgtcggtctgaaataagagaaatgttaatttgcggagtaacatgtcttctcaaa

SEQ ID NO: 7172 - DNA, 1040 bp, Glycine max
  Gm_smallRNAprecursor_5
attcgcacgaatatccccaagatgtcgccagtgcatcttctttgtgtatgcgtaccctgtaaatatttaatcaatgtattatgttataaaatttgattgaaagaaaattataacgaataaataaaatagattctcaccagccaacataagtggtttctttaaatgtttgcagtttgagttaccacgaagaaagttttgtgcaatgtggcgcaggcaaaagaaatgggatgtgtcctggacccataagttacttgggttgttgtaggcacttataattgaggggtgtcggtctgaaataagagaaatgttaatttgcggagtaacatgtcttctcaaattctttagaaaaaacccccaagctgaagttgtctccccttctacaatggcataggcaatcgggaagatatggttagctccatcttgtgcggtagctatcaacagtgtgccagtatactttccgtaaagccatgtaccgtctacttgtacaatgggtttgcaatatgcaaaaccattaatgcatggaccaaatgaccaaaagacacgtttaaacaatcttttgcccggtactatttctcccccctcatacaaggattctgtttgagcagcgaccacagtcccgggaacacaagattgcaaagctccgaaaagttttggcagtttggcatatgattcttcccagtttccatgaatcatctccaatgctttttgctttgctaaccatgtcttcttgtaggatggggtataattcatgaacgttttaatctctgcaatcaatgtcttgatggagacagttgggtttgttttgacaattggttggatgatctgtgctatgacgtgtttgtcgagttggcgatgatcttgtgtaagcatcggcacgagacaagtgtgatgacctctgatactcttgataatccatttgttatgcctctttgaattgcatgcgcccaagctccatgtacaaccattttcatgtaacttgcagacgaagtgtatccttctttggtcagagtaaattgttctgcaatcaaaatgatttctga

SEQ ID NO: 7173 - DNA, 1084 bp, Glycine max
  Gm_smallRNAprecursor_6
taagttacaggtttcatatatgtccaccaaagatcttactcgtcttggagtagactctggtgatgatagttcgtgatcttgttgttgtgatggaggtgaaggtggttcacctgggtcttcttcctcatcttcttcttgaggtagttgagcgggtataagaacgtttttctccactttttcttcatcccaattccatgaagcgtattcatcaacttcaacatctcgactgatgacaagtttcttagtttgcaagttgtagacacggtagcccttagagatattgctatacccaaggaagatacctcgtatagtcttgtcttcaagcttgtgcctcttcacgtctggaatatgaatgtagcatatagatccaaagacccttaggtgctttgttgatggcttcttcccgttccaagcttcaattggagtcctgtcttttacagacttagttggacatctgttgagtatgtaaacagcagtgtagactgcttcagcccataatgtgttaggtagtcccttctccttgagcatcgatctagccatctccataattgtgcgattctttctctcggacactccattttgttgaggagaatatgcgactgtaagttttctctcaatgccttcatcctcacaaaatctttcaaactcgcgagaggtgtactctttgccgcgatcacttcttagtacttttatccgttttccactttgattttcagcaagggccttgaactttttgaatactccaaggaattctgatttttcttttagaaaatatacccatgtcattctagagaagtcatcaatgaagagtatgaagtacctattgttcccatgtgatggcgtcctcattggtccacaaacgtccgtatgtatcagctccaatagatctttcgctctccatgctccacttgttgagaaaggaaatcggtgttgcttaccaagaagacatccttcacacacttcattgttcttctttatgcttggaagatctctcatcatgttcttctcatttaacaacttcaaggcatgtgagttgaagtggccaaatcttcgatgccatagccatgaatcatcaacttgtacc

SEQ ID NO: 7174 - DNA, 1079 bp, Glycine max
  Gm_smallRNAprecursor_7
taaggaaattcctagagccttctctttttttggaagtttctccataatttttctttcctctattttctttgttttggggctgaaatttaaactttgactggaaggcattttcaattgtatcttctttatgcctatacagtctttgctcatatgcttcaagagagcccacaagttctgtctctgatagagtggacagatctttggttttctcaatcgttgtcacgattgggtcaaacttttggggcatagtaattagaattttctcaacaattttcttgtcaagaatatcttccccaaaagctctcatttgattaactattcctttaactttagaatagtaatctttaactgtctcggactccttcatcttcaatagttcaaaatctcttcttagagattgaagtttaacggcacgtaccttaacacttccttgaaactcctcctgcaatgtgttccacgcttctttggcagtcttagctcccataattcttggaaaaattggatcagtcaccgcttgttgcaaggtgaacaacgcctttgaatttttctgtttatttttcttcaactctttttcttgagatgcattaagagctgaagtatccgcgggaatagtgaagccttcttctactatgtcccataaatcttgagatgaaaaatatgtttccattttaacacgccagaaatcataattttcaccattgaagatagggacagaaatagttgacgattgagtaatgttatccatagcttagaaaaaatattattggagtgggttagtagtacaaaggaaatttttgaagtagttgggaggattttggaatggtaggtaggtaagataactacgcctaatgtatgaccgaacgtagctctgataccactgttggtagttgattagatgatagttgatagttttagagaattgttttagaaagaaggctatgtcattgatttcttggattgatcaattacaacataccaattgcctatttataggctcaagtcactaacctctcaatggtggtgaatgtttctacattactttaggtctttctagagttttcatgatagattagtatcat

SEQ ID NO: 7175 - DNA, 1111 bp, Glycine max
  Gm_smallRNAprecursor_8
acagtctacacacgtggtaagccctttaattcgcgcaaaaacaggacaattaatgcaactacatatatgcaatatgtgcaaaaatgtaaaggttccagaatccagtatgtgtgtgtgcatggtaagcagttttctatttttttttttaattagacattatcattttcacaaaatcaagctattgtgggataaaattttgttgtgattgttgatctttactttgtgagagagagaataaagtccaaggaaacatccaaggttttttgaatagtacgtataacagaagaaaaattagcagatgaatttaggagagcatatgaaaggtttagtgttagcaatagcagaaataacaacccaagcaactgcgagaatagcgacatcaatcagaaagagaggcccaaaaggaatatatcaacacccaactacatgaaggattacagcaccaagtgctaggataggctataacagaatttcactactagaagagaagcattttacgacgcacattctaagacggttatttgcgaccgtcttagaatgtgacgcggtggcaaacttgtaattaagtaacaaaaaattgttttctacgacgtacatactaagacggtcgttaataaccgtcttagaatgtgcttggttggcattttcgttattcttgacaaaataacaacgacgggtttgaatgaaaaccgccttcgttgcatttaatctttttgcacaccagcccaataggtttatgcattattgaacgtttgtcttgcgcatgctctctactcacctttgtagtcccggccgtcaaaatacccattcccatcgcctttctctctccttcttcctctgccccccaaaaaaatgaagcgcttcatgctcccaagaaaccctctcagcgacgcagcagagcttccttcttcgccaagcccaaccccaactaccagctttgccaaactccgtccctcttctcacaaacacaaaccctccaaagagaacgaccttccctccgatcccaatctcgttactccctcccctgccaaattgaagagccccttgcccccaagacccccttcttccaaccctctcaagcgcaagctcaccatcgttgatgccctaaccg

SEQ ID NO: 7176 - DNA, 1171 bp, Glycine max
  Gm_smallRNAprecursor_9
agtcaatctaaccatgctgaattgaaacaatttagtgaatagatattgtaaataggagatggatccttgccgaggatagcattgaaggagagtgtgaaattgaaatacctcaagatatgttgattaaaaattcaaaaaatgctttggatgaattaactgactttgcatattctaatgcgttacaaactttgaataatcctaaatatttcatggaaagaagcaccttgtgtcctacattggatgttgtaagttgtaacacaagtaaattaacaactacatgataaataaaattgtaggagaggaaaacacatttgagttttgaatcaattggtgttgaaaaaataaatatcaaatgtgagttaaagactttttcattagagatcttaaatgataggcaaaattgtattctcattttgtctccaactttagatttggtctcccagtaaattaattcacaaattttatttttctaaaatcatgtaatgttaatctcctaggctacaattggacgttgaccgttaacaagtgatgttgacgttcttattggatgacgagtgccacgtgtcatgttctgattgaatgccaactccatgaaagatgaaatgcattgttgttttcattgaccaatcataacataatatgtgacagtcgtcatccaataaaaacgtgacacgtgacagtcaacatcacttgctaacggttaacgtccaaccgtgacctaggggctaacattgcatgattttagaaaataggaggacaaaatttgtgaattaatttactggggaaccaaatccaaaattagagataaactgaggaccaaatttataattttatctaaatgatattaattgttttggattttctcctcataaaactgaatttgaaggttggagtgtctgtgatgttgttgagggatattaatcaattaaatgcgagtaaggaggatgaaaaaaatgttatccaatatcaaattcttactaaaaacaatgttggtggtattatgactcctagcaatcaaacaatactatatgattttatcaacaaaagaaagtaatacataccattaaagtaacacaaagtaactaaatgattttatcttaactgcatgattatgaaatctattctgtattgtttatcctacttctatccaggcattcatattggctttgtg

SEQ ID NO: 7177 - DNA, 1110 bp, Glycine max
  Gm_smallRNAprecursor_10
tgatcaacatttggcaaagggactgcttcgatccattttgtaaagtaatcgacaccaactatgatataacgctggttcttagaagaagcaggcttgatttcaccaattaggtccaaagcccatcctctgaaaggccaaggtttgattatggagtgtaactcactagcaggtacatgctgtatccctgcatgcttttggcattcctgacagcctttagcaaattctatgcagtcttttaacatcgaaggccaatacaaaccttgtcgaaataaaagccatttcattttatggcctgcttgatgtgatccacaggccccactgtgaacatgggaaactgccaagtatgcttctgattcacttagacattttagcaacactccttctgcagtctttttaaacaaatcatttcccataaccacgtaatttaaagccctatatttgacctttcgagccacattgcctattggattttccaaatattcaacaatggactttctccaatcattatctaacatattgtcaatggccaaaatttgaattttttcctggagatcatccatgctttcatcttcattattttgtggtgtacttgcccccacaagttttggcattggcaatttagtgcttaatggctctggtaacaccagtttatcttttatttcgatcaactgagttaacttttccttcgacattttgtaccctgaagctatttgggctaaatcatttgcttcttggttttcttgtcgaggtatatgctcaatgttaatgtaatcgaaatgattcagaagagaacttgctataacaaaatattttgctaaatgttcattaacacatttgtattcttgtgttaattgcctcaacactaattctgaatcaccccttatgttaacatttcttgcccccaggctaattaaaatttcaaggcctgtaattagagcctcatactcagcctcattattagaacaaagccctttgattttatatttgaatttagttggaactttattgggggatattattaaaactccaattccagttccatgtttgtgtttcgaaccatcgaaatacaaaatccaaggctctgtatcgacatagtcttgcggcatttcg

SEQ ID NO: 7178 - DNA, 1083 bp, Glycine max
  Gm_smallRNAprecursor_11
caaagggactgcttcgatccattttgtaaagtaatcgacaccaactatgatataacgctggttcttagaagaagcaggcttgatttcaccaattaggtccaaagcccatcctctgaaaggccaaggtttgattatggagtgtaactcactagcaggtacatgctgtatccctgcatgcttttggcattcctgacagcctttagcaaattctatgcagtcttttaacatcgaaggccaatacaaaccttgtcgaaataaaagccatttcattttatggcctgcttgatgtgatccacaggccccactgtgaacatgggaaactgccaagtatgcttctgattcacttagacattttagcaacactccttctgcagtctttttaaacaaatcatttcccataaccacgtaatttaaagccctatatttgacctttcgagccacattgcctattggattttccaaatattcaacaatggactttctccaatcattatctaacatattgtcaatggccaaaatttgaattttttcctggagatcatccatgctttcatcttcattattttgtggtgtacttgcccccacaagttttggcattggcaatttagtgcttaatggctctggtaacaccagtttatcttttatttcgatcaactgagttaacttttccttcgacattttgtaccctgaagctatttgggctaaatcatttgcttcttggttttcttgtcgaggtatatgctcaatgttaatgtaatcgaaatgattcagaagagaacttgctataacaaaatattttgctaaatgttcattaacacatttgtattcttgtgttaattgcctcaacactaattctgaatcaccccttatgttaacatttcttgcccccaggctaattaaaatttcaaggcctgtaattagagcctcatactcagcctcattattagaacaaagccctttgattttatatttgaatttagttggaactttattgggggatattattaaaactccaattccagttccatgtttgtgtttcgaaccatcgaaatacaaaatccaaggctctgtatcgacatagtc

SEQ ID NO: 7179 - DNA, 1114 bp, Glycine max
  Gm_smallRNAprecursor_12
tatctaacatattgtcaatggccaaaatttgaattttttcctggagatcatccatgctttcatcttcattattttgtggtgtacttgcccccacaagttttggcattggcaatttagtgcttaatggctctggtaacaccagtttatcttttatttcgatcaactgagttaacttttccttcgacattttgtaccctgaagctatttgggctaaatcatttgcttcttggttttcttgtcgaggtatatgctcaatgttaatgtaatcgaaatgattcagaagagaacttgctataacaaaatattttgctaaatgttcattaacacatttgtattcttgtgttaattgcctcaacactaattctgaatcaccccttatgttaacatttcttgcccccaggctaattaaaatttcaaggcctgtaattagagcctcatactcagcctcattattagaacaaagccctttgattttatatttgaatttagttggaactttattgggggatattattaaaactccaattccagttccatgtttgtgtttcgaaccatcgaaatacaaaatccaaggctctgtatcgacatagtcttgcggcatttcgatcactgagtgatctacaataaaatctgccacaatttgacccttaacagatttcaaaggcttgtacgttaaagaatattctgttaatgctaaagcccattttccaattctactgtgtaaaataggttttgacaacatgtgcttaataatatcataatgagaatatacataaacatcaacaggctttatatattgcttaagttttgcacaagagaaatacaaacaaagacaaagtttttctatggcagtatatctagtttctgcatcatttagtacacgactaagataataaattgcatgctctacgccatcatcatcttcctgagccaacatgctaccaatggtcttgtcagacgcagcaatatacaacttcatagtcttgtttcgactaggaggcattaacacaggaggcttgatcagatattctttaatttcatcgaaagccttttgatgctcttcattccatttgaatggttcatctttcttgagtcgaagtaatggcgaaaaagt

SEQ ID NO: 7180 - DNA, 1085 bp, Glycine max
  Gm_smallRNAprecursor_13
gcctaattttttgattttatgttctatgcatctaatacacaagtaataaaacaaattaaattatttatatcactgttgtaaaaagtaataaacaggtagtgaaaagaaaaagaaaagctgcccctttcactattgaaagcaacaaatgctagctgtctcaacgtggagagaaacttaagttgaaaaattggttcctaaaaggtcactagtactctagatcttttaactaatttatatctttttaaaaaataattaatttaattaattatattaaattttttggttatttatattattattttaaaactattatttttatctctttattcaattaattatttttttattaatatttggagagatatataaaaaataattaatatatttaaaaattagaaaaaaaaattaaatacaatcttataatcaacaataaagtagagagtaatgattcaaagacggtgttgacatcacgaacgtcttagaaagttaggtttctaagacggtgctgacatcacgaccgtcttagaaagtcatgcttcaaagatggtgctgacgtcgacaacgtcttagaaagccaaccttcaaagacggtcgtgatgtcagcaccgtctttgaagcctggttttctaagacgatcgtgatgtcagcaccgtctttgaaagttgagattttctaagacggtatcctttcgaccgtctttgaaagtgagacactttcaacgatattagattcaaagacggtcaaacaccgacgttgtttgtctctttccaccgtcgttgaaaccgctttttctactagataggaatcaactactccaatttgatcatagaatttgtagggaatgaagaggttataattgcatggtccctatagtttacttcaaagcaccaaccatttcataggttagtgcaataaattttgaaagaaacccaattttgaaacagatcatgcaaatagaagctacacaagtatgtgtaactctttattaccgtgtccaatttcaaggcactatgtgtgtgagtgagagtaataacaggtatatataagactttccttcgttacaacatgcatgaaattctaaaaaa

SEQ ID NO: 7181 - DNA, 1069 bp, Glycine max
  Gm_smallRNAprecursor_14
attgtcatcaacttgaaaaaaaaagtagaaaaaggaaggctatgtcttgtgtctcgcactagagaagaaaatacgtgccaatagaatcttcctcttgtattcctaaatctgatgcttatatgttataagcactagttgtcattttctcttcaacttgaaattgtgcaaatgattgcagccactttatatttccacaatgatgttattcttacacgccattttctaaacttttcccctacaactccctttgattgaaaaaaagaagagaaatccactattttctattctcttttttctccaataaaagtgaggtatagaggaaattaaagtataaaaaatgaagtataaaaataacaacattgatgtctataccatccacaaatccagcctgcaacatttcctgaaatctgaagacattataacaagatgtggtgataaaaaaagatgagaagcaaagtgagaaggattcatgttttggtatatgtcaacaggttggctcaaaggggtgacctgagaacacaaagtaaattcaccttataccaatagatgatatagcagtgcaaaccagccttgtgttctcagattcactcctccgagataaaccatatggacttgacttggaggaacatttgaatgagcaaaacagcacattcactttctaggctcaggatatttctttttatatgaacttggttgggtgacataagacctcatgtcctgtcacggattcactatgttgccattcagaaaacaccattagttttctaagtttataggaattttttttagtttaattttgacacaacatgttggtatatagatttttatacaatgagataattaaatgacatcataagtataacttttaaaactacttatagcaaaagtctataatttttaatataataataataatttataattgattgatggtataaaaaaaaatcattacattaaggtatttgaattaaatttttattttgtatgaatatgtttgaggagattcataatggcttgtatcccgacatcgactcactatgttgtcattctatcgacaacatgagagata

SEQ ID NO: 7182 - DNA, 1070 bp, Glycine max
  Gm_smallRNAprecursor_15
attgtcatcaacttgaaaaaaaaagtagaaaaaggaaggctatgtcttgtgtctcgcactagagaagaaaatacgtgccaatagaatcttcctcttgtattcctaaatctgatgcttatatgttataagcactagttgtcattttctcttcaacttgaaattgtgcaaatgattgcagccactttatatttccacaatgatgttattcttacacgccattttctaaacttttcccctacaactccctttgattgaaaaaaagaagagaaatccactattttctattctcttttttctccaataaaagtgaggtatagaggaaattaaagtataaaaaatgaagtataaaaataacaacattgatgtctataccatccacaaatccagcctgcaacatttcctgaaatctgaagacattataacaagatgtggtgataaaaaaagatgagaagcaaagtgagaaggattcatgttttggtatatgtcaacaggttggctcaaaggggtgacctgagaacacaaagtaaattcaccttataccaatagatgatatagcagtgcaaaccagccttgtgttctcagattcactcctccgagataaaccatatggacttgacttggaggaacatttgaatgagcaaaacagcacattcactttctaggctcaggatatttctttttatatgaacttggttgggtgacataagacctcatgtcctgtcacggattcactatgttgccattcagaaaacaccattagttttctaagtttataggaattttttttagtttaattttgacacaacatgttggtatatagatttttatacaatgagataattaaatgacatcataagtataacttttaaaactacttatagcaaaagtctataatttttaatataataataataatttataattgattgatggtataaaaaaaaatcattacattaaggtatttgaattaaatttttattttgtatgaatatgtttgaggagattcataatggcttgtatcccgacatcgactcactatgttgtcattctatcgacaacatgagagatat

SEQ ID NO: 7183 - DNA, 1068 bp, Glycine max
  Gm_smallRNAprecursor_16
ttgtcatcaacttgaaaaaaaaagtagaaaaaggaaggctatgtcttgtgtctcgcactagagaagaaaatacgtgccaatagaatcttcctcttgtattcctaaatctgatgcttatatgttataagcactagttgtcattttctcttcaacttgaaattgtgcaaatgattgcagccactttatatttccacaatgatgttattcttacacgccattttctaaacttttcccctacaactccctttgattgaaaaaaagaagagaaatccactattttctattctcttttttctccaataaaagtgaggtatagaggaaattaaagtataaaaaatgaagtataaaaataacaacattgatgtctataccatccacaaatccagcctgcaacatttcctgaaatctgaagacattataacaagatgtggtgataaaaaaagatgagaagcaaagtgagaaggattcatgttttggtatatgtcaacaggttggctcaaaggggtgacctgagaacacaaagtaaattcaccttataccaatagatgatatagcagtgcaaaccagccttgtgttctcagattcactcctccgagataaaccatatggacttgacttggaggaacatttgaatgagcaaaacagcacattcactttctaggctcaggatatttctttttatatgaacttggttgggtgacataagacctcatgtcctgtcacggattcactatgttgccattcagaaaacaccattagttttctaagtttataggaattttttttagtttaattttgacacaacatgttggtatatagatttttatacaatgagataattaaatgacatcataagtataacttttaaaactacttatagcaaaagtctataatttttaatataataataataatttataattgattgatggtataaaaaaaaatcattacattaaggtatttgaattaaatttttattttgtatgaatatgtttgaggagattcataatggcttgtatcccgacatcgactcactatgttgtcattctatcgacaacatgagagata

SEQ ID NO: 7184 - DNA, 1162 bp, Glycine max
  Gm_smallRNAprecursor_17
ttattaatgattttgttctagaaacaatggccctattcgacacaggggctgactcaaactgtattttagaaggattaattcctataaaattctttgagaaaacctcggagaaacttagtacaacaaacggctcaaaattaaaaattaactttaagttatcaaatgcaattattgaaaaccaaggtcttaggattaacacaaactttcttctggtaaaaaaccttaagaacgaagtaatcctaggaactcccttcataagagctttatttcccatccaaatatctaatgaaggaataactacaagttatttaggaaggaaaattatatttaatttttctactaaaccaatctccagaaatataaattttatagaaaataagattaatcaaattaacttcttaaaagaataagtatcatttaataatatccaaatacaactaggaaaaccccaaataaaggagaaaatccaatctttattaagtcatatagaatcaactgtttgttctgaattgccacatgcattttggggcagaaagaaacatattgttgatcttccttatgagaaagattttagggaaaaacaaattcccacaaaagctagaccaatccaaatgaatgaagaactccttcaatattgccaaaaagaaattaaagatttacttgataaaggtttaattcggaaaagtaaaagtccatggtattgtgcggttttttacgtcaacaaacaatccgagattgagcgaggaacaccccgcttagtcataaattacaaaccgttaaatcaagcattacaatggatcaggtatcctattccaaataaaaaagacctacttaacagattaaattctgcaaaggtattttcaaaatttgacatgaaatccggattctggcaaatccaaatccaagaatcagataggtacaaaacggcgtttactgtacctttcgggcaatatgagtggaatgtaatgccatttggactgaagaatgccccttcagaattccaaaaaatcatgaatgatattttcaatccttattcaaaattcgtcattgtttacattgatgatgttttaatcttctcccaagatattgatcaacatttcaaacacctccagacttttatccatatcattaaacagaatggtttggcagtctccaaatcaaa

SEQ ID NO: 7185 - DNA, 1038 bp, Glycine max
  Gm_smallRNAprecursor_18
tacctttcgggcaatatgagtggaatgtaatgccatttggactgaagaatgccccttcagaattccaaaaaatcatgaatgatattttcaatccttattcaaaattcgtcattgtttacattgatgatgttttaatcttctcccaagatattgatcaacatttcaaacacctccagacttttatccatatcattaaacagaatggtttggcagtctccaaatcaaagatcaatcttttccagacacggatacgattccttgggcacaatatataccaaggcacaatcatcccaatagaaagatcaatagagtttgccagcaaattccctaaccaaatcttagacaagacccagttacaacgatttctggggtgcctaaattatgtaggagaatttgtcccctatctaaacaatattgtcaaaccattacatgataggctgaaaaagaatccgcctccttggtctgacctccatactcaaacagtcaaagaaatcaaagtcaaagtccaatccataaaatgtctgtatattcccattccacaggcattcaaaattgtcgaaactgatgcatcagacatcggttacggtggtatcctcaaacaacaaatacatggtcaggaacatgtcattgcatatacttcaaaacattggaatcctgcacaattaaaatattcaactgttaaaaaggaagttttagcaattgttttgtgcatttccaaatttcaatctgatttattgaatcaaaatttttagtaaaggttgactgcaaatcagccaaagacattttataaaaggatgtaaaaaaccttgcctcaaaacaaatttttgcaggatggcaagaaattttaagcgtctttgattttaacatagaaaatatcaagggctcttcaaactctctacctgactacctcacccgtgaatttttacagaaaattcccgatgcctcctaaggtgtctagctcctctggcagaggaggaaaatccgatactaaaggaaaagatgttatattggctctaccagagccaataaccaagaagg

SEQ ID NO: 7186 - DNA, 1108 bp, Glycine max
  Gm_smallRNAprecursor_19
cgtctttgattttaacatagaaaatatcaagggctcttcaaactctctacctgactacctcacccgtgaatttttacagaaaattcccgatgcctcctaaggtgtctagctcctctggcagaggaggaaaatccgatactaaaggaaaagatgttatattggctctaccagagccaataaccaagaaggcaactacatcatcatcttctgggtcacctactcagattgggtcatcaacccagaaaggaaagcttgaagggtcattgacccatataactaccgttaaacctgagtcatcaactcaggaatccccaaaaccaacaacaacaaaacagaccgtggctgactatgcctggttaatacaaactctcttggccttagaagacattggcctcaccagagtaccaaaattggccaaaaagacctgggcagaaatggcctcagaatcagacgatgattctgaaacagacctgcaaaaacaaatccaaagatccaaatagaccaaaactgtctgtaaccaaaaaccaagccaaccgttgactcaacaagaatcaacaccacaacccagcaatagctatatttcaaaaaaaaaattcttcaatgttttacaaatggaaccagaatactgggacaagaatcctttcaaggcaaccgccaaagtattccccccgggattccattataggccaacagccacaaataaaaccagaaaattctaagaattcattctaatagatacaaactcagtatctattaaacactttaaagaccccaaagatccaaatctaaatacccattccacaatccaaatcctcaaagttatgcagccacgacattatggctcaaacttaaaccaacccaaaaaaatttctgcagcttttgatcttgcaggatataattattgggactacattgacgcctggaccaatgtgttctggcatcaaaatagtaaatttaagaattcatggctaatttacttcaagaataacactgtgtataattttccaaattggttcctccaatggtggaactacttcggaccaattccgcagatatttccagaagaagtccaacagggattccaacaattcagcaagctcttcaatag

SEQ ID NO: 7187 - DNA, 1071 bp, Glycine max
  Gm_smallRNAprecursor_20
caaatagaccaaaactgtctgtaaccaaaaaccaagccaaccgttgactcaacaagaatcaacaccacaacccagcaatagctatatttcaaaaaaaaaattcttcaatgttttacaaatggaaccagaatactgggacaagaatcctttcaaggcaaccgccaaagtattccccccgggattccattataggccaacagccacaaataaaaccagaaaattctaagaattcattctaatagatacaaactcagtatctattaaacactttaaagaccccaaagatccaaatctaaatacccattccacaatccaaatcctcaaagttatgcagccacgacattatggctcaaacttaaaccaacccaaaaaaatttctgcagcttttgatcttgcaggatataattattgggactacattgacgcctggaccaatgtgttctggcatcaaaatagtaaatttaagaattcatggctaatttacttcaagaataacactgtgtataattttccaaattggttcctccaatggtggaactacttcggaccaattccgcagatatttccagaagaagtccaacagggattccaacaattcagcaagctcttcaatagcaaggaatcaagaattctggcagatttaaagtacttttccagttttgccttgtcatggatcttttcatggcaatacagatatggaaaaaccgaaaacagcaaacagtatccaccattgcagagacatgcctttgtaaagtggtggtcacaattcgatacctcaaaggctgctccagaacaagtcaagaactggtttcagagcaaccctgagtttctcaagcctactgatccagagacatctttgtttctgaatcaaaagtcacaacttgcagcattcttagcaagctcaaaatctaaagagagtcttgctcagaatcttaaggaagttctccaactacttcaacaggaagaagaagaagaatcccccaagaaggaagccgaatcatccgagaataatgatgaccaagaagatgatccattctaccagaatgaggatgactcttttggtatatcgtt

SEQ ID NO: 7188 - DNA, 1069 bp, Glycine max
  Gm_smallRNAprecursor_21
atttcaaaaaaaaaattcttcaatgttttacaaatggaaccagaatactgggacaagaatcctttcaaggcaaccgccaaagtattccccccgggattccattataggccaacagccacaaataaaaccagaaaattctaagaattcattctaatagatacaaactcagtatctattaaacactttaaagaccccaaagatccaaatctaaatacccattccacaatccaaatcctcaaagttatgcagccacgacattatggctcaaacttaaaccaacccaaaaaaatttctgcagcttttgatcttgcaggatataattattgggactacattgacgcctggaccaatgtgttctggcatcaaaatagtaaatttaagaattcatggctaatttacttcaagaataacactgtgtataattttccaaattggttcctccaatggtggaactacttcggaccaattccgcagatatttccagaagaagtccaacagggattccaacaattcagcaagctcttcaatagcaaggaatcaagaattctggcagatttaaagtacttttccagttttgccttgtcatggatcttttcatggcaatacagatatggaaaaaccgaaaacagcaaacagtatccaccattgcagagacatgcctttgtaaagtggtggtcacaattcgatacctcaaaggctgctccagaacaagtcaagaactggtttcagagcaaccctgagtttctcaagcctactgatccagagacatctttgtttctgaatcaaaagtcacaacttgcagcattcttagcaagctcaaaatctaaagagagtcttgctcagaatcttaaggaagttctccaactacttcaacaggaagaagaagaagaatcccccaagaaggaagccgaatcatccgagaataatgatgaccaagaagatgatccattctaccagaatgaggatgactcttttggtatatcgttagacgatgattagttagttgtaataatcatgaattattaactaatttttcggttcccgctaataatgtaatttgtaaaagctt

SEQ ID NO: 7189 - DNA, 1033 bp, Glycine max
  Gm_smallRNAprecursor_22
ttcaaggcaaccgccaaagtattccccccgggattccattataggccaacagccacaaataaaaccagaaaattctaagaattcattctaatagatacaaactcagtatctattaaacactttaaagaccccaaagatccaaatctaaatacccattccacaatccaaatcctcaaagttatgcagccacgacattatggctcaaacttaaaccaacccaaaaaaatttctgcagcttttgatcttgcaggatataattattgggactacattgacgcctggaccaatgtgttctggcatcaaaatagtaaatttaagaattcatggctaatttacttcaagaataacactgtgtataattttccaaattggttcctccaatggtggaactacttcggaccaattccgcagatatttccagaagaagtccaacagggattccaacaattcagcaagctcttcaatagcaaggaatcaagaattctggcagatttaaagtacttttccagttttgccttgtcatggatcttttcatggcaatacagatatggaaaaaccgaaaacagcaaacagtatccaccattgcagagacatgcctttgtaaagtggtggtcacaattcgatacctcaaaggctgctccagaacaagtcaagaactggtttcagagcaaccctgagtttctcaagcctactgatccagagacatctttgtttctgaatcaaaagtcacaacttgcagcattcttagcaagctcaaaatctaaagagagtcttgctcagaatcttaaggaagttctccaactacttcaacaggaagaagaagaagaatcccccaagaaggaagccgaatcatccgagaataatgatgaccaagaagatgatccattctaccagaatgaggatgactcttttggtatatcgttagacgatgattagttagttgtaataatcatgaattattaactaatttttcggttcccgctaataatgtaatttgtaaaagcttttgtaacagttctgataaacattaccg

SEQ ID NO: 7190 - DNA, 1137 bp, Glycine max
  Gm_smallRNAprecursor_23
caaggcaaccgccaaagtattccccccgggattccattataggccaacagccacaaataaaaccagaaaattctaagaattcattctaatagatacaaactcagtatctattaaacactttaaagaccccaaagatccaaatctaaatacccattccacaatccaaatcctcaaagttatgcagccacgacattatggctcaaacttaaaccaacccaaaaaaatttctgcagcttttgatcttgcaggatataattattgggactacattgacgcctggaccaatgtgttctggcatcaaaatagtaaatttaagaattcatggctaatttacttcaagaataacactgtgtataattttccaaattggttcctccaatggtggaactacttcggaccaattccgcagatatttccagaagaagtccaacagggattccaacaattcagcaagctcttcaatagcaaggaatcaagaattctggcagatttaaagtacttttccagttttgccttgtcatggatcttttcatggcaatacagatatggaaaaaccgaaaacagcaaacagtatccaccattgcagagacatgcctttgtaaagtggtggtcacaattcgatacctcaaaggctgctccagaacaagtcaagaactggtttcagagcaaccctgagtttctcaagcctactgatccagagacatctttgtttctgaatcaaaagtcacaacttgcagcattcttagcaagctcaaaatctaaagagagtcttgctcagaatcttaaggaagttctccaactacttcaacaggaagaagaagaagaatcccccaagaaggaagccgaatcatccgagaataatgatgaccaagaagatgatccattctaccagaatgaggatgactcttttggtatatcgttagacgatgattagttagttgtaataatcatgaattattaactaatttttcggttcccgctaataatgtaatttgtaaaagcttttgtaacagttctgataaacattaccgacactattgaaacagtaaaatattgggtctatttaaaagagtccttgttccctttgtgagacaccctttcagatagtctcaaaaccaggttttagagatagaagct

SEQ ID NO: 7191 - DNA, 1136 bp, Glycine max
  Gm_smallRNAprecursor_24
aaggcaaccgccaaagtattccccccgggattccattataggccaacagccacaaataaaaccagaaaattctaagaattcattctaatagatacaaactcagtatctattaaacactttaaagaccccaaagatccaaatctaaatacccattccacaatccaaatcctcaaagttatgcagccacgacattatggctcaaacttaaaccaacccaaaaaaatttctgcagcttttgatcttgcaggatataattattgggactacattgacgcctggaccaatgtgttctggcatcaaaatagtaaatttaagaattcatggctaatttacttcaagaataacactgtgtataattttccaaattggttcctccaatggtggaactacttcggaccaattccgcagatatttccagaagaagtccaacagggattccaacaattcagcaagctcttcaatagcaaggaatcaagaattctggcagatttaaagtacttttccagttttgccttgtcatggatcttttcatggcaatacagatatggaaaaaccgaaaacagcaaacagtatccaccattgcagagacatgcctttgtaaagtggtggtcacaattcgatacctcaaaggctgctccagaacaagtcaagaactggtttcagagcaaccctgagtttctcaagcctactgatccagagacatctttgtttctgaatcaaaagtcacaacttgcagcattcttagcaagctcaaaatctaaagagagtcttgctcagaatcttaaggaagttctccaactacttcaacaggaagaagaagaagaatcccccaagaaggaagccgaatcatccgagaataatgatgaccaagaagatgatccattctaccagaatgaggatgactcttttggtatatcgttagacgatgattagttagttgtaataatcatgaattattaactaatttttcggttcccgctaataatgtaatttgtaaaagcttttgtaacagttctgataaacattaccgacactattgaaacagtaaaatattgggtctatttaaaagagtccttgttccctttgtgagacaccctttcagatagtctcaaaaccaggttttagagatagaagct

SEQ ID NO: 7192 - DNA, 1157 bp, Glycine max
  Gm_smallRNAprecursor_25
gatccaaatctaaatacccattccacaatccaaatcctcaaagttatgcagccacgacattatggctcaaacttaaaccaacccaaaaaaatttctgcagcttttgatcttgcaggatataattattgggactacattgacgcctggaccaatgtgttctggcatcaaaatagtaaatttaagaattcatggctaatttacttcaagaataacactgtgtataattttccaaattggttcctccaatggtggaactacttcggaccaattccgcagatatttccagaagaagtccaacagggattccaacaattcagcaagctcttcaatagcaaggaatcaagaattctggcagatttaaagtacttttccagttttgccttgtcatggatcttttcatggcaatacagatatggaaaaaccgaaaacagcaaacagtatccaccattgcagagacatgcctttgtaaagtggtggtcacaattcgatacctcaaaggctgctccagaacaagtcaagaactggtttcagagcaaccctgagtttctcaagcctactgatccagagacatctttgtttctgaatcaaaagtcacaacttgcagcattcttagcaagctcaaaatctaaagagagtcttgctcagaatcttaaggaagttctccaactacttcaacaggaagaagaagaagaatcccccaagaaggaagccgaatcatccgagaataatgatgaccaagaagatgatccattctaccagaatgaggatgactcttttggtatatcgttagacgatgattagttagttgtaataatcatgaattattaactaatttttcggttcccgctaataatgtaatttgtaaaagcttttgtaacagttctgataaacattaccgacactattgaaacagtaaaatattgggtctatttaaaagagtccttgttccctttgtgagacaccctttcagatagtctcaaaaccaggttttagagatagaagctctgcctagggaaaacctctttgtaagcttttatttcgatttcaataaattcaaagttccattttgcacatctcccttctcccttcactgatcctgtgcagctctgtcgccgcttcgatttctttgttttcaaaaacctgggtttgtaagccgg

SEQ ID NO: 7193 - DNA, 1189 bp, Glycine max
  Gm_smallRNAprecursor_26
atggaggccggaaacacatacctttcacatgagatgcggagaatgtactattactctccaagacgtctctgtattgttaggtataagtgtggatggtttaccattaatcggtccaacaaatcttgattgggctgatttatgtgaggaattattgggagtcagaccacaagaagatgaaattagaggtagtgtggttaaattaagttggctgactcaccattttgcccaaataaataatgacgacgacgaagaacaagtacgaaagtttgcccgtgcatggatactgagattcattggaggtgtcttgttcgttgacaaaagcagtaacaaagtttcgctaaggtaccttcaatttttacgtgactttgaagaatgtggcagatatgcatggggagctgccgtacttggttttctatacagagagatgtgcaatgccaccgattataaaactaaatcaatcagaggtatgtgtatcttactacaaatgtgggcatgggaacgatgtccaaccttggctccaaagaggactccttcccaagtagaaaatacaccattggggcacaggttagtcatttttaacagcgtctttcatttcaatagaataaatggttttagcatatattaaattttaatctttgtaggtggctgcgacgtggaaaccaacatatcggcaatgatgatgtgagaatttttcgtcgcaagttggatattatgaaacgtcatgaggtaagaacatgctattgtatttgtaaaataaaaaattatatgtgttatttttctaaaatgttcacaactgatgaggacatgttcaagagcaagggcaaggatccacttgaaggacttggaggacctatgacaagggctagagcaaggaaagccaaggaagctcttcaacaagtgctgtccatactatttgaatacaagcccaagtttcaaggagaaaagtccaaggttgtgagttgtatcatggcccaaatggaggaggactaaatgacaccactttgtctcaattttagagtgtttagtttgtctaaataatggcccaatccttgtaaagttggctgaccaaaaatatgtttttggttaatcaactaaaagggctttagttaggtttagttcaagttgtaataagggcccaattggcaacctaggcatcagccttttgggagaccaaatggtggctgacttg

SEQ ID NO: 7194 - DNA, 1239 bp, Glycine max
  Gm_smallRNAprecursor_27
aagggttttcttttctttttcattttcttttgaaaaagaaaatgccacatgtcctattttaattggagccaaaaagggcccaccttttcctttgatttgaccacatactcagccataaaagaagaaaaaaaaactggacctttttggatgctaaaatcctgcctcagtttgcatgccgcctctctggttccagttcctcgcatttctctgcacccgtcagggcccgttttcgaagataggcaatatatctgggtttgtaagccgtttcggtgtgcccttgatatctgctttacaagtttatattttcctttcttttatcatactgcattcttacttcctatctgtccgtttgatcttattccgctgatctctggtatcagagcctgatggggaagtaggaatactatccgtaaggacatatgttaacaaattttatgatcagaaacaaaagccttgtatagtacaagtaatattttactttgatttgtacagtaaatgtttgaacagtacttcctggaagtatagcagtataatattttagttgaatggtactgtagcagtaagacccgtgatggataaagggcggtaaggctaaggtgtactgtttaaccaaaatatcaagacataatatactggtggctataggattgccgttcaaactattttttttaaaaaaaagagtttttcttaaaaataattcagatccagaaaaattttgtgacatatttacttacggagatatttctatggaaccaaatgagggcaaagatattagagaatgttataatcatgtctagactattgcaatctttttcccgtatctcttttcgatcaaattcctcctcatcatcttcttcaagaaactccaatttattaaacgatcaagataaccagacccaagaggtcgcccctaaacacaatctcttcgatgaggaagtccgattcgaagatattaaccaaaacatggatgactggaacatcctagaaatccctcaggatcaactatacgttcctgagacaattaaagataaacacaactttgactacataatcaaaatagtagaaaacaatattcctctagggcaagatataggggaagaattccatctactttcaaaaaattcaattcatgaacatagtcgaaagtataaatatttacacatcggttgtgtagaagtagccatcaagcccttaatagacataggcatcgatgcaacagtattgatgtgtctaagagat

SEQ ID NO: 7195 - DNA, 1108 bp, Glycine max
  Gm_smallRNAprecursor_28
aagcgtctttgattttaatatagaatatatcaagggctcttccaactttctacctgactacctcacccgtgaatttttacagaaaattcccaatgcctcctaaggtgtctagttcctccggcagaggagggagatccagtacaaaaggaaaagaggttctattggctctaccagagccaataacaaaaaaggcaactacatcatcttctgggtcacctacctagactaggtcatcaacccagaaaggaaagcttgaagggtcattgacccagataactaccgtcaaacctgagtcatcaactcaggaatccccaaaaccaacaacaaccaaacagaccgtggctgactgtgcctggtcaatacaaactttctcggccttagaagatataggcctcaccaaagtaccaaaattggccaaaaagacctgggcagaaatggcctcagaatcaaacgatgattctgaaacagatctgcaaaaacaaatccaaaaggccaaacagaccaaaactgtctgtaaccaaaaaccaagccaatcgttgactcaacaagaatcaacaccacaacccaacaacagttatatttcaaaaaacaaatttttcaatgttttacaaatggaaccagaatactgggacaagaatcctttcaaagcaaccgccaaagtattccccccgggattccattacaggccaacagccacaaacaaaacccgcaaattctacgaattcattctaatagatacaaactcagtatctattaaacacttcaaagaccccaaagatccaaatctaaatacccattccacaatccaaatcctaaaggttatgcagccacgacattatggttcaaacttaaaccaacccaaaaaattttctgcaccatttgaccctgcaggatataattattgggattacattgacgcctggaccaatgtgttctggcatcaaaatagtaaattcaagcattcatggctaatttacttcaaaaataacactgtgtataattttccaaattggttcctccaatggtggaactacttcggaccaattccacagatattcccagaagaagtccaacagggattccaacaattcaacaagctctacaatag

SEQ ID NO: 7196 - DNA, 1092 bp, Glycine max
  Gm_smallRNAprecursor_29
tgcctcctaaggtgtctagttcctccggcagaggagggagatccagtacaaaaggaaaagaggttctattggctctaccagagccaataacaaaaaaggcaactacatcatcttctgggtcacctacctagactaggtcatcaacccagaaaggaaagcttgaagggtcattgacccagataactaccgtcaaacctgagtcatcaactcaggaatccccaaaaccaacaacaaccaaacagaccgtggctgactgtgcctggtcaatacaaactttctcggccttagaagatataggcctcaccaaagtaccaaaattggccaaaaagacctgggcagaaatggcctcagaatcaaacgatgattctgaaacagatctgcaaaaacaaatccaaaaggccaaacagaccaaaactgtctgtaaccaaaaaccaagccaatcgttgactcaacaagaatcaacaccacaacccaacaacagttatatttcaaaaaacaaatttttcaatgttttacaaatggaaccagaatactgggacaagaatcctttcaaagcaaccgccaaagtattccccccgggattccattacaggccaacagccacaaacaaaacccgcaaattctacgaattcattctaatagatacaaactcagtatctattaaacacttcaaagaccccaaagatccaaatctaaatacccattccacaatccaaatcctaaaggttatgcagccacgacattatggttcaaacttaaaccaacccaaaaaattttctgcaccatttgaccctgcaggatataattattgggattacattgacgcctggaccaatgtgttctggcatcaaaatagtaaattcaagcattcatggctaatttacttcaaaaataacactgtgtataattttccaaattggttcctccaatggtggaactacttcggaccaattccacagatattcccagaagaagtccaacagggattccaacaattcaacaagctctacaatagcaaggaatcacgaattccggcagatttaaagtacttttccagtttttctttgtcatggattttttcatggcaataca

SEQ ID NO: 7197 - DNA, 1122 bp, Glycine max
  Gm_smallRNAprecursor_30
agatataggcctcaccaaagtaccaaaattggccaaaaagacctgggcagaaatggcctcagaatcaaacgatgattctgaaacagatctgcaaaaacaaatccaaaaggccaaacagaccaaaactgtctgtaaccaaaaaccaagccaatcgttgactcaacaagaatcaacaccacaacccaacaacagttatatttcaaaaaacaaatttttcaatgttttacaaatggaaccagaatactgggacaagaatcctttcaaagcaaccgccaaagtattccccccgggattccattacaggccaacagccacaaacaaaacccgcaaattctacgaattcattctaatagatacaaactcagtatctattaaacacttcaaagaccccaaagatccaaatctaaatacccattccacaatccaaatcctaaaggttatgcagccacgacattatggttcaaacttaaaccaacccaaaaaattttctgcaccatttgaccctgcaggatataattattgggattacattgacgcctggaccaatgtgttctggcatcaaaatagtaaattcaagcattcatggctaatttacttcaaaaataacactgtgtataattttccaaattggttcctccaatggtggaactacttcggaccaattccacagatattcccagaagaagtccaacagggattccaacaattcaacaagctctacaatagcaaggaatcacgaattccggcagatttaaagtacttttccagtttttctttgtcatggattttttcatggcaatacagatacgaaaaaaccgaaaacagcaaacagtatccaccattgcagagacacgcctttgtaaaatggtggtcacaattcgatacctcaaaggctgctccagaacaagtcaagaactggttccagagcaatcctgagttcctcaaacctgctgatccggagacatctttgtttctgaatcaaaagtcgcaacttgcagcattcttagcaagctcaaaatctaaagagagtcttgcttagaatcttaaagaagttctccaactacttcaacaggaagtggaagaagaacctcccaagaaggaagtcgaatcatctgagactaa

SEQ ID NO: 7198 - DNA, 1071 bp, Glycine max
  Gm_smallRNAprecursor_31
caaacagaccaaaactgtctgtaaccaaaaaccaagccaatcgttgactcaacaagaatcaacaccacaacccaacaacagttatatttcaaaaaacaaatttttcaatgttttacaaatggaaccagaatactgggacaagaatcctttcaaagcaaccgccaaagtattccccccgggattccattacaggccaacagccacaaacaaaacccgcaaattctacgaattcattctaatagatacaaactcagtatctattaaacacttcaaagaccccaaagatccaaatctaaatacccattccacaatccaaatcctaaaggttatgcagccacgacattatggttcaaacttaaaccaacccaaaaaattttctgcaccatttgaccctgcaggatataattattgggattacattgacgcctggaccaatgtgttctggcatcaaaatagtaaattcaagcattcatggctaatttacttcaaaaataacactgtgtataattttccaaattggttcctccaatggtggaactacttcggaccaattccacagatattcccagaagaagtccaacagggattccaacaattcaacaagctctacaatagcaaggaatcacgaattccggcagatttaaagtacttttccagtttttctttgtcatggattttttcatggcaatacagatacgaaaaaaccgaaaacagcaaacagtatccaccattgcagagacacgcctttgtaaaatggtggtcacaattcgatacctcaaaggctgctccagaacaagtcaagaactggttccagagcaatcctgagttcctcaaacctgctgatccggagacatctttgtttctgaatcaaaagtcgcaacttgcagcattcttagcaagctcaaaatctaaagagagtcttgcttagaatcttaaagaagttctccaactacttcaacaggaagtggaagaagaacctcccaagaaggaagtcgaatcatctgagactaatgatgactaagaagatgatccattctaccagaatgaggatgactgttttggtatatcgtt

SEQ ID NO: 7199 - DNA, 1165 bp, Glycine max
  Gm_smallRNAprecursor_32
ctaatagatacaaactcagtatctattaaacacttcaaagaccccaaagatccaaatctaaatacccattccacaatccaaatcctaaaggttatgcagccacgacattatggttcaaacttaaaccaacccaaaaaattttctgcaccatttgaccctgcaggatataattattgggattacattgacgcctggaccaatgtgttctggcatcaaaatagtaaattcaagcattcatggctaatttacttcaaaaataacactgtgtataattttccaaattggttcctccaatggtggaactacttcggaccaattccacagatattcccagaagaagtccaacagggattccaacaattcaacaagctctacaatagcaaggaatcacgaattccggcagatttaaagtacttttccagtttttctttgtcatggattttttcatggcaatacagatacgaaaaaaccgaaaacagcaaacagtatccaccattgcagagacacgcctttgtaaaatggtggtcacaattcgatacctcaaaggctgctccagaacaagtcaagaactggttccagagcaatcctgagttcctcaaacctgctgatccggagacatctttgtttctgaatcaaaagtcgcaacttgcagcattcttagcaagctcaaaatctaaagagagtcttgcttagaatcttaaagaagttctccaactacttcaacaggaagtggaagaagaacctcccaagaaggaagtcgaatcatctgagactaatgatgactaagaagatgatccattctaccagaatgaggatgactgttttggtatatcgttagacgacgattaattagttgtagtaatcatgaattattgtaactaatttgtcggtacctcttaataatgtaatttgtaaaagttttgtaacagttccggtaaatattatcgacactgtagaaacagtgaaaattgagtctatttaaaggagtcctcgttccctttgtgaggcaccctttcagatagtctcaaaaccaggatttagagagagaagctctgcctagggaaaaactctttgtaagcttttctttcggtttcaataaatttcaagttctatttttcatatctcccttctccactcaccgatcctgtgcggctctgccgccgct

SEQ ID NO: 7200 - DNA, 1157 bp, Glycine max
  Gm_smallRNAprecursor_33
gatccaaatctaaatacccattccacaatccaaatcctaaaggttatgcagccacgacattatggttcaaacttaaaccaacccaaaaaattttctgcaccatttgaccctgcaggatataattattgggattacattgacgcctggaccaatgtgttctggcatcaaaatagtaaattcaagcattcatggctaatttacttcaaaaataacactgtgtataattttccaaattggttcctccaatggtggaactacttcggaccaattccacagatattcccagaagaagtccaacagggattccaacaattcaacaagctctacaatagcaaggaatcacgaattccggcagatttaaagtacttttccagtttttctttgtcatggattttttcatggcaatacagatacgaaaaaaccgaaaacagcaaacagtatccaccattgcagagacacgcctttgtaaaatggtggtcacaattcgatacctcaaaggctgctccagaacaagtcaagaactggttccagagcaatcctgagttcctcaaacctgctgatccggagacatctttgtttctgaatcaaaagtcgcaacttgcagcattcttagcaagctcaaaatctaaagagagtcttgcttagaatcttaaagaagttctccaactacttcaacaggaagtggaagaagaacctcccaagaaggaagtcgaatcatctgagactaatgatgactaagaagatgatccattctaccagaatgaggatgactgttttggtatatcgttagacgacgattaattagttgtagtaatcatgaattattgtaactaatttgtcggtacctcttaataatgtaatttgtaaaagttttgtaacagttccggtaaatattatcgacactgtagaaacagtgaaaattgagtctatttaaaggagtcctcgttccctttgtgaggcaccctttcagatagtctcaaaaccaggatttagagagagaagctctgcctagggaaaaactctttgtaagcttttctttcggtttcaataaatttcaagttctatttttcatatctcccttctccactcaccgatcctgtgcggctctgccgccgctttggtttctttgttttcaaaaacctgggtttgtcagccat

SEQ ID NO: 7201 - DNA, 1098 bp, Glycine max
  Gm_smallRNAprecursor_34
attccacaatccaaatcctaaaggttatgcagccacgacattatggttcaaacttaaaccaacccaaaaaattttctgcaccatttgaccctgcaggatataattattgggattacattgacgcctggaccaatgtgttctggcatcaaaatagtaaattcaagcattcatggctaatttacttcaaaaataacactgtgtataattttccaaattggttcctccaatggtggaactacttcggaccaattccacagatattcccagaagaagtccaacagggattccaacaattcaacaagctctacaatagcaaggaatcacgaattccggcagatttaaagtacttttccagtttttctttgtcatggattttttcatggcaatacagatacgaaaaaaccgaaaacagcaaacagtatccaccattgcagagacacgcctttgtaaaatggtggtcacaattcgatacctcaaaggctgctccagaacaagtcaagaactggttccagagcaatcctgagttcctcaaacctgctgatccggagacatctttgtttctgaatcaaaagtcgcaacttgcagcattcttagcaagctcaaaatctaaagagagtcttgcttagaatcttaaagaagttctccaactacttcaacaggaagtggaagaagaacctcccaagaaggaagtcgaatcatctgagactaatgatgactaagaagatgatccattctaccagaatgaggatgactgttttggtatatcgttagacgacgattaattagttgtagtaatcatgaattattgtaactaatttgtcggtacctcttaataatgtaatttgtaaaagttttgtaacagttccggtaaatattatcgacactgtagaaacagtgaaaattgagtctatttaaaggagtcctcgttccctttgtgaggcaccctttcagatagtctcaaaaccaggatttagagagagaagctctgcctagggaaaaactctttgtaagcttttctttcggtttcaataaatttcaagttctatttttcatatctcccttctccactcaccgatcctgtgcggctctgccgccgct

SEQ ID NO: 7202 - DNA, 1189 bp, Glycine max
  Gm_smallRNAprecursor_35
atggagaccgaaaacacatacgtttcacatgagatgcggagagtgtactattactctccaagacgtctgtgtattgttaggtataagtgtggatagtttaccattaatcgatccaacaaatcttgattaggctgatttatgtgaggaatttttgggagtcagtccacaagaaggtgaaattaaaggtagtgtggttaaattaagttggctggctcaccattttgcacaaataaataacgacgacgacgaagaataagtacgaaggtttgcccgtgcatggatactgagattcattggagatgtcttgttcgttgacaaaagcagtaaaaaagtttcgctaaggtaccttcaatttttacgtgactttgaagaatatgacacatatgcatggagagctgccgtacttggttttctatacagagagatgtgcagtgccaccgattataaaactaaatcaattggaggtatgtgcaacttactacaaatgtgggcatgggaacgatgtccaaccttggctccaaagaggactcctccccaagtagaaaataaaccactggggcacaggttagtcatttttaaaagcgtgtttcatttcaatagaataaatggttttagggtatattaaattttaatctttgtaggtggctgcaacgtggaaaccaacatatcggcaatgatgatgtgagagtttttcgtcgcaagttggatattatgaaacgtcatgaggtaagaacatggtattgtatttgtaaaataaaaaatgatatgtcttattttactaaaatgttcacaactatgttgttatatgcagtttgtgtgggagccttacacagcaaccgttatatcattgttgcctcccgtttgtttagtcgaaagtctcgcatggtacgtggtggtgccactaatttgttttcaagttattgagtggcaccaaccggacagagtattgagacaatttgggatgcaggaaccaattccagagtctccttcacaacccttaaacattcatggcataacattaaaagggaaacatgacgaaaattgggggcaattgttcgccccaatgattcatcaatggaataatcgccatgcatttagggttgacgcttatccctgacaagaaggcctattgagctttaactcggactacatggtctggtataggcgaaagacaaagatgtttgttgac

SEQ ID NO: 7203 - DNA, 1084 bp, Glycine max
  Gm_smallRNAprecursor_36
caagttacaggtttcatataagtccaccaaagatcttactcttcttagagtagactctggtgatgatagttcttgatcttgttgttgtggtggaggtgaaggtggttcacctgggtcttcttcctcaacttcttcttgaggtagttgagcgggtataagaacgttcttctccactttttcttcatcccaattccaagaagtgtactcatcaacttcaacatctcgactgatgacgagtttcttagtttgcaagttatagatacggtagcccttagagatattgctatacccaaggaagatacctcgtatattcttgtcttcaagcttgtgcctcttcacatctggaatatgaatgtagcatatagatccaaagacccttaggtgctttgctgatggcttcttcctgttccaagcttcaattggagtcttgtcttttatagacttagttggacatctattgagtatgtaaacagcattgtagactgctttagcccaaaatgtgttaggtagtcccttctccttgagcatcgatctagccatttccataactgtgcgattctttctctcggacactccattttgttgaggagaatatgcgactgtaagttgtcgctcaatgccttcatcctcacaaaatctttcaaactcgcgagaggtgtactctttgccgcgatcacttcttagtacttttatccgttttccactttgattttcagcaagggccttgaactttttgaatactccaaagacttcttatttttttttttagaaaatatacccatgtcattctagagaagtcatcaatgaagagtatgaagtacctgttgttctcatgtgatggcgtcatcattggtccacaaacgtccgtatgtatcagctccaatagatctttcgctctccatgctccgcttgttgagaaaggaaatcgatgttgtttaccaaggagacatccttcacacacttcattgttctcatttatgcttggaagatctatcatcatgttcttctcgtgtaacaacttcaaggcatgtgtgttgaagtggccaaatcttcgatgccatagccatgaatcatcaacttgtac

SEQ ID NO: 7204 - DNA, 1079 bp, Glycine max
  Gm_smallRNAprecursor_37
taaggaaaatcctagatccttctcttcttttggaagtttctccataatttttctttcctccattttctttgttttggggctgaaatttaaactttgactggaagacattttcaagtgtatcttctttatgcctatacagtctttgcttatatgcttcaagagagcccacaagttctgtctctgatagagtggataaatctttggtttcctcaatcattgtcacgattaggtcaaacttttggggcattgtaattagaattttctcaacaattttcttgtcaagaatatcttccccaaaagctctgatttgattaactatttctttaactttagaatagtaatctttaactgtctcagactccttcatcttcaatagttcaaaatctctttttagagattgaagtttaacgacacgtaccttaacacttccttgaaactcctcctgcaatgtgttccacgcttctttggaagtcttagctcccataatttttgggaaaattggatcagtcaccgcttgttgcaaggtgaacaacacctttgaatttttctgtttatttttcttcaactctttttcatgagatgcattaagagctgaagtatccgcgggaacggtgaagccttcttctactatgtcccataaatcttgagatgaaaaatatgtttccattttaacacgccaaaaatcataattttcaccattgaagatagggacagaaatagttaacaattgagtagtgttatccaaagcttagaaaaaatattattggagtgggttaatagtacaaaggaaatttttgaagtagttgggaggattttggaatggtaggtaggtaatataactacgtccaatgtatgactgaacgtagctctgatatcactgttggtagttgattagatgatagttgataattttagaaaattactttagaaagaaggctatgtcattgatttcttggatgatcaattacaacataccaattgtttatttataggctaagtcactaacctctcaatgatggtgaatgtttctacattactttaggtctttctagagttttcatgatagattagtatcatga

SEQ ID NO: 7205 - DNA, 1044 bp, Glycine max
  Gm_smallRNAprecursor_38
ttaattcccaaaaggttactgccattaaattttttttaactccgttagttaaagaattttaatggcaaaaatcttttttagaataaaaatataaattttagggactaaaaaatttatttattaactataccgactaaaaatgataaatttgaaaattataagaatcaaatgggtaattaaacctattgaataaaatttcggtggactatgaataagctattagcgctgaaaagatactaccaacatactataggttaaacaaagaatttgggggaactttagtgttttggaaatagataaaatggagggtgttgctaggtgcacccaacatcattgctagtgcacccagcacttaaggggaaaagactaaaatacccttgatccgtaagtcttttaagttgatccgtaagccttttacggatcaactttattcgtatgcgcttaatatcaacatacggatcaacttgatccgtaaaaggcttacggatcaacttgatccgtagaagccttacgaatcaacttgatccgtagaagccttacgaatcaacttgatccgtaagccttttacgaatcaacttgatccgtaagccttttacgaatcaacttgatccgtatcaaccttacagatcaagttgatctgtatgatttacggaccaccctcacgcacacccatcacaaatgagaagaaagcgcaggggcagttttgacatttttaaaaaatgctgggtgcacctagcaacaccctaaaattgatttgattccaaattccaatgttttcttcaagtcgcatcatttaaggattactgtttctttatgtattgcaggttttctttatttggaataagttgtttaagctacttagtgtgtataaagtataaaccgtatttggtttatcttattttaaagtgaaattatttttgcaactcatggatgcttttgaaaaaaaaaattcggctatatctagttgttgagtaacttataaacttgttcaactaatttataagttcctttaattaaaataagtttgtttgagtacgagatttc

SEQ ID NO: 7206 - DNA, 1072 bp, Glycine max
  Gm_smallRNAprecursor_39
ttaattcccaaaaggttactgccattaaattttttttaactccgttagttaaagaattttaatggcaaaaatcttttttagaataaaaatataaattttagggactaaaaaatttatttattaactataccgactaaaaatgataaatttgaaaattataagaatcaaatgggtaattaaacctattgaataaaatttcggtggactatgaataagctattagcgctgaaaagatactaccaacatactataggttaaacaaagaatttgggggaactttagtgttttggaaatagataaaatggagggtgttgctaggtgcacccaacatcattgctagtgcacccagcacttaaggggaaaagactaaaatacccttgatccgtaagtcttttaagttgatccgtaagccttttacggatcaactttattcgtatgcgcttaatatcaacatacggatcaacttgatccgtaaaaggcttacggatcaacttgatccgtagaagccttacgaatcaacttgatccgtagaagccttacgaatcaacttgatccgtaagccttttacgaatcaacttgatccgtaagccttttacgaatcaacttgatccgtatcaaccttacagatcaagttgatctgtatgatttacggaccaccctcacgcacacccatcacaaatgagaagaaagcgcaggggcagttttgacatttttaaaaaatgctgggtgcacctagcaacaccctaaaattgatttgattccaaattccaatgttttcttcaagtcgcatcatttaaggattactgtttctttatgtattgcaggttttctttatttggaataagttgtttaagctacttagtgtgtataaagtataaaccgtatttggtttatcttattttaaagtgaaattatttttgcaactcatggatgcttttgaaaaaaaaaattcggctatatctagttgttgagtaacttataaacttgttcaactaatttataagttcctttaattaaaataagtttgtttgagtacgagatttctttagtagtttattttttataagctaat

SEQ ID NO: 7207 - DNA, 1044 bp, Glycine max
  Gm_smallRNAprecursor_40
attttttttaactccgttagttaaagaattttaatggcaaaaatcttttttagaataaaaatataaattttagggactaaaaaatttatttattaactataccgactaaaaatgataaatttgaaaattataagaatcaaatgggtaattaaacctattgaataaaatttcggtggactatgaataagctattagcgctgaaaagatactaccaacatactataggttaaacaaagaatttgggggaactttagtgttttggaaatagataaaatggagggtgttgctaggtgcacccaacatcattgctagtgcacccagcacttaaggggaaaagactaaaatacccttgatccgtaagtcttttaagttgatccgtaagccttttacggatcaactttattcgtatgcgcttaatatcaacatacggatcaacttgatccgtaaaaggcttacggatcaacttgatccgtagaagccttacgaatcaacttgatccgtagaagccttacgaatcaacttgatccgtaagccttttacgaatcaacttgatccgtaagccttttacgaatcaacttgatccgtatcaaccttacagatcaagttgatctgtatgatttacggaccaccctcacgcacacccatcacaaatgagaagaaagcgcaggggcagttttgacatttttaaaaaatgctgggtgcacctagcaacaccctaaaattgatttgattccaaattccaatgttttcttcaagtcgcatcatttaaggattactgtttctttatgtattgcaggttttctttatttggaataagttgtttaagctacttagtgtgtataaagtataaaccgtatttggtttatcttattttaaagtgaaattatttttgcaactcatggatgcttttgaaaaaaaaaattcggctatatctagttgttgagtaacttataaacttgttcaactaatttataagttcctttaattaaaataagtttgtttgagtacgagatttctttagtagtttattttttataagctaat

SEQ ID NO: 7208 - DNA, 1051 bp, Glycine max
  Gm_smallRNAprecursor_41
ccgcctctggatgacaaaaggcgcagaagacgacgttagtctctgcgtgctatcatgctttgagtcttacagatagcaaaagtatttttaaaagtgcgggaccaaatggtccctgcatgtcatcaggcccgccgcctttggatgacaaaaggcacagaagacgactttagtctctgcgtgctatcatgctttgagtcttacagatagcaaaaaggtgtgggaccaactggttcccgcatgtcatcgggcccgccgcctctggatgacaaaaggcgcagacgacgatgttagtctctgcgtgctatcatgctttgagtcttatagatagcaaaagtattttaaaagcgcgggaccaaatggttcccgcatgtcatcgggtccgccgcctctggatgacaaatggtgcagacgacgatgttagtctctacgtgctatcatgctttgagtcttatagatagcaaaagtattttaaaagacaagtaggaatagtgtctgtaagggcatatgttaactgaacttatggatctgaagcatgtacagtaattttaatttaaacagtatgtgtttgaacagtattttctggaagcacagcagtctgatattttagttgaatgatactgtagcagtaagtcccgtggatgagaaagggcagtaaggctaaggtgtattgttcaaataaaatattgagacataatatactggtggctataggagtaatgttcaaactatattgtcggtaattcaaaaaaaaaaaaaaaaatcttctttttcatttattcagatccaagaagttctgtaacatatagccttatggagagattcctatggaaccaaatgaaggcaaagatattagagaatgttttaatcatgtctagattattgcgatccttttcccgtatttcttttcgctcgaattcctcctcttcatcttcttcaagaaacaccaatctcttaaatgatcaagataaccagacccaagaggtcgccccaaaacacaatctcttcgatgaggaagtccgattcgaagatattaatcaaaacatggatgact

SEQ ID NO: 7209 - DNA, 1157 bp, Glycine max
  Gm_smallRNAprecursor_42
tgtaagggcatatgttaactgaacttatggatctgaagcatgtacagtaattttaatttaaacagtatgtgtttgaacagtattttctggaagcacagcagtctgatattttagttgaatgatactgtagcagtaagtcccgtggatgagaaagggcagtaaggctaaggtgtattgttcaaataaaatattgagacataatatactggtggctataggagtaatgttcaaactatattgtcggtaattcaaaaaaaaaaaaaaaaatcttctttttcatttattcagatccaagaagttctgtaacatatagccttatggagagattcctatggaaccaaatgaaggcaaagatattagagaatgttttaatcatgtctagattattgcgatccttttcccgtatttcttttcgctcgaattcctcctcttcatcttcttcaagaaacaccaatctcttaaatgatcaagataaccagacccaagaggtcgccccaaaacacaatctcttcgatgaggaagtccgattcgaagatattaatcaaaacatggatgactggaacattccagaaatccctcaggatcaactatacgttcctgaaacaattaaagacaaacacaactttgattacataatcaaaacagtagaaaacaatattcctctaggacaagatataggggaagaatttcatctactttcaaaaaattcaatttatgaacatagccgtaagtataaatatttacacatcggttgtgtacaagtagccatcaagcccttaattgatatgggcatagatgcagcagttttaatgtgtctaagagatattaggcataatcaatttgaagactccctaattggaacagtcgaaaccagcctaggacaaggtccaatatattttaattgttatccaaacaaaatagtgagtctgatggacagaaacattcttgactctctgttcttaaacatccactttcatggccttgacatgaaagaaggatcaatcccagcagccttaatttataggatccagtacaaggtcatgaatacttgtgcatctagagtcctgttaaaacctcaaagaggagaaacaaccttgtttatcactgatatgacaaaggctaacgtgtctctcccaagaaaaataaaatgggatgaa

SEQ ID NO: 7210 - DNA, 1080 bp, Glycine max
  Gm_smallRNAprecursor_43
atgatttcgttttagaaacaatggccctatttgatacaggggctgattcaaactgcattttagaaggattaattcctacaaaattctttgagaaaacctcagaaaaattaagtacggcaaacggctcaaaattaaaaattaattttaagctatcaaatgcaatcattgaaaaccaaggtcttaagattaacacaaactttcttctggtaaaaaaccttaagaataaagtaatcttaggaacgcccttcattagagccctgtttcccatccaaatatctaatgaaggaataaccacaaatcatttaggaagaaaaattacatttaatttttctactaaaccaatttccagaaatataaatcttatagaaaataagattaatcaaattaacttcttaaaagaagaagtatcttttaataatattcagatacaactgggaaaaccccaagtaaaagaaagaattcaatctttattaaatcatattgaatcgaccgtttgttctgaattgccacatgcattttgggacagaaagaaacatattgtcgatctcccttatgagaaagactttagggaaaaacaaattcccacaaaagccagaccaatccaaatgaatgaagaacttcttcaatactgtcaaaaggaaatcaaggatttgcttgataaaggcctaatccggaaaagcaaaagcccatggtcttgtgcggctttttatgttaacaaacaatctgagattgagcgtggaacaccccgcttagtcataaattacaaaccattaaatcaagcattacaatggattagatatcctattccaaacaaaaaagatttgcttaacagattaaattctgcaaagatattttcaaaatttgatatgaaatctggattttggcaaatccaaatccaagaatcagataggtacaaaatagcgtttactgtacctttcgggcaatatgaatggaacgtgatgccattcggactgaagaatgccccttcagaatttcaaaaaattatgaatgatatttttaatccctattcaaaatttgtcattgtctacatagatgacgttttaatcttttctcaaaaca

SEQ ID NO: 7211 - DNA, 1198 bp, Glycine max
  Gm_smallRNAprecursor_44
acagaaagaaacatattgtcgatctcccttatgagaaagactttagggaaaaacaaattcccacaaaagccagaccaatccaaatgaatgaagaacttcttcaatactgtcaaaaggaaatcaaggatttgcttgataaaggcctaatccggaaaagcaaaagcccatggtcttgtgcggctttttatgttaacaaacaatctgagattgagcgtggaacaccccgcttagtcataaattacaaaccattaaatcaagcattacaatggattagatatcctattccaaacaaaaaagatttgcttaacagattaaattctgcaaagatattttcaaaatttgatatgaaatctggattttggcaaatccaaatccaagaatcagataggtacaaaatagcgtttactgtacctttcgggcaatatgaatggaacgtgatgccattcggactgaagaatgccccttcagaatttcaaaaaattatgaatgatatttttaatccctattcaaaatttgtcattgtctacatagatgacgttttaatcttttctcaaaacattgaccaacatttcaaacatctccaaaccttcatacatatcatcaaacaaaatggtttggcagtctccaaatcaaaaatcaatcttttccaaactcgaattcgtttccttggtcacaatatatatcaaggtacaatcattccaatcgaaaggtcaatagagtttgctagcaaattccccaaccaaatcttagacaaaacccagttacaaagatttctaggttgtctaaattacgtaggagaatttgtcccctatttaaataatattgtcaagccattacatgataggctgaagaaaaatccgcctccttggtctgacctccatacacaaacggttaaagaagtcaaagtcaaagtccaatccattaaatgtctgtatcttcctattccacaggcatttgaaattgttgaaactgatgcttcagacataggttatggtggcatcctcaaacaaagagtccatggccaagatcatgtcattgcatatacatcaaaacattggaatcctgcacaattaaaatattcaactgttaaaaaagaagttttagcaattgttttgtgcatttccaaatttcaatcggatttattaaaccaaaaatttttaatcagggttgattgtaaatcagccaaagatattttaca

SEQ ID NO: 7212 - DNA, 1234 bp, Glycine max
  Gm_smallRNAprecursor_45
acagaaagaaacatattgtcgatctcccttatgagaaagactttagggaaaaacaaattcccacaaaagccagaccaatccaaatgaatgaagaacttcttcaatactgtcaaaaggaaatcaaggatttgcttgataaaggcctaatccggaaaagcaaaagcccatggtcttgtgcggctttttatgttaacaaacaatctgagattgagcgtggaacaccccgcttagtcataaattacaaaccattaaatcaagcattacaatggattagatatcctattccaaacaaaaaagatttgcttaacagattaaattctgcaaagatattttcaaaatttgatatgaaatctggattttggcaaatccaaatccaagaatcagataggtacaaaatagcgtttactgtacctttcgggcaatatgaatggaacgtgatgccattcggactgaagaatgccccttcagaatttcaaaaaattatgaatgatatttttaatccctattcaaaatttgtcattgtctacatagatgacgttttaatcttttctcaaaacattgaccaacatttcaaacatctccaaaccttcatacatatcatcaaacaaaatggtttggcagtctccaaatcaaaaatcaatcttttccaaactcgaattcgtttccttggtcacaatatatatcaaggtacaatcattccaatcgaaaggtcaatagagtttgctagcaaattccccaaccaaatcttagacaaaacccagttacaaagatttctaggttgtctaaattacgtaggagaatttgtcccctatttaaataatattgtcaagccattacatgataggctgaagaaaaatccgcctccttggtctgacctccatacacaaacggttaaagaagtcaaagtcaaagtccaatccattaaatgtctgtatcttcctattccacaggcatttgaaattgttgaaactgatgcttcagacataggttatggtggcatcctcaaacaaagagtccatggccaagatcatgtcattgcatatacatcaaaacattggaatcctgcacaattaaaatattcaactgttaaaaaagaagttttagcaattgttttgtgcatttccaaatttcaatcggatttattaaaccaaaaatttttaatcagggttgattgtaaatcagccaaagatattttacaaaaagatgttaaaaaccttgcctcaaaacaaatttt

SEQ ID NO: 7213 - DNA, 1073 bp, Glycine max
  Gm_smallRNAprecursor_46
tgtacctttcgggcaatatgaatggaacgtgatgccattcggactgaagaatgccccttcagaatttcaaaaaattatgaatgatatttttaatccctattcaaaatttgtcattgtctacatagatgacgttttaatcttttctcaaaacattgaccaacatttcaaacatctccaaaccttcatacatatcatcaaacaaaatggtttggcagtctccaaatcaaaaatcaatcttttccaaactcgaattcgtttccttggtcacaatatatatcaaggtacaatcattccaatcgaaaggtcaatagagtttgctagcaaattccccaaccaaatcttagacaaaacccagttacaaagatttctaggttgtctaaattacgtaggagaatttgtcccctatttaaataatattgtcaagccattacatgataggctgaagaaaaatccgcctccttggtctgacctccatacacaaacggttaaagaagtcaaagtcaaagtccaatccattaaatgtctgtatcttcctattccacaggcatttgaaattgttgaaactgatgcttcagacataggttatggtggcatcctcaaacaaagagtccatggccaagatcatgtcattgcatatacatcaaaacattggaatcctgcacaattaaaatattcaactgttaaaaaagaagttttagcaattgttttgtgcatttccaaatttcaatcggatttattaaaccaaaaatttttaatcagggttgattgtaaatcagccaaagatattttacaaaaagatgttaaaaaccttgcctcaaaacaaatttttgcacgatggcaagcaattttaagtgtctttgattttgacatagaatacatcaagggcacctcaaattcactacctgactaccttacccgtgaattcttacagaaaagtggtaatgcctcctaaggcatcgggaatctccctacggggaggaaggagtacaggcaaaggagccaggctggctcttccagaaccaaccatgaagaaatcatctacctcttctgggtcaccaacccaggctgggtca

SEQ ID NO: 7214 - DNA, 1071 bp, Glycine max
  Gm_smallRNAprecursor_47
tacctttcgggcaatatgaatggaacgtgatgccattcggactgaagaatgccccttcagaatttcaaaaaattatgaatgatatttttaatccctattcaaaatttgtcattgtctacatagatgacgttttaatcttttctcaaaacattgaccaacatttcaaacatctccaaaccttcatacatatcatcaaacaaaatggtttggcagtctccaaatcaaaaatcaatcttttccaaactcgaattcgtttccttggtcacaatatatatcaaggtacaatcattccaatcgaaaggtcaatagagtttgctagcaaattccccaaccaaatcttagacaaaacccagttacaaagatttctaggttgtctaaattacgtaggagaatttgtcccctatttaaataatattgtcaagccattacatgataggctgaagaaaaatccgcctccttggtctgacctccatacacaaacggttaaagaagtcaaagtcaaagtccaatccattaaatgtctgtatcttcctattccacaggcatttgaaattgttgaaactgatgcttcagacataggttatggtggcatcctcaaacaaagagtccatggccaagatcatgtcattgcatatacatcaaaacattggaatcctgcacaattaaaatattcaactgttaaaaaagaagttttagcaattgttttgtgcatttccaaatttcaatcggatttattaaaccaaaaatttttaatcagggttgattgtaaatcagccaaagatattttacaaaaagatgttaaaaaccttgcctcaaaacaaatttttgcacgatggcaagcaattttaagtgtctttgattttgacatagaatacatcaagggcacctcaaattcactacctgactaccttacccgtgaattcttacagaaaagtggtaatgcctcctaaggcatcgggaatctccctacggggaggaaggagtacaggcaaaggagccaggctggctcttccagaaccaaccatgaagaaatcatctacctcttctgggtcaccaacccaggctgggtca

SEQ ID NO: 7215 - DNA, 1115 bp, Glycine max
  Gm_smallRNAprecursor_48
tcaatagagtttgctagcaaattccccaaccaaatcttagacaaaacccagttacaaagatttctaggttgtctaaattacgtaggagaatttgtcccctatttaaataatattgtcaagccattacatgataggctgaagaaaaatccgcctccttggtctgacctccatacacaaacggttaaagaagtcaaagtcaaagtccaatccattaaatgtctgtatcttcctattccacaggcatttgaaattgttgaaactgatgcttcagacataggttatggtggcatcctcaaacaaagagtccatggccaagatcatgtcattgcatatacatcaaaacattggaatcctgcacaattaaaatattcaactgttaaaaaagaagttttagcaattgttttgtgcatttccaaatttcaatcggatttattaaaccaaaaatttttaatcagggttgattgtaaatcagccaaagatattttacaaaaagatgttaaaaaccttgcctcaaaacaaatttttgcacgatggcaagcaattttaagtgtctttgattttgacatagaatacatcaagggcacctcaaattcactacctgactaccttacccgtgaattcttacagaaaagtggtaatgcctcctaaggcatcgggaatctccctacggggaggaaggagtacaggcaaaggagccaggctggctcttccagaaccaaccatgaagaaatcatctacctcttctgggtcaccaacccaggctgggtcatctacccagaaaaccaatttagaagggtcatcaacccagattgcctcaatcaaacctgagccatccactcaggaatctcccaaaccggcaaccgccaaacaaacatcggccgactatgcttggccaattgaaacccttcaggcccttcaagacatgggtctgaccaaatttccaaaaataatcaaaaaatcttgggcagacattgcctcagaatctgatgatgaatctgaatcaaatttacaaacaatgatccaaaatgcgtcaatgaccaaaacagccaccaatactaaaggaaaactaccttcagccaaagaccaaacaccacctaccaaacaaactaacaatt

SEQ ID NO: 7216 - DNA, 1174 bp, Glycine max
  Gm_smallRNAprecursor_49
acaaagagtccatggccaagatcatgtcattgcatatacatcaaaacattggaatcctgcacaattaaaatattcaactgttaaaaaagaagttttagcaattgttttgtgcatttccaaatttcaatcggatttattaaaccaaaaatttttaatcagggttgattgtaaatcagccaaagatattttacaaaaagatgttaaaaaccttgcctcaaaacaaatttttgcacgatggcaagcaattttaagtgtctttgattttgacatagaatacatcaagggcacctcaaattcactacctgactaccttacccgtgaattcttacagaaaagtggtaatgcctcctaaggcatcgggaatctccctacggggaggaaggagtacaggcaaaggagccaggctggctcttccagaaccaaccatgaagaaatcatctacctcttctgggtcaccaacccaggctgggtcatctacccagaaaaccaatttagaagggtcatcaacccagattgcctcaatcaaacctgagccatccactcaggaatctcccaaaccggcaaccgccaaacaaacatcggccgactatgcttggccaattgaaacccttcaggcccttcaagacatgggtctgaccaaatttccaaaaataatcaaaaaatcttgggcagacattgcctcagaatctgatgatgaatctgaatcaaatttacaaacaatgatccaaaatgcgtcaatgaccaaaacagccaccaatactaaaggaaaactaccttcagccaaagaccaaacaccacctaccaaacaaactaacaattatatttataaaaataaattgttaactgttttgcagatggaacctgaattttgggacaaaaatcccttcaaggcgacggccaaggctttcccaccaggctttcactataaaccaaccaccatcctgaagacaagaactttttatgaattgattttggtagattcaaactcagtatctatcaaacatttcaaagatccaaaagaccaaaccttaaacacccactcaaccatccaaatactaaaagttcttcaaccaagacactttggttcggacttgaacaaaggaaagagattttcagttccatttgatccggtaggttatacctattgggattacgttgatgcttggaccaaggt

SEQ ID NO: 7217 - DNA, 1173 bp, Glycine max
  Gm_smallRNAprecursor_50
caaagagtccatggccaagatcatgtcattgcatatacatcaaaacattggaatcctgcacaattaaaatattcaactgttaaaaaagaagttttagcaattgttttgtgcatttccaaatttcaatcggatttattaaaccaaaaatttttaatcagggttgattgtaaatcagccaaagatattttacaaaaagatgttaaaaaccttgcctcaaaacaaatttttgcacgatggcaagcaattttaagtgtctttgattttgacatagaatacatcaagggcacctcaaattcactacctgactaccttacccgtgaattcttacagaaaagtggtaatgcctcctaaggcatcgggaatctccctacggggaggaaggagtacaggcaaaggagccaggctggctcttccagaaccaaccatgaagaaatcatctacctcttctgggtcaccaacccaggctgggtcatctacccagaaaaccaatttagaagggtcatcaacccagattgcctcaatcaaacctgagccatccactcaggaatctcccaaaccggcaaccgccaaacaaacatcggccgactatgcttggccaattgaaacccttcaggcccttcaagacatgggtctgaccaaatttccaaaaataatcaaaaaatcttgggcagacattgcctcagaatctgatgatgaatctgaatcaaatttacaaacaatgatccaaaatgcgtcaatgaccaaaacagccaccaatactaaaggaaaactaccttcagccaaagaccaaacaccacctaccaaacaaactaacaattatatttataaaaataaattgttaactgttttgcagatggaacctgaattttgggacaaaaatcccttcaaggcgacggccaaggctttcccaccaggctttcactataaaccaaccaccatcctgaagacaagaactttttatgaattgattttggtagattcaaactcagtatctatcaaacatttcaaagatccaaaagaccaaaccttaaacacccactcaaccatccaaatactaaaagttcttcaaccaagacactttggttcggacttgaacaaaggaaagagattttcagttccatttgatccggtaggttatacctattgggattacgttgatgcttggaccaaggt

SEQ ID NO: 7218 - DNA, 1173 bp, Glycine max; identical to SEQ ID NO: 7217
  Gm_smallRNAprecursor_51

SEQ ID NO: 7219 - DNA, 1087 bp, Glycine max
  Gm_smallRNAprecursor_52
tgagccatccactcaggaatctcccaaaccggcaaccgccaaacaaacatcggccgactatgcttggccaattgaaacccttcaggcccttcaagacatgggtctgaccaaatttccaaaaataatcaaaaaatcttgggcagacattgcctcagaatctgatgatgaatctgaatcaaatttacaaacaatgatccaaaatgcgtcaatgaccaaaacagccaccaatactaaaggaaaactaccttcagccaaagaccaaacaccacctaccaaacaaactaacaattatatttataaaaataaattgttaactgttttgcagatggaacctgaattttgggacaaaaatcccttcaaggcgacggccaaggctttcccaccaggctttcactataaaccaaccaccatcctgaagacaagaactttttatgaattgattttggtagattcaaactcagtatctatcaaacatttcaaagatccaaaagaccaaaccttaaacacccactcaaccatccaaatactaaaagttcttcaaccaagacactttggttcggacttgaacaaaggaaagagattttcagttccatttgatccggtaggttatacctattgggattacgttgatgcttggaccaaggtgttttggcaccaaaatacccgcttcaagcattcatggctgatatatttcaagaccaacacaatttacaattttcccaattggttttgcaatggtgggacttctttggaccaatcccagagatattcccagaaacggtccaacaaggattttcccaatttaagaaacaatacaattcgcaggaatcacgaattccagcagatcttaaatacttttcaagctttgcactgtcatggatattctcatggcaatatcgttacagcaagactgaaaagacaaaccaatatccatcactacaaagacacgcatttgtaaaatggtggacacaatttgactcatccaaagcggatccagaacaagtaaaactatggttcaaatcccatccagaattcctcaaagcggctgatccagagacttctgtgtttttgaaccaaaagtctcatc

SEQ ID NO: 7220 - DNA, 1246 bp, Glycine max
  Gm_smallRNAprecursor_53
cccttcaagacatgggtctgaccaaatttccaaaaataatcaaaaaatcttgggcagacattgcctcagaatctgatgatgaatctgaatcaaatttacaaacaatgatccaaaatgcgtcaatgaccaaaacagccaccaatactaaaggaaaactaccttcagccaaagaccaaacaccacctaccaaacaaactaacaattatatttataaaaataaattgttaactgttttgcagatggaacctgaattttgggacaaaaatcccttcaaggcgacggccaaggctttcccaccaggctttcactataaaccaaccaccatcctgaagacaagaactttttatgaattgattttggtagattcaaactcagtatctatcaaacatttcaaagatccaaaagaccaaaccttaaacacccactcaaccatccaaatactaaaagttcttcaaccaagacactttggttcggacttgaacaaaggaaagagattttcagttccatttgatccggtaggttatacctattgggattacgttgatgcttggaccaaggtgttttggcaccaaaatacccgcttcaagcattcatggctgatatatttcaagaccaacacaatttacaattttcccaattggttttgcaatggtgggacttctttggaccaatcccagagatattcccagaaacggtccaacaaggattttcccaatttaagaaacaatacaattcgcaggaatcacgaattccagcagatcttaaatacttttcaagctttgcactgtcatggatattctcatggcaatatcgttacagcaagactgaaaagacaaaccaatatccatcactacaaagacacgcatttgtaaaatggtggacacaatttgactcatccaaagcggatccagaacaagtaaaactatggttcaaatcccatccagaattcctcaaagcggctgatccagagacttctgtgtttttgaaccaaaagtctcatctggcagcatttttagcaagatcgacatcaaaggaggtcttagctaaaaatctgaaggaagttctacaaatgttacaacaggaagaagaagtttcatcctcaaagaaggaagaaacaagttctgccgaagaagaagaagaagatcccttttaccaaaacgaagatgattgttttggtatctgtttagattaaatttaatttcggtcacaaaatcgtctgtttgtaattaatgtgtaattaatgatg

SEQ ID NO: 7221 - DNA, 1247 bp, Glycine max
  Gm_smallRNAprecursor_54
cccttcaagacatgggtctgaccaaatttccaaaaataatcaaaaaatcttgggcagacattgcctcagaatctgatgatgaatctgaatcaaatttacaaacaatgatccaaaatgcgtcaatgaccaaaacagccaccaatactaaaggaaaactaccttcagccaaagaccaaacaccacctaccaaacaaactaacaattatatttataaaaataaattgttaactgttttgcagatggaacctgaattttgggacaaaaatcccttcaaggcgacggccaaggctttcccaccaggctttcactataaaccaaccaccatcctgaagacaagaactttttatgaattgattttggtagattcaaactcagtatctatcaaacatttcaaagatccaaaagaccaaaccttaaacacccactcaaccatccaaatactaaaagttcttcaaccaagacactttggttcggacttgaacaaaggaaagagattttcagttccatttgatccggtaggttatacctattgggattacgttgatgcttggaccaaggtgttttggcaccaaaatacccgcttcaagcattcatggctgatatatttcaagaccaacacaatttacaattttcccaattggttttgcaatggtgggacttctttggaccaatcccagagatattcccagaaacggtccaacaaggattttcccaatttaagaaacaatacaattcgcaggaatcacgaattccagcagatcttaaatacttttcaagctttgcactgtcatggatattctcatggcaatatcgttacagcaagactgaaaagacaaaccaatatccatcactacaaagacacgcatttgtaaaatggtggacacaatttgactcatccaaagcggatccagaacaagtaaaactatggttcaaatcccatccagaattcctcaaagcggctgatccagagacttctgtgtttttgaaccaaaagtctcatctggcagcatttttagcaagatcgacatcaaaggaggtcttagctaaaaatctgaaggaagttctacaaatgttacaacaggaagaagaagtttcatcctcaaagaaggaagaaacaagttctgccgaagaagaagaagaagatcccttttaccaaaacgaagatgattgttttggtatctgtttagattaaatttaatttcggtcacaaaatcgtctgtttgtaattaatgtgtaattaatgatgg

SEQ ID NO: 7222 - DNA, 1145 bp, Glycine max
  Gm_smallRNAprecursor_55
acaatgatccaaaatgcgtcaatgaccaaaacagccaccaatactaaaggaaaactaccttcagccaaagaccaaacaccacctaccaaacaaactaacaattatatttataaaaataaattgttaactgttttgcagatggaacctgaattttgggacaaaaatcccttcaaggcgacggccaaggctttcccaccaggctttcactataaaccaaccaccatcctgaagacaagaactttttatgaattgattttggtagattcaaactcagtatctatcaaacatttcaaagatccaaaagaccaaaccttaaacacccactcaaccatccaaatactaaaagttcttcaaccaagacactttggttcggacttgaacaaaggaaagagattttcagttccatttgatccggtaggttatacctattgggattacgttgatgcttggaccaaggtgttttggcaccaaaatacccgcttcaagcattcatggctgatatatttcaagaccaacacaatttacaattttcccaattggttttgcaatggtgggacttctttggaccaatcccagagatattcccagaaacggtccaacaaggattttcccaatttaagaaacaatacaattcgcaggaatcacgaattccagcagatcttaaatacttttcaagctttgcactgtcatggatattctcatggcaatatcgttacagcaagactgaaaagacaaaccaatatccatcactacaaagacacgcatttgtaaaatggtggacacaatttgactcatccaaagcggatccagaacaagtaaaactatggttcaaatcccatccagaattcctcaaagcggctgatccagagacttctgtgtttttgaaccaaaagtctcatctggcagcatttttagcaagatcgacatcaaaggaggtcttagctaaaaatctgaaggaagttctacaaatgttacaacaggaagaagaagtttcatcctcaaagaaggaagaaacaagttctgccgaagaagaagaagaagatcccttttaccaaaacgaagatgattgttttggtatctgtttagattaaatttaatttcggtcacaaaatcgtctgtttgtaattaatgtgtaattaatgatg

SEQ ID NO: 7223 - DNA, 1145 bp, Glycine max; identical to SEQ ID NO: 7222
  Gm_smallRNAprecursor_56

SEQ ID NO: 7224 - DNA, 1146 bp, Glycine max
  Gm_smallRNAprecursor_57
acaatgatccaaaatgcgtcaatgaccaaaacagccaccaatactaaaggaaaactaccttcagccaaagaccaaacaccacctaccaaacaaactaacaattatatttataaaaataaattgttaactgttttgcagatggaacctgaattttgggacaaaaatcccttcaaggcgacggccaaggctttcccaccaggctttcactataaaccaaccaccatcctgaagacaagaactttttatgaattgattttggtagattcaaactcagtatctatcaaacatttcaaagatccaaaagaccaaaccttaaacacccactcaaccatccaaatactaaaagttcttcaaccaagacactttggttcggacttgaacaaaggaaagagattttcagttccatttgatccggtaggttatacctattgggattacgttgatgcttggaccaaggtgttttggcaccaaaatacccgcttcaagcattcatggctgatatatttcaagaccaacacaatttacaattttcccaattggttttgcaatggtgggacttctttggaccaatcccagagatattcccagaaacggtccaacaaggattttcccaatttaagaaacaatacaattcgcaggaatcacgaattccagcagatcttaaatacttttcaagctttgcactgtcatggatattctcatggcaatatcgttacagcaagactgaaaagacaaaccaatatccatcactacaaagacacgcatttgtaaaatggtggacacaatttgactcatccaaagcggatccagaacaagtaaaactatggttcaaatcccatccagaattcctcaaagcggctgatccagagacttctgtgtttttgaaccaaaagtctcatctggcagcatttttagcaagatcgacatcaaaggaggtcttagctaaaaatctgaaggaagttctacaaatgttacaacaggaagaagaagtttcatcctcaaagaaggaagaaacaagttctgccgaagaagaagaagaagatcccttttaccaaaacgaagatgattgttttggtatctgtttagattaaatttaatttcggtcacaaaatcgtctgtttgtaattaatgtgtaattaatgatgg

SEQ ID NO: 7225 - DNA, 1149 bp, Glycine max
  Gm_smallRNAprecursor_58
tctttatcagtagaaatcctattgacagctaaagtcttgcagccctttgtaaatcttgattctaatagctaaagtgcttcccaacatatcatcaagttggagtgggtatacttttgggtcatcttcaccttcctaactaagaaatgaaagttaattataaatttttaataaattgtaaggtaaattaacgaatatatatatacatatatatatatatatatatatatatatatatatatatcttatttctgcatttttcaaatactattttggaagtatttttcgaggaatacagtccgtaagggcgtatgataggaagtaagagtaatgtccgtttgtatcctttattattcacaaatggacaaaaacagactattcggctctggtatcagagcctgatggggaagtaggaatacagtccgtaagggcgtatgatagcaaagtttatggatctgacaccttgtatagtatgagtcatattttattttaatttgtacagtagatgtttgaacagtacttcctggaagtacagcagtctaatattttagttgaatggtactgtagcagtaagacccgtggtggataaagggcaataaggctaaggtgtactgtttaaccaaaatatcaaaacataatatactggtggctataggattgccgttcaaactattttttcttttaaaaaaaaaaaagagtttttcttaaaaataattcagatacaaaaatttttgttacatatttacttacggaaatatttctatggaaccaaatgacggcgaagatattagaggattttataatcatgtcaagattactgcgttcttttttgcgtatttcctttcagtctaattcctcttcatcaacttcttccagaaattcaaacttattaaatgatcaagataaccagacccaagaggtcgcccctaaacacaatctcttcgatgaggacaagtcgaaaccagcctaggacaaggtccagtatattttaattgttatccaaacaaaacagtgagtctgatggacagaaacattctcgactctctgttcttaaacatccactttcatggccttgacatgaatgaaggatcaatcccagcagctttaatctataggatccagtacaaggtcatgaacacttgtgcttctaga

SEQ ID NO: 7226 - DNA, 1149 bp, Glycine max; identical to SEQ ID NO: 7225
  Gm_smallRNAprecursor_59

SEQ ID NO: 7227 - DNA, 1245 bp, Glycine max
  Gm_smallRNAprecursor_60
cagtagaaatcctattgacagctaaagtcttgcagccctttgtaaatcttgattctaatagctaaagtgcttcccaacatatcatcaagttggagtgggtatacttttgggtcatcttcaccttcctaactaagaaatgaaagttaattataaatttttaataaattgtaaggtaaattaacgaatatatatatacatatatatatatatatatatatatatatatatatatatcttatttctgcatttttcaaatactattttggaagtatttttcgaggaatacagtccgtaagggcgtatgataggaagtaagagtaatgtccgtttgtatcctttattattcacaaatggacaaaaacagactattcggctctggtatcagagcctgatggggaagtaggaatacagtccgtaagggcgtatgatagcaaagtttatggatctgacaccttgtatagtatgagtcatattttattttaatttgtacagtagatgtttgaacagtacttcctggaagtacagcagtctaatattttagttgaatggtactgtagcagtaagacccgtggtggataaagggcaataaggctaaggtgtactgtttaaccaaaatatcaaaacataatatactggtggctataggattgccgttcaaactattttttcttttaaaaaaaaaaaagagtttttcttaaaaataattcagatacaaaaatttttgttacatatttacttacggaaatatttctatggaaccaaatgacggcgaagatattagaggattttataatcatgtcaagattactgcgttcttttttgcgtatttcctttcagtctaattcctcttcatcaacttcttccagaaattcaaacttattaaatgatcaagataaccagacccaagaggtcgcccctaaacacaatctcttcgatgaggacaagtcgaaaccagcctaggacaaggtccagtatattttaattgttatccaaacaaaacagtgagtctgatggacagaaacattctcgactctctgttcttaaacatccactttcatggccttgacatgaatgaaggatcaatcccagcagctttaatctataggatccagtacaaggtcatgaacacttgtgcttctagagtcctgttacaaccacaaaagggagaaacaaccttatttattacagatatgacaaaagccaatgtctctttaaaaagaataataaaatgggatgaagtaactc

SEQ ID NO: 7228 - DNA, 1107 bp, Glycine max
  Gm_smallRNAprecursor_61
catttttcaaatactattttggaagtatttttcgaggaatacagtccgtaagggcgtatgataggaagtaagagtaatgtccgtttgtatcctttattattcacaaatggacaaaaacagactattcggctctggtatcagagcctgatggggaagtaggaatacagtccgtaagggcgtatgatagcaaagtttatggatctgacaccttgtatagtatgagtcatattttattttaatttgtacagtagatgtttgaacagtacttcctggaagtacagcagtctaatattttagttgaatggtactgtagcagtaagacccgtggtggataaagggcaataaggctaaggtgtactgtttaaccaaaatatcaaaacataatatactggtggctataggattgccgttcaaactattttttcttttaaaaaaaaaaaagagtttttcttaaaaataattcagatacaaaaatttttgttacatatttacttacggaaatatttctatggaaccaaatgacggcgaagatattagaggattttataatcatgtcaagattactgcgttcttttttgcgtatttcctttcagtctaattcctcttcatcaacttcttccagaaattcaaacttattaaatgatcaagataaccagacccaagaggtcgcccctaaacacaatctcttcgatgaggacaagtcgaaaccagcctaggacaaggtccagtatattttaattgttatccaaacaaaacagtgagtctgatggacagaaacattctcgactctctgttcttaaacatccactttcatggccttgacatgaatgaaggatcaatcccagcagctttaatctataggatccagtacaaggtcatgaacacttgtgcttctagagtcctgttacaaccacaaaagggagaaacaaccttatttattacagatatgacaaaagccaatgtctctttaaaaagaataataaaatgggatgaagtaactctccccgaaaaatgggtcatggagaaggccacaccgtctgatccccgacccgctccaattattgaagacattaaacaggataactccggaaaggtagaaataacctt

SEQ ID NO: 7229 - DNA, 1166 bp, Glycine max
  Gm_smallRNAprecursor_62
gctacagtaccattcaactaaaatattagactgcagtacttccaggaagtactgtttaaacatctactgtacaaattaaaataaaatatgactcatactatacaaggtgtcagatccataaactttgctatcatacgcccttacggactgcattcctacttccccatcaggctctgataccagagatcagcagaaaggatacaaacgaacagataggaagtaagagtaatgcaatatgacaaatgcagaaatttaaaatttgtaaaacagttatcaagggcacaccgaaatccggcttacaaacccaggtttttgaaaacaaagaaaccgaagcggcggcagagccgcacaggatcggtgaagggagaagggagatgtgaaaaataaaactttgaatttattgaaatcgaaagaaaagcttacaaagaggttttccctaggcagagcttctctctctaagacctgattttgagactatctgaaagggtgcgtcacaaagggaacgaggactcctttaaatagacccaatattttactgtttcaacagtatcggtaatgtttaccggaactgttacaaaaactttttcaaattacattattatcgggaaccgaataattagttacaataattcatgattactacaactaactaatcattgtctaacgatataccaaaacagtcatcctcattctggtagaatggatcatcttcctagtcatcattattctcagatgattcggcctccttcttggggggttcttcttcttcttcctgttgaagtagttggagaacttccttaagattctgagcaagactctctttagattttgagcttgctaagaatgctgcaagttgagacttttgattcagaaacagagatgtctctagattagcaggctagagaaactcagggttgctctgaaaccagttcttgacttgttctggagcatcctttgaggtatcgaattgtgaccaccactttacaaaggcatgtctctgcaatggtggatattgtttgctgttttcggcttttccatatctatattgccatgaaaaaatccatgacaaggcacaactggaaaagtactttaaatctgccggaattcttgattccttgctattgaagagcttggtgaattgttggaatccttgttggacttcttct

SEQ ID NO: 7230 - DNA, 1187 bp, Glycine max
  Gm_smallRNAprecursor_63
atcagcttcacgaacatcccgcagttcttcctccatgcctcttgaagacctagaacagctgacccaacaaatcagagaccaactggaggagtcaatcacataaaaagtgactcgaaagatgatggaatccttcagcctgatgcagtcccagtttcagtctcagatgcaatcacagggaattgcactacctctagagccagaggttggtccctcaggtcctcgtgttagcacaaaggagagttgtgttgttccctcagggaacgatccagggacgggtgactcagacaaatgcggcctatatattgaagaaaatccttcccgcttggttgccctaggaagactttacgagggatccacaacagttcacaacatccctttgttgcatggccaagtcaaggttggtgttgaggaggttaaagatacagaggctctcgttcctgtacccactgacgaggttaccttagtgggacagacacttaacactttccttgcttggccaacacatcttgtgaagcgtttatcagaacaagtattttactctgattatatatttatttttttcaattaatttgttcactgtaatcaaaactttctaattaactatgttttatcaataggcagctgtgtctccaacaaaacctccagagagcccggatgaagaggtcgatgatcccctgtacctgatgacattgaccatcccacaactgtttttgaagccgctccaggttatgtgggatgctaccatattcggggtgtttaatcaaaacttcccgttgtaaataaagcacgaagatctctctgaaattgcacatggtggtcaatgtctcagcatatctgttatacagttgtggattctgtaagtcattttagattactattaattaccaaagtaattgttttaaattcatacataattaactttgacttaacaacacagccatctgactgacacaagtgtgcgagcggggaattctgatgtgtatggattcctcgagccacagtccattcagagatctgggcaatcacaatttgaatccgaaagttacatcaagagttggatacagagttcaaaacgagatgtttaccttggagcctatctgaataggtaagttaaacacaataattgaatttaaataatctatactactacaataacccatattcgtctctactgcagtggacactgg

SEQ ID NO: 7231 - DNA, 1165 bp, Glycine max
  Gm_smallRNAprecursor_64
caattttgctcaaattggatcctacaagtcctaaatcatgtataaatcatatttaaaccaaaaacaagcttcagaccaaggcaattcaaaatctaggtatctaaaacccatcaatttagtggattttcaaggtttgagaagtgaaaatgagaatggggtaattttggagtaaactctcatctcaaacaagtctataacattaatttaaacttgctcaaactggttttacggcaaaaactccaccgattcaaaatttgacccctcaacacccaatttaccctagaaatggctcttgctttcacctttgtcactcacttttctcatttgctctgcccaagccttcctacaagtcctaattgacattttaaaactaggattaactcactttagcctccaattaccaataaccccaaatttagcttttcaaaccctcaaaatctcacacttttccactcacatcactaccattctcacatttaaccctaggttaactctccccatcatctctaccagttttctaccaacgatttcagcacacaaacatcacaaagcatcatcacaaaaccctaaaacagaatgggtaaatttggctcacatcaaacatgtcaagcttagcatgctttcaacaaattccttcacagataactaccataaggcataaacctagtagaactacccatcatatctcccaaagacccaatacccacgaatttcatgtgagaagaagtccacccatacctgaaattcgaagtcccacaacgtagaggtgcgcttcacgacttcgaaaatggcttccttttgcaatttggagtagaagtgatgagcaaagtttggagctttaatgggcaacaatggtggaggagaaagggagaagaaaagcaacgtgggagatgaggaaaaagcttctgaaaatctgctgagtgaagtgagagagtgtggctttttaaaaaaaaaattttctttttcctattgttttattttttaaaagcacttgccacttgtcccattttgagtggaacaaaaagggcccactttttctcttgatgtgacttcatactcagccacaaggaaagaaaaatttgactttttgaatgctaaaattctgcctcagtttgcgtgtcgtttctctggtttcagtctctgcgtttctctacacccgtcgggg

SEQ ID NO: 7232 - DNA, 1045 bp, Glycine max
  Gm_smallRNAprecursor_65
ttaaggttcccaacaaaacactcactatcctaagggaaaattgcctaaaattattacacacaaatggaagtagggtgacctattgaaggctcccaacttacttccaatgaaaggcctttttgttacaaagtttgaaaacaaagaaaattgtcaattacaaaattacaaaaaaaaagtcctcaattgtggcggctattctatctttggtgtttcactcaatttggagtgcttcttagtccaatagctcttaaggtggttggccccttgcttcttgactcaaatgtttttgagaccttacttttttaaattagtttttactgttttactagttttagttagtcttgcttcaagacaagcaaggttttaggtttggagaatgagtgaataggcaatttagtccctgagattgtaccaattttgcatattagtccctaacttaatattaaattcaaaatagtctctatctttgcaaaagtgttgcaaaatagtccttccgttaaattttaaagtaacgccgttagtgaggtcaattttagtgccacgtgaactatccaacgtggcactaaaggatgacgtggcatgacacgtggacgtgcctcctaaaagatgccacgtcatttgatgataacaaaacgagtaaataggcaatttagtccctgattttgtacccctgttgcatattagtccctaacttaatgaaaaattcaaaatagtccctatcttttgcataagtgttgcaaaatagtacctaacttaaaagatgccggaaattgtgcttaaagtgtccatgcattgcaaaggttgtgcctagcacgatttctggcagcacagattcctccttggattctttgtcatcttttgattcctctagttttttctcttcttctttcttttcttcttcatttgcttttttctcctccactttgttttcctctagttttttctcttcctattcaaaacacacaaaaaaaaaatcagaaccctgaatgatatattgatggtaattgaagcaaaaaaaggaaaagagaatggttatgcagacctc

SEQ ID NO: 7233 - DNA, 1046 bp, Glycine max
  Gm_smallRNAprecursor_66
ttaaggttcccaacaaaacactcactatcctaagggaaaattgcctaaaattattacacacaaatggaagtagggtgacctattgaaggctcccaacttacttccaatgaaaggcctttttgttacaaagtttgaaaacaaagaaaattgtcaattacaaaattacaaaaaaaaagtcctcaattgtggcggctattctatctttggtgtttcactcaatttggagtgcttcttagtccaatagctcttaaggtggttggccccttgcttcttgactcaaatgtttttgagaccttacttttttaaattagtttttactgttttactagttttagttagtcttgcttcaagacaagcaaggttttaggtttggagaatgagtgaataggcaatttagtccctgagattgtaccaattttgcatattagtccctaacttaatattaaattcaaaatagtctctatctttgcaaaagtgttgcaaaatagtccttccgttaaattttaaagtaacgccgttagtgaggtcaattttagtgccacgtgaactatccaacgtggcactaaaggatgacgtggcatgacacgtggacgtgcctcctaaaagatgccacgtcatttgatgataacaaaacgagtaaataggcaatttagtccctgattttgtacccctgttgcatattagtccctaacttaatgaaaaattcaaaatagtccctatcttttgcataagtgttgcaaaatagtacctaacttaaaagatgccggaaattgtgcttaaagtgtccatgcattgcaaaggttgtgcctagcacgatttctggcagcacagattcctccttggattctttgtcatcttttgattcctctagttttttctcttcttctttcttttcttcttcatttgcttttttctcctccactttgttttcctctagttttttctcttcctattcaaaacacacaaaaaaaaaatcagaaccctgaatgatatattgatggtaattgaagcaaaaaaaggaaaagagaatggttatgcagacctcg

SEQ ID NO: 7234 - DNA, 1044 bp, Glycine max
  Gm_smallRNAprecursor_67
taaggttcccaacaaaacactcactatcctaagggaaaattgcctaaaattattacacacaaatggaagtagggtgacctattgaaggctcccaacttacttccaatgaaaggcctttttgttacaaagtttgaaaacaaagaaaattgtcaattacaaaattacaaaaaaaaagtcctcaattgtggcggctattctatctttggtgtttcactcaatttggagtgcttcttagtccaatagctcttaaggtggttggccccttgcttcttgactcaaatgtttttgagaccttacttttttaaattagtttttactgttttactagttttagttagtcttgcttcaagacaagcaaggttttaggtttggagaatgagtgaataggcaatttagtccctgagattgtaccaattttgcatattagtccctaacttaatattaaattcaaaatagtctctatctttgcaaaagtgttgcaaaatagtccttccgttaaattttaaagtaacgccgttagtgaggtcaattttagtgccacgtgaactatccaacgtggcactaaaggatgacgtggcatgacacgtggacgtgcctcctaaaagatgccacgtcatttgatgataacaaaacgagtaaataggcaatttagtccctgattttgtacccctgttgcatattagtccctaacttaatgaaaaattcaaaatagtccctatcttttgcataagtgttgcaaaatagtacctaacttaaaagatgccggaaattgtgcttaaagtgtccatgcattgcaaaggttgtgcctagcacgatttctggcagcacagattcctccttggattctttgtcatcttttgattcctctagttttttctcttcttctttcttttcttcttcatttgcttttttctcctccactttgttttcctctagttttttctcttcctattcaaaacacacaaaaaaaaaatcagaaccctgaatgatatattgatggtaattgaagcaaaaaaaggaaaagagaatggttatgcagacctc

SEQ ID NO: 7235 - DNA, 1044 bp, Glycine max; identical to SEQ ID NO: 7234
  Gm_smallRNAprecursor_68

SEQ ID NO: 7236 - DNA, 1044 bp, Glycine max; identical to SEQ ID NO: 7234
  Gm_smallRNAprecursor_69

SEQ ID NO: 7237 - DNA, 1045 bp, Glycine max
  Gm_smallRNAprecursor_70
taaggttcccaacaaaacactcactatcctaagggaaaattgcctaaaattattacacacaaatggaagtagggtgacctattgaaggctcccaacttacttccaatgaaaggcctttttgttacaaagtttgaaaacaaagaaaattgtcaattacaaaattacaaaaaaaaagtcctcaattgtggcggctattctatctttggtgtttcactcaatttggagtgcttcttagtccaatagctcttaaggtggttggccccttgcttcttgactcaaatgtttttgagaccttacttttttaaattagtttttactgttttactagttttagttagtcttgcttcaagacaagcaaggttttaggtttggagaatgagtgaataggcaatttagtccctgagattgtaccaattttgcatattagtccctaacttaatattaaattcaaaatagtctctatctttgcaaaagtgttgcaaaatagtccttccgttaaattttaaagtaacgccgttagtgaggtcaattttagtgccacgtgaactatccaacgtggcactaaaggatgacgtggcatgacacgtggacgtgcctcctaaaagatgccacgtcatttgatgataacaaaacgagtaaataggcaatttagtccctgattttgtacccctgttgcatattagtccctaacttaatgaaaaattcaaaatagtccctatcttttgcataagtgttgcaaaatagtacctaacttaaaagatgccggaaattgtgcttaaagtgtccatgcattgcaaaggttgtgcctagcacgatttctggcagcacagattcctccttggattctttgtcatcttttgattcctctagttttttctcttcttctttcttttcttcttcatttgcttttttctcctccactttgttttcctctagttttttctcttcctattcaaaacacacaaaaaaaaaatcagaaccctgaatgatatattgatggtaattgaagcaaaaaaaggaaaagagaatggttatgcagacctcg

SEQ ID NO: 7238 - DNA, 1043 bp, Glycine max
  Gm_smallRNAprecursor_71
aaggttcccaacaaaacactcactatcctaagggaaaattgcctaaaattattacacacaaatggaagtagggtgacctattgaaggctcccaacttacttccaatgaaaggcctttttgttacaaagtttgaaaacaaagaaaattgtcaattacaaaattacaaaaaaaaagtcctcaattgtggcggctattctatctttggtgtttcactcaatttggagtgcttcttagtccaatagctcttaaggtggttggccccttgcttcttgactcaaatgtttttgagaccttacttttttaaattagtttttactgttttactagttttagttagtcttgcttcaagacaagcaaggttttaggtttggagaatgagtgaataggcaatttagtccctgagattgtaccaattttgcatattagtccctaacttaatattaaattcaaaatagtctctatctttgcaaaagtgttgcaaaatagtccttccgttaaattttaaagtaacgccgttagtgaggtcaattttagtgccacgtgaactatccaacgtggcactaaaggatgacgtggcatgacacgtggacgtgcctcctaaaagatgccacgtcatttgatgataacaaaacgagtaaataggcaatttagtccctgattttgtacccctgttgcatattagtccctaacttaatgaaaaattcaaaatagtccctatcttttgcataagtgttgcaaaatagtacctaacttaaaagatgccggaaattgtgcttaaagtgtccatgcattgcaaaggttgtgcctagcacgatttctggcagcacagattcctccttggattctttgtcatcttttgattcctctagttttttctcttcttctttcttttcttcttcatttgcttttttctcctccactttgttttcctctagttttttctcttcctattcaaaacacacaaaaaaaaaatcagaaccctgaatgatatattgatggtaattgaagcaaaaaaaggaaaagagaatggttatgcagacctc

SEQ ID NO: 7239 - DNA, 1043 bp, Glycine max; identical to SEQ ID NO: 7238
  Gm_smallRNAprecursor_72

SEQ ID NO: 7240 - DNA, 1159 bp, Glycine max
  Gm_smallRNAprecursor_73
acccatttttcgagaagagttacctcatcccattttatggttcttgggagagaaacattggcctttgtcatatcagtgataaacaaagttgtctctcctttttgaggttttaataggactctcgatgcacaagtattcatgacattgtattggatcctatagattaaagctgctcggattgatccttctttcacgtcaaggccatgaaagtggatgtttaggaatagagagtcaagaatgtttctgtccattagactcactattttttttggataacaattgaagtatatcggaccttgtcctaagcttgtttctatggttcctattaaggagtcttcaaattttttgtgcctaatgtctctaaggcacattaaaactgttgaatctatgcccatatcaattaagggcttgatggctacttgtacataacctatgtggagatatttgtatttacggttgtgttcatatattgaatttttggaaagtaaatgaaattcttcccctatatcttgtcctagaggaatattattttcaactattttgattatgtaatcaaaattatgtttgtctttaattgtctcaggaacatatagagtatcctgagggatttttggaatgttccagtcatccatattttggtttatatcaacgaatcggacttcctcatcgaagagattgtgttttggggcgacctcgtgggtctggttttcttgtttattgaaataattggtgttttggggagaattcattgtggatgaagaactagattagttagatctgaacgaaatacgggagaaagatcgaaaacggcgagacatatgtaaaacatcctctagcatcgaaaacggcgagacatatgaaattcttttagcctattagttgatttgagtcaaatcctgcatgttagttagtccataacatgttcatgcaaaattcttaaagagtctttgattgtgaaccttttcttgagcttttaagtttccttatgattgtgtctattgtgaatttgagttttggtgattgaattgctggctgaaattttgatcctaagtgaatattgaactcctaaaactgtggtaaacaagcctagtgagttcaacatacataggaaggttgaaagtaagcctaaggcaatcaatatacgatgcttaaagaattt

SEQ ID NO: 7241 - DNA, 1104 bp, Glycine max
  Gm_smallRNAprecursor_74
acagaaaaatagggaaacacaaagaagctagaagtcattttgaaaagataaccgtttgtttaaaaaatattattacttccaaaaataatagattttcaagcatggactaattcttcatacaagtgccttcaaattaatgatgaaaactaaaacttttcaattttctctattttagccacacacacatatgtaaacaaattgattcattcatcactaaagttctagcttgggatttgggagaaggtagccttttcacacgcgtaatataaacgaaggtaacgaaaatacaacctttacaaaacaagattggcaccagtgagttgaaaattctgaccttgcaaaaacaaactgtaaaaagagttttgttgttgttgttgtgtgtgtgtgtgcaaattgagagaaagatgaaaggaagagaaagccttaccataagggaatgcaagaaagatatgaaaacggagagaaagaaactgaaaggaatataaaaaaaaagttgggtgggggaatgaagcctggtccgagaatcttttcattttttgtgttaagagggtaaatttccattggaaactttcactcatctcagtactctcctcctactccatgacctcgagccagacaacattcctctcaacctcacctttgcaaggaaacatctcaagttctcaacgacacacatgacatgtgtgtgtagagagatccttcaaaataaagagagaacctaactagctatgtagctacacctatgatcttgtggtttgaagtttgaagtatcactactaaaaatattattttttacgacacggtattcacatcggtcataaaaaaccgtctttatttgtttaacagtggcaatattgtaaatattgttaacattttaaaaacggtttcaagaaaaccgccttgaaatgcttgaaaataaagacggtcttggaaacatcgtcttaaatggttattatttttatttaatttatggctttctcttttatcgggcagcgtacgtaagcccctttctctctcattctcgcattgtttctcgttgcttcaaattcttcatcgcggcgcagcgggagatgagggagctggcacctcaacttcttcacgtca

SEQ ID NO: 7242 - DNA, 1104 bp, Glycine max; identical to SEQ ID NO: 7241
  Gm_smallRNAprecursor_75

SEQ ID NO: 7243 - DNA, 1105 bp, Glycine max
  Gm_smallRNAprecursor_76
acagaaaaatagggaaacacaaagaagctagaagtcattttgaaaagataaccgtttgtttaaaaaatattattacttccaaaaataatagattttcaagcatggactaattcttcatacaagtgccttcaaattaatgatgaaaactaaaacttttcaattttctctattttagccacacacacatatgtaaacaaattgattcattcatcactaaagttctagcttgggatttgggagaaggtagccttttcacacgcgtaatataaacgaaggtaacgaaaatacaacctttacaaaacaagattggcaccagtgagttgaaaattctgaccttgcaaaaacaaactgtaaaaagagttttgttgttgttgttgtgtgtgtgtgtgcaaattgagagaaagatgaaaggaagagaaagccttaccataagggaatgcaagaaagatatgaaaacggagagaaagaaactgaaaggaatataaaaaaaaagttgggtgggggaatgaagcctggtccgagaatcttttcattttttgtgttaagagggtaaatttccattggaaactttcactcatctcagtactctcctcctactccatgacctcgagccagacaacattcctctcaacctcacctttgcaaggaaacatctcaagttctcaacgacacacatgacatgtgtgtgtagagagatccttcaaaataaagagagaacctaactagctatgtagctacacctatgatcttgtggtttgaagtttgaagtatcactactaaaaatattattttttacgacacggtattcacatcggtcataaaaaaccgtctttatttgtttaacagtggcaatattgtaaatattgttaacattttaaaaacggtttcaagaaaaccgccttgaaatgcttgaaaataaagacggtcttggaaacatcgtcttaaatggttattatttttatttaatttatggctttctcttttatcgggcagcgtacgtaagcccctttctctctcattctcgcattgtttctcgttgcttcaaattcttcatcgcggcgcagcgggagatgagggagctggcacctcaacttcttcacgtcac

SEQ ID NO: 7244 - DNA, 1105 bp, Glycine max; identical to SEQ ID NO: 7243
  Gm_smallRNAprecursor_77

SEQ ID NO: 7245 - DNA, 1106 bp, Glycine max
  Gm_smallRNAprecursor_78
acagaaaaatagggaaacacaaagaagctagaagtcattttgaaaagataaccgtttgtttaaaaaatattattacttccaaaaataatagattttcaagcatggactaattcttcatacaagtgccttcaaattaatgatgaaaactaaaacttttcaattttctctattttagccacacacacatatgtaaacaaattgattcattcatcactaaagttctagcttgggatttgggagaaggtagccttttcacacgcgtaatataaacgaaggtaacgaaaatacaacctttacaaaacaagattggcaccagtgagttgaaaattctgaccttgcaaaaacaaactgtaaaaagagttttgttgttgttgttgtgtgtgtgtgtgcaaattgagagaaagatgaaaggaagagaaagccttaccataagggaatgcaagaaagatatgaaaacggagagaaagaaactgaaaggaatataaaaaaaaagttgggtgggggaatgaagcctggtccgagaatcttttcattttttgtgttaagagggtaaatttccattggaaactttcactcatctcagtactctcctcctactccatgacctcgagccagacaacattcctctcaacctcacctttgcaaggaaacatctcaagttctcaacgacacacatgacatgtgtgtgtagagagatccttcaaaataaagagagaacctaactagctatgtagctacacctatgatcttgtggtttgaagtttgaagtatcactactaaaaatattattttttacgacacggtattcacatcggtcataaaaaaccgtctttatttgtttaacagtggcaatattgtaaatattgttaacattttaaaaacggtttcaagaaaaccgccttgaaatgcttgaaaataaagacggtcttggaaacatcgtcttaaatggttattatttttatttaatttatggctttctcttttatcgggcagcgtacgtaagcccctttctctctcattctcgcattgtttctcgttgcttcaaattcttcatcgcggcgcagcgggagatgagggagctggcacctcaacttcttcacgtcact

SEQ ID NO: 7246 - DNA, 1107 bp, Glycine max
  Gm_smallRNAprecursor_79
caaattaaacaaactaaggatggtatctttgtcaatcaatccaagtattgcaaagacttaatccacaaatttgacatggaaaatgctaagcacatggctacaccaatgaacactgcttgctatctagataaagatgaaaccggtcaatcaatagatgttaagcaatatcgaggtatgatcggatcacttcttcatttatctgctagcaggcctgatataatgtttagtgtgtgtatgcgtgctagattttaatcaaatcctaaacaatcacatcttagtgctgttaaaagaatcattagatatttggtaggcactacaaacataggtttatggtatcctagaaattccaaatgcacccgaattgtctgattcagactttgtcggttctaaaacagatagaaagagcactagtggaacttgtcaattcattggatctgctctagtttcttggcacagtaagaaacaaaatagtattgctttatccactgcagaagcggaatatattcctgccagccgttgttgtgctcaaatcttatggatgaagcaacaaccttctgattatggaatctttcttgaccttatacctattagatgtgataatacaagtgcaattaatctctccaagaatccagttcaacactctagaactaaacatatagaaattaggcaccattttcttagagatcatgttctaaagggagattgtgtattagagtttgttaatagtaagaatcaacttgctgatattttcacaaaacctctccccaaagaagcattcttctctattagaagggaattaggcctcttagatgttagtgatttagataaataaggattgattgattaatttacttatgattaattgtttatgttaagtatgttattttgattgattttgtttaaattcttgttattatgatagaatttatgaattcctgtgtgttttatatttgaatgcttgaattaagtgcattagtagtgataattaataatattagatgtatttagcatagacataggtaattttttttagaaactagcctagtttatgctctggtaatcgattaccatccagtgtaattgattacacaagaacaggaagcatgt

SEQ ID NO: 7247 - DNA, 1098 bp, Glycine max
  Gm_smallRNAprecursor_80
taaacaaactaaggatggtatctttgtcaatcaatccaagtattgcaaagacttaatccacaaatttgacatggaaaatgctaagcacatggctacaccaatgaacactgcttgctatctagataaagatgaaaccggtcaatcaatagatgttaagcaatatcgaggtatgatcggatcacttcttcatttatctgctagcaggcctgatataatgtttagtgtgtgtatgcgtgctagattttaatcaaatcctaaacaatcacatcttagtgctgttaaaagaatcattagatatttggtaggcactacaaacataggtttatggtatcctagaaattccaaatgcacccgaattgtctgattcagactttgtcggttctaaaacagatagaaagagcactagtggaacttgtcaattcattggatctgctctagtttcttggcacagtaagaaacaaaatagtattgctttatccactgcagaagcggaatatattcctgccagccgttgttgtgctcaaatcttatggatgaagcaacaaccttctgattatggaatctttcttgaccttatacctattagatgtgataatacaagtgcaattaatctctccaagaatccagttcaacactctagaactaaacatatagaaattaggcaccattttcttagagatcatgttctaaagggagattgtgtattagagtttgttaatagtaagaatcaacttgctgatattttcacaaaacctctccccaaagaagcattcttctctattagaagggaattaggcctcttagatgttagtgatttagataaataaggattgattgattaatttacttatgattaattgtttatgttaagtatgttattttgattgattttgtttaaattcttgttattatgatagaatttatgaattcctgtgtgttttatatttgaatgcttgaattaagtgcattagtagtgataattaataatattagatgtatttagcatagacataggtaattttttttagaaactagcctagtttatgctctggtaatcgattaccatccagtgtaattgattacacaagaacaggaagc

SEQ ID NO: 7248 - DNA, 1137 bp, Glycine max
  Gm_smallRNAprecursor_81
gtaatcgattaccagaaggcttattagtcctgtaatcgattaccaagccttgtaatcgattacaactcgtcctcgtctataaatacccacgaaacctgtgttgctgcacagccaagacctttcctcgtgcctcctccatccctaaatcttcaaactttcgtatcttactcaaatcttcaccaaaacacgtctcgtaaagcccaatcttcctctttttcactcctctttcacttccaccgattgaaatccactaaaacttcatcaaatggcagaaccatcgaagaagagaaagggatcatcctccaccgccgccgctcatcgccgccacggactatccgaagcacccacaacacctattcatccctctttgtcatctccaagatcatccacgttgttttcatccgatgatcagcgtctacggtacctttctcaattttcttctaggatcatcttagaccctaagtacctagacgtagatttctttaatgataaaacgtttgattgctatcaagtgtttcagaattctggcctggttgatttcatgtcattaaaattgtcacattatcctaaacttgtaaaggtcttctgctgcaatttaaaaattcaggatgacattatttcctctgaggtgcatggtattcctatgatcattgatcagtcattgttcttttctttaactcatttacccagtcaaggtgcaccttttgagggcaccattgttgatgactggaaatttgattattctagtcatgatgctcgccgtatggtctgcaatgacgaggttgaaatgaccagtagattgctggtcgggtcattaacatttgataatcgcatcatgcactatataattgttagaattttgcttccccggtcttcaaatttggcccaagcctctgaggaggatttgattctgatgtgggtttttcttaccggtcgtcagatcgactgggcccacttggtttggtaccgaatgcttaaggcattacaggccaatgcacctctcccttaccctcaattgataacttctttctgcgtcattttcaaatttcacttgatgatgaaccatttgttcaagtcaagcgttcctttgcaattggtgctggtgcagtgacttcctttggataccgtaaggatcgg

SEQ ID NO: 7249 - DNA, 1035 bp, Glycine max
  Gm_smallRNAprecursor_82
ttgattctgatgtgggtttttcttaccggtcgtcagatcgactgggcccacttggtttggtaccgaatgcttaaggcattacaggccaatgcacctctcccttaccctcaattgataacttctttctgcgtcattttcaaatttcacttgatgatgaaccatttgttcaagtcaagcgttcctttgcaattggtgctggtgcagtgacttcctttggataccgtaaggatcggaatggtcaatggctgaagaaagacgcactccctcctcaagatgagcgtactccttcacctcctcctcagcgagatgattcagcactcatgactgaagttctttccgaattacgggatcttcgttcttatgttggtgaatgtttcgactcattggatacatgttttgccggcatggatattcgcctcacacaacatgaagaggatgtgggttacattcgtcagagtttcgctcttccaccaccacctctaccttcttaaaatttagtttctaattctatgtctcttataagccgtgtattttggttatgctacttagattattatgttcagtactttatttatcttgtagtatttggatttcagacttttatgctttgatactatgtggtttttgaattttgaactgtttggattctggtttggttatgtcttatttatgagtttggttggttatgccttatactttgtaattactctgtttccacttcattattatatctgtgataattcccaaacactttggctttttgatgttgccaaagggggagaaaaatggggtgtataaaggcttagaaaaagcttagaaatcaagtgatcatcaattccaaaacatagggggagtgaacgcaaattttatatatatacattgcttgcttgtatcttgatttcaggacttatattgtcatcataaaaaagggagagattgtagaagcaaatgactttggtgttttgatgatgatcatgatgatttgatgcaaatgggcttttcaagtttaaattcaagactatggtccaagaatac

SEQ ID NO: 7250 - DNA, 1141 bp, Glycine max
  Gm_smallRNAprecursor_83
aacttcagtcatgagtgctaaatcatctagctgagaaagaggtgaaggagtacgctcatcttgaggagggagtgcgtctttcttcagccattgaccattccgatccttacggtatccaaaggaagtcactgcaccagcaccaattgcaaaggaacgcttgacttgaacaaatggttcatcatcaagcggaatttaaaaatgccgcagaaacaaagttatcaattgagggtaagggagaggtgcattggtcggtaatgtcttaagcattcagtaccgaaccaagtgggcccagtcgatctgacgaccggtaagaaaaacccacatcagaatcaaatcctcctcaaaggcttgggccaaatttgaagaccggggaagcaaaattctaacaattatatagtgcatgatgcgattatcaaatgctaatgacccggccagcaatctaccggtcatttcaacctggtcattgcagaccatacgacgagcatcatgactagaataatcaaatttccaatcatcagcaatggtgccctctaaaggtgcaccttgactgggtaaatgagttaaagaaaagaacaatgactgatgaatgatcataggaataccatgcacctcagaagaaataatgttatcctgaatttttaaattgcagcagaagacctttacaagtttaggataatgtgacaattttaatgacatgaaatcaaccaggccagaattctgaaacacttgatagcaatcaaacgttttatcattaaagaaatctacgtctaggtacttagggtctaagatgatcctagaagaaaattgagaaaggtaccgtagacgctgatcatcggatgaaaacaacgtggatgatcttggagatgacaaagagggatgaataggtgttgtgggtgcttcggatggtccgtggcggcgatgggcagcaacggtggaggatgatccctttctcttcttcgatggttatgtcatttgatgaagttttagtggatttcaatcggtggaagtgaaagaggagtgaaaaagaggaagattgggctttacgagacgtgttttggtgaagatttgagtaagatacgaaagtttgaagatttagggatggaggaggcacgaggaaaggccttggctgtgcagcaacaca

SEQ ID NO: 7251 - DNA, 1141 bp, Glycine max; identical to SEQ ID NO: 7250
  Gm_smallRNAprecursor_84

SEQ ID NO: 7252 - DNA, 1165 bp, Glycine max
  Gm_smallRNAprecursor_85
aacttcagtcatgagtgctaaatcatctagctgagaaagaggtgaaggagtacgctcatcttgaggagggagtgcgtctttcttcagccattgaccattccgatccttacggtatccaaaggaagtcactgcaccagcaccaattgcaaaggaacgcttgacttgaacaaatggttcatcatcaagcggaatttaaaaatgccgcagaaacaaagttatcaattgagggtaagggagaggtgcattggtcggtaatgtcttaagcattcagtaccgaaccaagtgggcccagtcgatctgacgaccggtaagaaaaacccacatcagaatcaaatcctcctcaaaggcttgggccaaatttgaagaccggggaagcaaaattctaacaattatatagtgcatgatgcgattatcaaatgctaatgacccggccagcaatctaccggtcatttcaacctggtcattgcagaccatacgacgagcatcatgactagaataatcaaatttccaatcatcagcaatggtgccctctaaaggtgcaccttgactgggtaaatgagttaaagaaaagaacaatgactgatgaatgatcataggaataccatgcacctcagaagaaataatgttatcctgaatttttaaattgcagcagaagacctttacaagtttaggataatgtgacaattttaatgacatgaaatcaaccaggccagaattctgaaacacttgatagcaatcaaacgttttatcattaaagaaatctacgtctaggtacttagggtctaagatgatcctagaagaaaattgagaaaggtaccgtagacgctgatcatcggatgaaaacaacgtggatgatcttggagatgacaaagagggatgaataggtgttgtgggtgcttcggatggtccgtggcggcgatgggcagcaacggtggaggatgatccctttctcttcttcgatggttatgtcatttgatgaagttttagtggatttcaatcggtggaagtgaaagaggagtgaaaaagaggaagattgggctttacgagacgtgttttggtgaagatttgagtaagatacgaaagtttgaagatttagggatggaggaggcacgaggaaaggccttggctgtgcagcaacacaggtttcgtgggtatttatagacga

SEQ ID NO: 7253 - DNA, 1061 bp, Glycine max
  Gm_smallRNAprecursor_86
tgaaaacaacgtggatgatcttggagatgacaaagagggatgaataggtgttgtgggtgcttcggatggtccgtggcggcgatgggcagcaacggtggaggatgatccctttctcttcttcgatggttatgtcatttgatgaagttttagtggatttcaatcggtggaagtgaaagaggagtgaaaaagaggaagattgggctttacgagacgtgttttggtgaagatttgagtaagatacgaaagtttgaagatttagggatggaggaggcacgaggaaaggccttggctgtgcagcaacacaggtttcgtgggtatttatagacgaggacgagttgtaatcgattacaaggcttggtaatcgattacaggactaataagccttctggtaatcgattacaggatgttgtaatcaattacatgcttcctgttcttgtgtaatcaattacactggatggtaatcgattaccagagcataaactaggctagtttctaaaaaaaattacctatgtctatgctaaatacatctaatattattaattatcactactaatgcacttaattcaagcattcaaatataaaacacacaggaattcataaattctatcataataacaagaatttaaacaaaatcaatcaaaataacatacttaacataaacaattaatcataagagtaaattaatcaatcaatccttatttatctaaatcactaacatctaagagacctaattcccttctaatagagaagaatgcttctttggggagaggttttgtgaaaatatcagcaagttgattattagtatcaacaaactctaatacacaatctccctttagaacatgatctctaagaaaatggtgcctaatttatatatgtttagttctagagtgttgaactggatttttggagagattaattgcacttgtattatcacatctaataggtatatggttaagaaggattccataatcaaacagttgttgcttcatccataagatttaagcacaacaactgctggcagaaatatattccgcttctgcagtggataaagcaacactatt

SEQ ID NO: 7254 - DNA, 1183 bp, Glycine max
  Gm_smallRNAprecursor_87
acttagacgctcataccaagccctaggggcttgtttcaagccatataaagcctttttcaatttataaacatgatttgccttatccaatatttcaaaacctggtggttgtataacatatatttcttcttgaattaagccatttagaaaagcacttttaacatccatttgataaagcttaaaattcattatggatgcatatgctaagagcattctaatggcttctaatctaacaactggagcatatgtttcctcatcatttataccttcttcttgattatatccttttgcaactaatctagccttatttctaatgattattccatgttcatctaacttatttctaaatacccattttgttcttatgatgggataatttttaggtctctctacaagttcccacacattgtttctttcaaattgattcagttcttcttgcatgacaataatccagttatcatctactatggcttcttttatatttttaggtttaatcatagatacaaaagtcatattattgcataaatctttaaaagaatgtctagttgttaccccttttgagatatcaccaataatgttgtcaaggggatgatcttttgaagctttccattcttttggaagttcatcattggatttgacttcttctggaggatcttcattgcttcctttacattttcctttagaatcttgtccatgaatatgcatttgttctaaagattctgcaatatcatcttgcatattctttcttgacaagataacattagattcatcaaaagtaacatgaatagattcctcaatattcatagttcttttattatatattctatatgctttgctttgtaatgaatatgcaagaaagatgtcttcatcagattttgcatcaaattttcctagattatctttaccattattaagcacaaaacatttgcaacaaaaaacatgtagatgtgaaatgttggattttctaccattatataattcatatggggttttctttaaaatgggtcttattaatgccctattcatgatgtaacatgcagtattgacggcttcagcccaaaaatattttggaagaaaaatatcatttaataaagttctagcaatttcttccaatgacctattttttctctcaacaactccattttgttgaggggttctaggtgcagaaaaattgtgttcaatacca

SEQ ID NO: 7255 - DNA, 1080 bp, Glycine max
  Gm_smallRNAprecursor_88
atgatttcgttttagaaacaatggccctatttgacacaggggctgattcaaactgcattttagaaggattaattcctacaaaattctttgagaaaacctcagaaaaattaagtacagcaaacggctcaaaattaaaaattaattttaaactatcaaatgcaatcattgaaaaccaaggtcttaggattaacacaaactttcttctggtaaaaaaccttaagaatgaagtaatcttaggaacacccttcattagagccctgtttcccatccaaatatctaatgaaggaataaccacaaattatttaggaagaaaaattatatttaatttttctactaaaccaatttccagaaatataaattttatagaaaataagattaatcaaattaacttcttaaaagaagaagtatcttttaataatattcagatacaactaggaaaaccccaagtaaaagaaaaaattcaatctttattaaatcatattgaatcaactgtctgctctgaattgccacatgcattttgggacagaaagaaacatattgttgatctcccctacgagaaggactttagggaaaaacaaattcccacaaaagccagaccaatccaaatgaatgaagaactccttcaatactgtcaaaaggaaatcaaggatttacttgataaaggcctaatccggaaaagcaaaagcccatggtcttgtgcggctttttatgtcaacaaacaatctgagattgagcgtggaacaccccgcttagtcataaattacaaaccactaaatcaagcattacaatggattagatatcctattccaaacaaaaaagatttgcttaacagattaaattctgcaaagatattttcaaaatttgatatgaaatctggattttggcaaatccaaatccaagaatcagataggtacaaaacagcattcactgtacctttcgggcaatatgaatggaatgtaatgccattcggactgaagaatgccccttcagaatttcaaaaaattatgaatgatattttcaatccctattcaaaatttgttattgtctacatagatgatgttttaatcttttcccaaaaca

SEQ ID NO: 7256 - DNA, 1049 bp, Glycine max
  Gm_smallRNAprecursor_89
caatgttttacaaatggaaccagaatactgggacaagaatcctttcaaagcaaccgccaaagcattccccccgggattccattacaagccaatagccacaaacaaaacccgcaaattctacgaattcatcctaatagatacaaactcagtatctattaaacacttcaaagaccccaaagatccaaatctaaatacccattccacaatccaaatcttgaaggtgatgcagccacggcattatggctcaaacttaaaccaacccaaaaaattctctgcaccatttgaccctacaggatataattattgggattacattgacgcctggaccaatgtgttctggcatcaaaatagtaaattcaagcattcatggctgatttacttcaaaaataatactgcatataattttccaaattggttcctccaatggtggaactacttcggaccaattccacaaatatttccagaagaagtccaacagggattcgaacaattcaacaagctctataatagcaaggaatcacgtattccggcagacttaaagtacttttccagttttgccttgtcatggatcttttcatggcaatacagatacggaaaaactgaaaacaacaagcaatatccaccattacagagacacgcctttgtaaaatggtggtcacaattcgatacctcaaaggctgctccagatcaagtcaagaactggttccagagcaatcctgagttccttaaacctgctgatccagagacatctttgtttctaaatcagaagtcgcaactggcagcattcttagcaagctcaaaatctaaagagagtcttgctcagaatctcaaagaagttctccaactacttcaacaggaagtggaagaagaaccttccaagaaggaagctgaatcatccgagactaatgatgaccaagaagatgatccattctaccagaatgaagatgactgttttggtatatcattggacgacgattaattagttgtagtaatcatgaattattgtgactaatttaaataatgtaatttgtaaaagttttgtaacagtt

SEQ ID NO: 7257 - DNA, 1131 bp, Glycine max
  Gm_smallRNAprecursor_90
caatgttttacaaatggaaccagaatactgggacaagaatcctttcaaagcaaccgccaaagcattccccccgggattccattacaagccaatagccacaaacaaaacccgcaaattctacgaattcatcctaatagatacaaactcagtatctattaaacacttcaaagaccccaaagatccaaatctaaatacccattccacaatccaaatcttgaaggtgatgcagccacggcattatggctcaaacttaaaccaacccaaaaaattctctgcaccatttgaccctacaggatataattattgggattacattgacgcctggaccaatgtgttctggcatcaaaatagtaaattcaagcattcatggctgatttacttcaaaaataatactgcatataattttccaaattggttcctccaatggtggaactacttcggaccaattccacaaatatttccagaagaagtccaacagggattcgaacaattcaacaagctctataatagcaaggaatcacgtattccggcagacttaaagtacttttccagttttgccttgtcatggatcttttcatggcaatacagatacggaaaaactgaaaacaacaagcaatatccaccattacagagacacgcctttgtaaaatggtggtcacaattcgatacctcaaaggctgctccagatcaagtcaagaactggttccagagcaatcctgagttccttaaacctgctgatccagagacatctttgtttctaaatcagaagtcgcaactggcagcattcttagcaagctcaaaatctaaagagagtcttgctcagaatctcaaagaagttctccaactacttcaacaggaagtggaagaagaaccttccaagaaggaagctgaatcatccgagactaatgatgaccaagaagatgatccattctaccagaatgaagatgactgttttggtatatcattggacgacgattaattagttgtagtaatcatgaattattgtgactaatttaaataatgtaatttgtaaaagttttgtaacagttccggtaaacattaccgttaaacattaccgttactgtagaaacagtaaaaattgggtctatttaaaggagtcctcgtcccctt

SEQ ID NO: 7258 - DNA, 1131 bp, Glycine max; identical to SEQ ID NO: 7257
  Gm_smallRNAprecursor_91

SEQ ID NO: 7259 - DNA, 1086 bp, Glycine max
  Gm_smallRNAprecursor_92
caaagcaaccgccaaagcattccccccgggattccattacaagccaatagccacaaacaaaacccgcaaattctacgaattcatcctaatagatacaaactcagtatctattaaacacttcaaagaccccaaagatccaaatctaaatacccattccacaatccaaatcttgaaggtgatgcagccacggcattatggctcaaacttaaaccaacccaaaaaattctctgcaccatttgaccctacaggatataattattgggattacattgacgcctggaccaatgtgttctggcatcaaaatagtaaattcaagcattcatggctgatttacttcaaaaataatactgcatataattttccaaattggttcctccaatggtggaactacttcggaccaattccacaaatatttccagaagaagtccaacagggattcgaacaattcaacaagctctataatagcaaggaatcacgtattccggcagacttaaagtacttttccagttttgccttgtcatggatcttttcatggcaatacagatacggaaaaactgaaaacaacaagcaatatccaccattacagagacacgcctttgtaaaatggtggtcacaattcgatacctcaaaggctgctccagatcaagtcaagaactggttccagagcaatcctgagttccttaaacctgctgatccagagacatctttgtttctaaatcagaagtcgcaactggcagcattcttagcaagctcaaaatctaaagagagtcttgctcagaatctcaaagaagttctccaactacttcaacaggaagtggaagaagaaccttccaagaaggaagctgaatcatccgagactaatgatgaccaagaagatgatccattctaccagaatgaagatgactgttttggtatatcattggacgacgattaattagttgtagtaatcatgaattattgtgactaatttaaataatgtaatttgtaaaagttttgtaacagttccggtaaacattaccgttaaacattaccgttactgtagaaacagtaaaaattgggtctatttaaaggagtcctcgtcccctt

SEQ ID NO: 7260 - DNA, 1086 bp, Glycine max; identical to SEQ ID NO: 7259
  Gm_smallRNAprecursor_93

SEQ ID NO: 7261 - DNA, 1085 bp, Glycine max
  Gm_smallRNAprecursor_94
aaagcaaccgccaaagcattccccccgggattccattacaagccaatagccacaaacaaaacccgcaaattctacgaattcatcctaatagatacaaactcagtatctattaaacacttcaaagaccccaaagatccaaatctaaatacccattccacaatccaaatcttgaaggtgatgcagccacggcattatggctcaaacttaaaccaacccaaaaaattctctgcaccatttgaccctacaggatataattattgggattacattgacgcctggaccaatgtgttctggcatcaaaatagtaaattcaagcattcatggctgatttacttcaaaaataatactgcatataattttccaaattggttcctccaatggtggaactacttcggaccaattccacaaatatttccagaagaagtccaacagggattcgaacaattcaacaagctctataatagcaaggaatcacgtattccggcagacttaaagtacttttccagttttgccttgtcatggatcttttcatggcaatacagatacggaaaaactgaaaacaacaagcaatatccaccattacagagacacgcctttgtaaaatggtggtcacaattcgatacctcaaaggctgctccagatcaagtcaagaactggttccagagcaatcctgagttccttaaacctgctgatccagagacatctttgtttctaaatcagaagtcgcaactggcagcattcttagcaagctcaaaatctaaagagagtcttgctcagaatctcaaagaagttctccaactacttcaacaggaagtggaagaagaaccttccaagaaggaagctgaatcatccgagactaatgatgaccaagaagatgatccattctaccagaatgaagatgactgttttggtatatcattggacgacgattaattagttgtagtaatcatgaattattgtgactaatttaaataatgtaatttgtaaaagttttgtaacagttccggtaaacattaccgttaaacattaccgttactgtagaaacagtaaaaattgggtctatttaaaggagtcctcgtcccctt

SEQ ID NO: 7262 - DNA, 1085 bp, Glycine max; identical to SEQ ID NO: 7261
  Gm_smallRNAprecursor_95

SEQ ID NO: 7263 - DNA, 1149 bp, Glycine max
  Gm_smallRNAprecursor_96
agcaaccgccaaagcattccccccgggattccattacaagccaatagccacaaacaaaacccgcaaattctacgaattcatcctaatagatacaaactcagtatctattaaacacttcaaagaccccaaagatccaaatctaaatacccattccacaatccaaatcttgaaggtgatgcagccacggcattatggctcaaacttaaaccaacccaaaaaattctctgcaccatttgaccctacaggatataattattgggattacattgacgcctggaccaatgtgttctggcatcaaaatagtaaattcaagcattcatggctgatttacttcaaaaataatactgcatataattttccaaattggttcctccaatggtggaactacttcggaccaattccacaaatatttccagaagaagtccaacagggattcgaacaattcaacaagctctataatagcaaggaatcacgtattccggcagacttaaagtacttttccagttttgccttgtcatggatcttttcatggcaatacagatacggaaaaactgaaaacaacaagcaatatccaccattacagagacacgcctttgtaaaatggtggtcacaattcgatacctcaaaggctgctccagatcaagtcaagaactggttccagagcaatcctgagttccttaaacctgctgatccagagacatctttgtttctaaatcagaagtcgcaactggcagcattcttagcaagctcaaaatctaaagagagtcttgctcagaatctcaaagaagttctccaactacttcaacaggaagtggaagaagaaccttccaagaaggaagctgaatcatccgagactaatgatgaccaagaagatgatccattctaccagaatgaagatgactgttttggtatatcattggacgacgattaattagttgtagtaatcatgaattattgtgactaatttaaataatgtaatttgtaaaagttttgtaacagttccggtaaacattaccgttaaacattaccgttactgtagaaacagtaaaaattgggtctatttaaaggagtcctcgtcccctttgtgaggcaccctttcagatagtcccagaatcaggtttttagagagagaagctctgcctagggaaa

SEQ ID NO: 7264 - DNA, 1165 bp, Glycine max
  Gm_smallRNAprecursor_97
ctaatagatacaaactcagtatctattaaacacttcaaagaccccaaagatccaaatctaaatacccattccacaatccaaatcttgaaggtgatgcagccacggcattatggctcaaacttaaaccaacccaaaaaattctctgcaccatttgaccctacaggatataattattgggattacattgacgcctggaccaatgtgttctggcatcaaaatagtaaattcaagcattcatggctgatttacttcaaaaataatactgcatataattttccaaattggttcctccaatggtggaactacttcggaccaattccacaaatatttccagaagaagtccaacagggattcgaacaattcaacaagctctataatagcaaggaatcacgtattccggcagacttaaagtacttttccagttttgccttgtcatggatcttttcatggcaatacagatacggaaaaactgaaaacaacaagcaatatccaccattacagagacacgcctttgtaaaatggtggtcacaattcgatacctcaaaggctgctccagatcaagtcaagaactggttccagagcaatcctgagttccttaaacctgctgatccagagacatctttgtttctaaatcagaagtcgcaactggcagcattcttagcaagctcaaaatctaaagagagtcttgctcagaatctcaaagaagttctccaactacttcaacaggaagtggaagaagaaccttccaagaaggaagctgaatcatccgagactaatgatgaccaagaagatgatccattctaccagaatgaagatgactgttttggtatatcattggacgacgattaattagttgtagtaatcatgaattattgtgactaatttaaataatgtaatttgtaaaagttttgtaacagttccggtaaacattaccgttaaacattaccgttactgtagaaacagtaaaaattgggtctatttaaaggagtcctcgtcccctttgtgaggcaccctttcagatagtcccagaatcaggtttttagagagagaagctctgcctagggaaaaactctttgtatgcttttctttcagttttaataaatttctcccttctcccctcactgatcctgtgcggctctgccgccgcttcggtttctttgttttc

SEQ ID NO: 7265 - DNA, 1086 bp, Glycine max
  Gm_smallRNAprecursor_98
taaatacccattccacaatccaaatcttgaaggtgatgcagccacggcattatggctcaaacttaaaccaacccaaaaaattctctgcaccatttgaccctacaggatataattattgggattacattgacgcctggaccaatgtgttctggcatcaaaatagtaaattcaagcattcatggctgatttacttcaaaaataatactgcatataattttccaaattggttcctccaatggtggaactacttcggaccaattccacaaatatttccagaagaagtccaacagggattcgaacaattcaacaagctctataatagcaaggaatcacgtattccggcagacttaaagtacttttccagttttgccttgtcatggatcttttcatggcaatacagatacggaaaaactgaaaacaacaagcaatatccaccattacagagacacgcctttgtaaaatggtggtcacaattcgatacctcaaaggctgctccagatcaagtcaagaactggttccagagcaatcctgagttccttaaacctgctgatccagagacatctttgtttctaaatcagaagtcgcaactggcagcattcttagcaagctcaaaatctaaagagagtcttgctcagaatctcaaagaagttctccaactacttcaacaggaagtggaagaagaaccttccaagaaggaagctgaatcatccgagactaatgatgaccaagaagatgatccattctaccagaatgaagatgactgttttggtatatcattggacgacgattaattagttgtagtaatcatgaattattgtgactaatttaaataatgtaatttgtaaaagttttgtaacagttccggtaaacattaccgttaaacattaccgttactgtagaaacagtaaaaattgggtctatttaaaggagtcctcgtcccctttgtgaggcaccctttcagatagtcccagaatcaggtttttagagagagaagctctgcctagggaaaaactctttgtatgcttttctttcagttttaataaatttctcccttctcccctcactgatcctgtgcggctctgccgc

SEQ ID NO: 7266 - DNA, 1137 bp, Glycine max
  Gm_smallRNAprecursor_99
taaatacccattccacaatccaaatcttgaaggtgatgcagccacggcattatggctcaaacttaaaccaacccaaaaaattctctgcaccatttgaccctacaggatataattattgggattacattgacgcctggaccaatgtgttctggcatcaaaatagtaaattcaagcattcatggctgatttacttcaaaaataatactgcatataattttccaaattggttcctccaatggtggaactacttcggaccaattccacaaatatttccagaagaagtccaacagggattcgaacaattcaacaagctctataatagcaaggaatcacgtattccggcagacttaaagtacttttccagttttgccttgtcatggatcttttcatggcaatacagatacggaaaaactgaaaacaacaagcaatatccaccattacagagacacgcctttgtaaaatggtggtcacaattcgatacctcaaaggctgctccagatcaagtcaagaactggttccagagcaatcctgagttccttaaacctgctgatccagagacatctttgtttctaaatcagaagtcgcaactggcagcattcttagcaagctcaaaatctaaagagagtcttgctcagaatctcaaagaagttctccaactacttcaacaggaagtggaagaagaaccttccaagaaggaagctgaatcatccgagactaatgatgaccaagaagatgatccattctaccagaatgaagatgactgttttggtatatcattggacgacgattaattagttgtagtaatcatgaattattgtgactaatttaaataatgtaatttgtaaaagttttgtaacagttccggtaaacattaccgttaaacattaccgttactgtagaaacagtaaaaattgggtctatttaaaggagtcctcgtcccctttgtgaggcaccctttcagatagtcccagaatcaggtttttagagagagaagctctgcctagggaaaaactctttgtatgcttttctttcagttttaataaatttctcccttctcccctcactgatcctgtgcggctctgccgccgcttcggtttctttgttttcaaaaacctgggtttgtaagccgtttcggtg

SEQ ID NO: 7267 - DNA, 1121 bp, Glycine max
  Gm_smallRNAprecursor_100
cattccacaatccaaatcttgaaggtgatgcagccacggcattatggctcaaacttaaaccaacccaaaaaattctctgcaccatttgaccctacaggatataattattgggattacattgacgcctggaccaatgtgttctggcatcaaaatagtaaattcaagcattcatggctgatttacttcaaaaataatactgcatataattttccaaattggttcctccaatggtggaactacttcggaccaattccacaaatatttccagaagaagtccaacagggattcgaacaattcaacaagctctataatagcaaggaatcacgtattccggcagacttaaagtacttttccagttttgccttgtcatggatcttttcatggcaatacagatacggaaaaactgaaaacaacaagcaatatccaccattacagagacacgcctttgtaaaatggtggtcacaattcgatacctcaaaggctgctccagatcaagtcaagaactggttccagagcaatcctgagttccttaaacctgctgatccagagacatctttgtttctaaatcagaagtcgcaactggcagcattcttagcaagctcaaaatctaaagagagtcttgctcagaatctcaaagaagttctccaactacttcaacaggaagtggaagaagaaccttccaagaaggaagctgaatcatccgagactaatgatgaccaagaagatgatccattctaccagaatgaagatgactgttttggtatatcattggacgacgattaattagttgtagtaatcatgaattattgtgactaatttaaataatgtaatttgtaaaagttttgtaacagttccggtaaacattaccgttaaacattaccgttactgtagaaacagtaaaaattgggtctatttaaaggagtcctcgtcccctttgtgaggcaccctttcagatagtcccagaatcaggtttttagagagagaagctctgcctagggaaaaactctttgtatgcttttctttcagttttaataaatttctcccttctcccctcactgatcctgtgcggctctgccgccgcttcggtttctttgttttcaaaaacctgggtttgtaagccg

SEQ ID NO: 7268 - DNA, 1048 bp, Glycine max
  Gm_smallRNAprecursor_101
attccacaatccaaatcttgaaggtgatgcagccacggcattatggctcaaacttaaaccaacccaaaaaattctctgcaccatttgaccctacaggatataattattgggattacattgacgcctggaccaatgtgttctggcatcaaaatagtaaattcaagcattcatggctgatttacttcaaaaataatactgcatataattttccaaattggttcctccaatggtggaactacttcggaccaattccacaaatatttccagaagaagtccaacagggattcgaacaattcaacaagctctataatagcaaggaatcacgtattccggcagacttaaagtacttttccagttttgccttgtcatggatcttttcatggcaatacagatacggaaaaactgaaaacaacaagcaatatccaccattacagagacacgcctttgtaaaatggtggtcacaattcgatacctcaaaggctgctccagatcaagtcaagaactggttccagagcaatcctgagttccttaaacctgctgatccagagacatctttgtttctaaatcagaagtcgcaactggcagcattcttagcaagctcaaaatctaaagagagtcttgctcagaatctcaaagaagttctccaactacttcaacaggaagtggaagaagaaccttccaagaaggaagctgaatcatccgagactaatgatgaccaagaagatgatccattctaccagaatgaagatgactgttttggtatatcattggacgacgattaattagttgtagtaatcatgaattattgtgactaatttaaataatgtaatttgtaaaagttttgtaacagttccggtaaacattaccgttaaacattaccgttactgtagaaacagtaaaaattgggtctatttaaaggagtcctcgtcccctttgtgaggcaccctttcagatagtcccagaatcaggtttttagagagagaagctctgcctagggaaaaactctttgtatgcttttctttcagttttaataaatttctcccttctc

SEQ ID NO: 7269 - DNA, 1048 bp, Glycine max; identical to SEQ ID NO: 7268
  Gm_smallRNAprecursor_102

SEQ ID NO: 7270 - DNA, 1080 bp, Glycine max
  Gm_smallRNAprecursor_103
attccacaatccaaatcttgaaggtgatgcagccacggcattatggctcaaacttaaaccaacccaaaaaattctctgcaccatttgaccctacaggatataattattgggattacattgacgcctggaccaatgtgttctggcatcaaaatagtaaattcaagcattcatggctgatttacttcaaaaataatactgcatataattttccaaattggttcctccaatggtggaactacttcggaccaattccacaaatatttccagaagaagtccaacagggattcgaacaattcaacaagctctataatagcaaggaatcacgtattccggcagacttaaagtacttttccagttttgccttgtcatggatcttttcatggcaatacagatacggaaaaactgaaaacaacaagcaatatccaccattacagagacacgcctttgtaaaatggtggtcacaattcgatacctcaaaggctgctccagatcaagtcaagaactggttccagagcaatcctgagttccttaaacctgctgatccagagacatctttgtttctaaatcagaagtcgcaactggcagcattcttagcaagctcaaaatctaaagagagtcttgctcagaatctcaaagaagttctccaactacttcaacaggaagtggaagaagaaccttccaagaaggaagctgaatcatccgagactaatgatgaccaagaagatgatccattctaccagaatgaagatgactgttttggtatatcattggacgacgattaattagttgtagtaatcatgaattattgtgactaatttaaataatgtaatttgtaaaagttttgtaacagttccggtaaacattaccgttaaacattaccgttactgtagaaacagtaaaaattgggtctatttaaaggagtcctcgtcccctttgtgaggcaccctttcagatagtcccagaatcaggtttttagagagagaagctctgcctagggaaaaactctttgtatgcttttctttcagttttaataaatttctcccttctcccctcactgatcctgtgcggctctgccgccgc

SEQ ID NO: 7271 - DNA, 1098 bp, Glycine max
  Gm_smallRNAprecursor_104
attccacaatccaaatcttgaaggtgatgcagccacggcattatggctcaaacttaaaccaacccaaaaaattctctgcaccatttgaccctacaggatataattattgggattacattgacgcctggaccaatgtgttctggcatcaaaatagtaaattcaagcattcatggctgatttacttcaaaaataatactgcatataattttccaaattggttcctccaatggtggaactacttcggaccaattccacaaatatttccagaagaagtccaacagggattcgaacaattcaacaagctctataatagcaaggaatcacgtattccggcagacttaaagtacttttccagttttgccttgtcatggatcttttcatggcaatacagatacggaaaaactgaaaacaacaagcaatatccaccattacagagacacgcctttgtaaaatggtggtcacaattcgatacctcaaaggctgctccagatcaagtcaagaactggttccagagcaatcctgagttccttaaacctgctgatccagagacatctttgtttctaaatcagaagtcgcaactggcagcattcttagcaagctcaaaatctaaagagagtcttgctcagaatctcaaagaagttctccaactacttcaacaggaagtggaagaagaaccttccaagaaggaagctgaatcatccgagactaatgatgaccaagaagatgatccattctaccagaatgaagatgactgttttggtatatcattggacgacgattaattagttgtagtaatcatgaattattgtgactaatttaaataatgtaatttgtaaaagttttgtaacagttccggtaaacattaccgttaaacattaccgttactgtagaaacagtaaaaattgggtctatttaaaggagtcctcgtcccctttgtgaggcaccctttcagatagtcccagaatcaggtttttagagagagaagctctgcctagggaaaaactctttgtatgcttttctttcagttttaataaatttctcccttctcccctcactgatcctgtgcggctctgccgccgcttcggtttctttgttttc

SEQ ID NO: 7272 - DNA, 1120 bp, Glycine max
  Gm_smallRNAprecursor_105
attccacaatccaaatcttgaaggtgatgcagccacggcattatggctcaaacttaaaccaacccaaaaaattctctgcaccatttgaccctacaggatataattattgggattacattgacgcctggaccaatgtgttctggcatcaaaatagtaaattcaagcattcatggctgatttacttcaaaaataatactgcatataattttccaaattggttcctccaatggtggaactacttcggaccaattccacaaatatttccagaagaagtccaacagggattcgaacaattcaacaagctctataatagcaaggaatcacgtattccggcagacttaaagtacttttccagttttgccttgtcatggatcttttcatggcaatacagatacggaaaaactgaaaacaacaagcaatatccaccattacagagacacgcctttgtaaaatggtggtcacaattcgatacctcaaaggctgctccagatcaagtcaagaactggttccagagcaatcctgagttccttaaacctgctgatccagagacatctttgtttctaaatcagaagtcgcaactggcagcattcttagcaagctcaaaatctaaagagagtcttgctcagaatctcaaagaagttctccaactacttcaacaggaagtggaagaagaaccttccaagaaggaagctgaatcatccgagactaatgatgaccaagaagatgatccattctaccagaatgaagatgactgttttggtatatcattggacgacgattaattagttgtagtaatcatgaattattgtgactaatttaaataatgtaatttgtaaaagttttgtaacagttccggtaaacattaccgttaaacattaccgttactgtagaaacagtaaaaattgggtctatttaaaggagtcctcgtcccctttgtgaggcaccctttcagatagtcccagaatcaggtttttagagagagaagctctgcctagggaaaaactctttgtatgcttttctttcagttttaataaatttctcccttctcccctcactgatcctgtgcggctctgccgccgcttcggtttctttgttttcaaaaacctgggtttgtaagccg

SEQ ID NO: 7273 - DNA, 1070 bp, Glycine max
  Gm_smallRNAprecursor_106
tcaaacttaaaccaacccaaaaaattctctgcaccatttgaccctacaggatataattattgggattacattgacgcctggaccaatgtgttctggcatcaaaatagtaaattcaagcattcatggctgatttacttcaaaaataatactgcatataattttccaaattggttcctccaatggtggaactacttcggaccaattccacaaatatttccagaagaagtccaacagggattcgaacaattcaacaagctctataatagcaaggaatcacgtattccggcagacttaaagtacttttccagttttgccttgtcatggatcttttcatggcaatacagatacggaaaaactgaaaacaacaagcaatatccaccattacagagacacgcctttgtaaaatggtggtcacaattcgatacctcaaaggctgctccagatcaagtcaagaactggttccagagcaatcctgagttccttaaacctgctgatccagagacatctttgtttctaaatcagaagtcgcaactggcagcattcttagcaagctcaaaatctaaagagagtcttgctcagaatctcaaagaagttctccaactacttcaacaggaagtggaagaagaaccttccaagaaggaagctgaatcatccgagactaatgatgaccaagaagatgatccattctaccagaatgaagatgactgttttggtatatcattggacgacgattaattagttgtagtaatcatgaattattgtgactaatttaaataatgtaatttgtaaaagttttgtaacagttccggtaaacattaccgttaaacattaccgttactgtagaaacagtaaaaattgggtctatttaaaggagtcctcgtcccctttgtgaggcaccctttcagatagtcccagaatcaggtttttagagagagaagctctgcctagggaaaaactctttgtatgcttttctttcagttttaataaatttctcccttctcccctcactgatcctgtgcggctctgccgccgcttcggtttctttgttttcaaaaacctgggtttgtaag

SEQ ID NO: 7274 - DNA, 1071 bp, Glycine max
  Gm_smallRNAprecursor_107
tcaaacttaaaccaacccaaaaaattctctgcaccatttgaccctacaggatataattattgggattacattgacgcctggaccaatgtgttctggcatcaaaatagtaaattcaagcattcatggctgatttacttcaaaaataatactgcatataattttccaaattggttcctccaatggtggaactacttcggaccaattccacaaatatttccagaagaagtccaacagggattcgaacaattcaacaagctctataatagcaaggaatcacgtattccggcagacttaaagtacttttccagttttgccttgtcatggatcttttcatggcaatacagatacggaaaaactgaaaacaacaagcaatatccaccattacagagacacgcctttgtaaaatggtggtcacaattcgatacctcaaaggctgctccagatcaagtcaagaactggttccagagcaatcctgagttccttaaacctgctgatccagagacatctttgtttctaaatcagaagtcgcaactggcagcattcttagcaagctcaaaatctaaagagagtcttgctcagaatctcaaagaagttctccaactacttcaacaggaagtggaagaagaaccttccaagaaggaagctgaatcatccgagactaatgatgaccaagaagatgatccattctaccagaatgaagatgactgttttggtatatcattggacgacgattaattagttgtagtaatcatgaattattgtgactaatttaaataatgtaatttgtaaaagttttgtaacagttccggtaaacattaccgttaaacattaccgttactgtagaaacagtaaaaattgggtctatttaaaggagtcctcgtcccctttgtgaggcaccctttcagatagtcccagaatcaggtttttagagagagaagctctgcctagggaaaaactctttgtatgcttttctttcagttttaataaatttctcccttctcccctcactgatcctgtgcggctctgccgccgcttcggtttctttgttttcaaaaacctgggtttgtaagc

SEQ ID NO: 7275 - DNA, 1041 bp, Glycine max
  Gm_smallRNAprecursor_108
tgcaccatttgaccctacaggatataattattgggattacattgacgcctggaccaatgtgttctggcatcaaaatagtaaattcaagcattcatggctgatttacttcaaaaataatactgcatataattttccaaattggttcctccaatggtggaactacttcggaccaattccacaaatatttccagaagaagtccaacagggattcgaacaattcaacaagctctataatagcaaggaatcacgtattccggcagacttaaagtacttttccagttttgccttgtcatggatcttttcatggcaatacagatacggaaaaactgaaaacaacaagcaatatccaccattacagagacacgcctttgtaaaatggtggtcacaattcgatacctcaaaggctgctccagatcaagtcaagaactggttccagagcaatcctgagttccttaaacctgctgatccagagacatctttgtttctaaatcagaagtcgcaactggcagcattcttagcaagctcaaaatctaaagagagtcttgctcagaatctcaaagaagttctccaactacttcaacaggaagtggaagaagaaccttccaagaaggaagctgaatcatccgagactaatgatgaccaagaagatgatccattctaccagaatgaagatgactgttttggtatatcattggacgacgattaattagttgtagtaatcatgaattattgtgactaatttaaataatgtaatttgtaaaagttttgtaacagttccggtaaacattaccgttaaacattaccgttactgtagaaacagtaaaaattgggtctatttaaaggagtcctcgtcccctttgtgaggcaccctttcagatagtcccagaatcaggtttttagagagagaagctctgcctagggaaaaactctttgtatgcttttctttcagttttaataaatttctcccttctcccctcactgatcctgtgcggctctgccgccgcttcggtttctttgttttcaaaaacctgggtttgtaag

SEQ ID NO: 7276 - DNA, 1057 bp, Glycine max
  Gm_smallRNAprecursor_109
ttgagcttgctaagaatgctgccagttgcgacttctgatttagaaacaaagatgtctccggatcagcaggtttaaggaactcaggattgctctggaaccagttcttgacttggtctggagcagcctttgaagtatcgaattgtgaccaccattttacaaaggcgtgtctctgtaacggtggatattgcttgctgttttcagtctttccgtatctgtattgccatgaaaagatccatgacaaggcaaaactggaaaagtactttaaatctgctggaatacgtgattccttgctattatagagcttgttgaattgttggaatctctgttggacttcttctgggaatatttgtggaattggtctgaagtagttccaccattggaggaaccaatttggaaaattatatgcagtattatttttgaagtaaatcagccatgaatgcttgaatttactattttgatgcctgaacacattggtccaggcgtcaatgtaatcccaataattatatcctgcagggtcaaatggtgcagaaatttttttgggttggtttaagtttgagccataatgtcgtggctgcataaccttcaaaatttggattgtggaatgggtatttagatttggatctttggggtctttgaagtgtttattagatactgagtttgtatctattagaatgaattcgtagaatttgcgggttttgtttgtggctattggcctgtaatggaatcccggggggaatactttggcggttgctttgaaaggattcttgtcccagtattctggttccatttgtaaaacattgaaaaatttgttttttgaaatgtaactgttaccgggttgtggcgttgattcttgttgagtcaacaattggcttggtttttggttacaaatagttttggtctgtttggttttttggatttgtttttgcagatctgtttcagaatcatcgtctgattctgaggccatttctgcccagatctttttggctaattttggtattttggtgaggcctatatcctctaaggccaagagagtttgtattgaccaggcataatcagc

SEQ ID NO: 7277 - DNA, 1148 bp, Glycine max
  Gm_smallRNAprecursor_110
ggaatacgtgattccttgctattatagagcttgttgaattgttggaatctctgttggacttcttctgggaatatttgtggaattggtctgaagtagttccaccattggaggaaccaatttggaaaattatatgcagtattatttttgaagtaaatcagccatgaatgcttgaatttactattttgatgcctgaacacattggtccaggcgtcaatgtaatcccaataattatatcctgcagggtcaaatggtgcagaaatttttttgggttggtttaagtttgagccataatgtcgtggctgcataaccttcaaaatttggattgtggaatgggtatttagatttggatctttggggtctttgaagtgtttattagatactgagtttgtatctattagaatgaattcgtagaatttgcgggttttgtttgtggctattggcctgtaatggaatcccggggggaatactttggcggttgctttgaaaggattcttgtcccagtattctggttccatttgtaaaacattgaaaaatttgttttttgaaatgtaactgttaccgggttgtggcgttgattcttgttgagtcaacaattggcttggtttttggttacaaatagttttggtctgtttggttttttggatttgtttttgcagatctgtttcagaatcatcgtctgattctgaggccatttctgcccagatctttttggctaattttggtattttggtgaggcctatatcctctaaggccaagagagtttgtattgaccaggcataatcagccacggtctgtttggttgttgttggttttggtgattcctgagttgatgactcaggtttggcggtatttatctgggtcaatgacccttcaagctttcctttctgggttgatgacccagtctgggtaggtgacccagaagatgatgtagttgcctttttggctattggctctggtagagccaatagaacctcttttccttttgtactggttctccctcctctgccggaggaactagacaccttaggaggcatcgggaattttctgtaaaaattcacgggtgaggtagtcaggtagagagttggaagagtccttgatatattctatattaaaatcaaagacacttaaaattgcttgccatcttgcaa

SEQ ID NO: 7278 - DNA, 1149 bp, Glycine max
  Gm_smallRNAprecursor_111
ggaatacgtgattccttgctattatagagcttgttgaattgttggaatctctgttggacttcttctgggaatatttgtggaattggtctgaagtagttccaccattggaggaaccaatttggaaaattatatgcagtattatttttgaagtaaatcagccatgaatgcttgaatttactattttgatgcctgaacacattggtccaggcgtcaatgtaatcccaataattatatcctgcagggtcaaatggtgcagaaatttttttgggttggtttaagtttgagccataatgtcgtggctgcataaccttcaaaatttggattgtggaatgggtatttagatttggatctttggggtctttgaagtgtttattagatactgagtttgtatctattagaatgaattcgtagaatttgcgggttttgtttgtggctattggcctgtaatggaatcccggggggaatactttggcggttgctttgaaaggattcttgtcccagtattctggttccatttgtaaaacattgaaaaatttgttttttgaaatgtaactgttaccgggttgtggcgttgattcttgttgagtcaacaattggcttggtttttggttacaaatagttttggtctgtttggttttttggatttgtttttgcagatctgtttcagaatcatcgtctgattctgaggccatttctgcccagatctttttggctaattttggtattttggtgaggcctatatcctctaaggccaagagagtttgtattgaccaggcataatcagccacggtctgtttggttgttgttggttttggtgattcctgagttgatgactcaggtttggcggtatttatctgggtcaatgacccttcaagctttcctttctgggttgatgacccagtctgggtaggtgacccagaagatgatgtagttgcctttttggctattggctctggtagagccaatagaacctcttttccttttgtactggttctccctcctctgccggaggaactagacaccttaggaggcatcgggaattttctgtaaaaattcacgggtgaggtagtcaggtagagagttggaagagtccttgatatattctatattaaaatcaaagacacttaaaattgcttgccatcttgcaaa

SEQ ID NO: 7279 - DNA, 1147 bp, Glycine max
  Gm_smallRNAprecursor_112
gaatacgtgattccttgctattatagagcttgttgaattgttggaatctctgttggacttcttctgggaatatttgtggaattggtctgaagtagttccaccattggaggaaccaatttggaaaattatatgcagtattatttttgaagtaaatcagccatgaatgcttgaatttactattttgatgcctgaacacattggtccaggcgtcaatgtaatcccaataattatatcctgcagggtcaaatggtgcagaaatttttttgggttggtttaagtttgagccataatgtcgtggctgcataaccttcaaaatttggattgtggaatgggtatttagatttggatctttggggtctttgaagtgtttattagatactgagtttgtatctattagaatgaattcgtagaatttgcgggttttgtttgtggctattggcctgtaatggaatcccggggggaatactttggcggttgctttgaaaggattcttgtcccagtattctggttccatttgtaaaacattgaaaaatttgttttttgaaatgtaactgttaccgggttgtggcgttgattcttgttgagtcaacaattggcttggtttttggttacaaatagttttggtctgtttggttttttggatttgtttttgcagatctgtttcagaatcatcgtctgattctgaggccatttctgcccagatctttttggctaattttggtattttggtgaggcctatatcctctaaggccaagagagtttgtattgaccaggcataatcagccacggtctgtttggttgttgttggttttggtgattcctgagttgatgactcaggtttggcggtatttatctgggtcaatgacccttcaagctttcctttctgggttgatgacccagtctgggtaggtgacccagaagatgatgtagttgcctttttggctattggctctggtagagccaatagaacctcttttccttttgtactggttctccctcctctgccggaggaactagacaccttaggaggcatcgggaattttctgtaaaaattcacgggtgaggtagtcaggtagagagttggaagagtccttgatatattctatattaaaatcaaagacacttaaaattgcttgccatcttgcaa

SEQ ID NO: 7280 - DNA, 1220 bp, Glycine max
  Gm_smallRNAprecursor_113
atagaaagaaacatattgttgatctcccttatgagaaagactttagggaaaaacaaattcccacaaaagccagaccaattcaaatgaacgaagaactccttcaatactaccaaaaggaaatcaaggatttgcttgataaaggcctaatccggaaaagcaaaagcccatggtcttgtgcggctttttatgtcaataaaaaatctgagcttgagcgtggaacaccccgcttagtcataaattacaaaccacagaatcaagcattacaatggattaggtatcctattccaaacaaaaaagatttacttaacagattaaattctgcaaaaatattttgaaaatttgatatgaaatctggatttcggcaaatccaaatccaagaatcagacagatacaaaacaacatttactgtacctttcgggcaatatgaatggaatgtgatgccattcggactgaagaatgccccttcagaatttcaaaaaattatgaacgatatttttaatccctattcaaaatttgtcattgtctacatagatgatgttttaatcttttcccaaaatattgaccaacatttcaaacatctccagactttcatccatatcatcaaacaaaatggtttggcagtctccaaatcaaaaatcaaacttttccaaactcgaattcgattccttggtcataatatatatcaaggtgcaatcattccaatagaatttgctaacaaatttcccaaccaaatcttagacaaaacccagttacaaagatttctaggttgtctaaattaagtaggagaatttgtcccctatttaaacaatattgtcaagccattgcatgataggctgaagaaaaatcttcctccttggtctgatctccatacccaaacagttaaagagatcaaactcaaagtccaatctataaaatatctgtatcttcctattccataggcatttaaaattgtcgaaaccgatgcatcagacataggttatggtggcatcctcaaacaaagagtacatgatcaagattatgtcattgcatatacatcaaaacattggaatcctgcacaattaaaatattcaactgttaaaaaagattttttagcaattgttttgtgcatttccaaattccaatcagatttattaaatcaaaatttttaaatcagggttgattgcaagtcagccaaagatattttacaaaaggatgttaaaaaccttgcctcaaaacaaatt

SEQ ID NO: 7281 - DNA, 1099 bp, Glycine max
  Gm_smallRNAprecursor_114
ctgtctttgacatttggtagttgatattgtgttgcgggaggtaatttcgattggattaactcaccgtccttcatttgccagtttgttatgacatttgttgttggatcacctatgatgtcttgtttccaagggtaatctatatcctttctgatggtataagcatgaaaccaatcaaagaaaaggatattaattttgactctttcgacaaattcatagaacttatcttggatctgctttctgtttgtacccttgtaatgttggaaaaaccatgtcctttgaagttcattctctggagaataaaagtctttcctaagggtttccttatcaatgctaaagttgtcagataccatcataaggtttccttactgccctttctcatccacgggacttactgctatagtattattcaactaaaatatcaaactgctgtgcttccagaaaatactgttcaaacatatactgtttagataaaaattactgtacacagttcagatccatgagttcagttaacatatgcccttacggacactattcctacttccccatcaggctctgataccagagatcagcggagagggatcaaatggacaaataggaagtaagaatgcagtatgataaatggaaatcgaaatataaattttcaaaaacaagtatcaaggcgagacatatattatcttgagtaagttattggttttgggtgaattcattgaagaagaggatgaagatgagtttgatctaaaagaaatgcgagagaaagaacgtaaaaggcgagacatattggattcatcctctagtatctttgctgtcatatggttccatagaaatgtttccataaggttatatgttactgaatttcttggatctgaaaaataaagaatttttttttttacagacaatatagtttgaacactactcctacaaccaccagtatattatgtctttaaaaatttgtcaggatgacaaaattcagaggcaattagccaaagaaaaggctcaaacaaagaaatatttaggttctttatgcgaacattttggtctaccggcctgtccaaaacaaaagaaaaaacaatcctctaggagagaaatccatgagagtaaa

SEQ ID NO: 7282 - DNA, 1099 bp, Glycine max; identical to SEQ ID NO: 7281
  Gm_smallRNAprecursor_115

SEQ ID NO: 7283 - DNA, 1078 bp, Glycine max
  Gm_smallRNAprecursor_116
agacgggaactgtggatatcggtccattgccgctttattaggtatcggggaagattcgtggccgttagtgcgtaatgaattgattaaagaacttggcaggtggtcgcatgagtacatgaacctcttcggtggcacagagagatttgaacaattaaagttgtccctacttgttgatgggttttcgaaggtatgtttttgggttaatttttttaataacaaactttaaattacttacatgtgtatgtttggttgattcaggttagtgtggacaagtgaatggatataacggagatgggatatgtgattgcatcacggtataacgtaatccatgtatcgttgtcccgacaacaaagcatgacattttttcctcttagaagtcagccaccacctgattcttctgggcaccgcatgatatgtgtcggtcacgtgtttggaaatcattttgttcgggtacattgaatatagttagtataacaattatgcaatgactttgctggttcatttgacacggtcaccgcatgatataatctttgttcatgtacaacaggtttatttgaaagaccattgtcccttatcgcctccagcgttgttgtggtcaagcaattgttattctcaggcaaagcagtggacaactccatatattagtagaatgcagcaatacacaagcttgatgtcattcaaaagacactatgtcgacctaaatgaagactaaacatgcattgtttatgtaattgtattcattatgcgatataatttgttgtaacccattactaaccaattaatattattaagtacttgtttggttaagcaaagaaattgttggtccaacaaaaatcatttacgcgtgtagcatacatcattgtcataattgacaacacataatgacatgcatgctattaaagtttgagcgcgacaacacattgactgacttgactacacattctgaaggaaacataacaagaaacatgttcacgcgtgtctatttttttgtaaacaaagtgaagcaatcactcggtcacaaccatctatatatatagcagacacggctaataaatcacgcattatcatgctttcacat

SEQ ID NO: 7284 - DNA, 1110 bp, Glycine max
  Gm_smallRNAprecursor_117
tgatcaacatttggcaaagggactgcttcgatccattttgtaaagtaatcgataccaactataatataacgctggttcttagaagaggcaggcttgatttcaccaattaagtccaaagcccatcctctgaaaggccaaggtttgattatggagtgtaactcactagcaggtaaatgctgtatccctgcatgcttttggcattcctgacagcctttagcaaattctatacagtcttttaacatcgaaggccaatacaaaccttagcgaaataaaagccatttcattttatggcctgcttgatgtgatccacaagccccactgtgaacatgggaaactaccaagtatgcttctgattcacttagacattttagcaacactccttctgcagtctttttaaacaaatcatttcccacaatcacgtaatttaaagccctatatttgatctttcgagccacattgcctattggattttccaaatattcaataatggactttctccaatcattatctaacatattgtcaatggccaaaatttgaattttttcctgaagatcattcatactttcatcttcattattttgtggtatacttgcccccacaagttttggcattggcaatttagtgcttaatggctctggtaacaccagtttatcttttatttcgatcaactgagttaacttttccttcgacattttgtaccctgaagctatttgggctaaatcatttgcttctcggttttcttgtcgaggtacatgctcaatgttaatataatcgaaatgattcagaagagaacttgctataacaaaatattttgctaagtgttcattaacacatttgtattcttgtgttaattgcctcaacactaattctgaatcacctcttatattaacatttcttgcccccaggctaattaaaatttcaaggcctgtaattagagcttcatactcagcctcattattagaacaaagccctttgattttatatttgaacttagttggaactttattgggggatattattaaaactccaattccagttccatgtttgtgtttcgatccatcgaaatacaaaatccaaggctctgtatcgacataatcttgcagcatctcg

SEQ ID NO: 7285 - DNA, 1083 bp, Glycine max
  Gm_smallRNAprecursor_118
caaagggactgcttcgatccattttgtaaagtaatcgataccaactataatataacgctggttcttagaagaggcaggcttgatttcaccaattaagtccaaagcccatcctctgaaaggccaaggtttgattatggagtgtaactcactagcaggtaaatgctgtatccctgcatgcttttggcattcctgacagcctttagcaaattctatacagtcttttaacatcgaaggccaatacaaaccttagcgaaataaaagccatttcattttatggcctgcttgatgtgatccacaagccccactgtgaacatgggaaactaccaagtatgcttctgattcacttagacattttagcaacactccttctgcagtctttttaaacaaatcatttcccacaatcacgtaatttaaagccctatatttgatctttcgagccacattgcctattggattttccaaatattcaataatggactttctccaatcattatctaacatattgtcaatggccaaaatttgaattttttcctgaagatcattcatactttcatcttcattattttgtggtatacttgcccccacaagttttggcattggcaatttagtgcttaatggctctggtaacaccagtttatcttttatttcgatcaactgagttaacttttccttcgacattttgtaccctgaagctatttgggctaaatcatttgcttctcggttttcttgtcgaggtacatgctcaatgttaatataatcgaaatgattcagaagagaacttgctataacaaaatattttgctaagtgttcattaacacatttgtattcttgtgttaattgcctcaacactaattctgaatcacctcttatattaacatttcttgcccccaggctaattaaaatttcaaggcctgtaattagagcttcatactcagcctcattattagaacaaagccctttgattttatatttgaacttagttggaactttattgggggatattattaaaactccaattccagttccatgtttgtgtttcgatccatcgaaatacaaaatccaaggctctgtatcgacataatc

SEQ ID NO: 7286 - DNA, 1176 bp, Glycine max
  Gm_smallRNAprecursor_119
agccacaatctgacccttaacagatttcaaaggcttgtacgttaaagaatattctgttaatgctaaagcccactttccaattctactgtgtaaaatcggttttgacaacatgtgcttaataatatcataatgagaatacacataaacatcaacaggctttatatattgcttaagttttgcacaagagaaatacagacaaagacaaagtttttctatggcagtatatctagtttctgcatcatttagtacacgactaagataataaattgcatgttctatgccatcatcatcttcctgagccaacatgctaccaatggtcttgtcagacgcagcaatatacatcttcatagacttgtttcgactaggaggcattaacacaggaggcttgatcagatattctttaatttcatcgaaagccttttgatgctcttcattccatttgaatggttcatctttcttgagtcgaagtaatggcgaacaaatctgagctttgccacttagattcgaaatgaatcgcctcaagaagttgatttttcctagcaaagactgaagctgttttttggtcgaaggaggcttcgtctcaagaatagcctttgtcttattttgatttatctcaatgccttttttatgcaccacaaaaccaaggaaatctcctgcacgcacacaaaaagcacactttaatggattcatttttaatccatgtttcctcattcgttcgaaagattgcctaagataatccaaatggctatcttctgaggaggatttgatgattatatcatcaatataaatttgcataaatgtgtcaataaaatcatgaaacatggaattcatggccctttgataagtggccccagcatttttcaacccaaagggcataaccacccattcataagtgcctaaagcaccagggcatcgaaatgctgttttcgacacatcattttcagcaataaatatttggttataaccagaataaccatctaacatgcttaaaaattcgaaaccagctgccgaatctaccaacatttccgctactggcatagcatattcatctttaggtgtagcattatttaaatccctaaaatctatgcatactctaagagttccattctttttaatgacagggactatatttgctaaccattcgacatacctggcagccctgatgaatttacacct

SEQ ID NO: 7287 - DNA, 1157 bp, Glycine max
  Gm_smallRNAprecursor_120
caattctactgtgtaaaatcggttttgacaacatgtgcttaataatatcataatgagaatacacataaacatcaacaggctttatatattgcttaagttttgcacaagagaaatacagacaaagacaaagtttttctatggcagtatatctagtttctgcatcatttagtacacgactaagataataaattgcatgttctatgccatcatcatcttcctgagccaacatgctaccaatggtcttgtcagacgcagcaatatacatcttcatagacttgtttcgactaggaggcattaacacaggaggcttgatcagatattctttaatttcatcgaaagccttttgatgctcttcattccatttgaatggttcatctttcttgagtcgaagtaatggcgaacaaatctgagctttgccacttagattcgaaatgaatcgcctcaagaagttgatttttcctagcaaagactgaagctgttttttggtcgaaggaggcttcgtctcaagaatagcctttgtcttattttgatttatctcaatgccttttttatgcaccacaaaaccaaggaaatctcctgcacgcacacaaaaagcacactttaatggattcatttttaatccatgtttcctcattcgttcgaaagattgcctaagataatccaaatggctatcttctgaggaggatttgatgattatatcatcaatataaatttgcataaatgtgtcaataaaatcatgaaacatggaattcatggccctttgataagtggccccagcatttttcaacccaaagggcataaccacccattcataagtgcctaaagcaccagggcatcgaaatgctgttttcgacacatcattttcagcaataaatatttggttataaccagaataaccatctaacatgcttaaaaattcgaaaccagctgccgaatctaccaacatttccgctactggcatagcatattcatctttaggtgtagcattatttaaatccctaaaatctatgcatactctaagagttccattctttttaatgacagggactatatttgctaaccattcgacatacctggcagccctgatgaatttacacctcagcagcctttcgatctcttccttaatcttggacatgatttctggtgcgaatcttctt

SEQ ID NO: 7288 - DNA, 1039 bp, Glycine max
  Gm_smallRNAprecursor_121
atttctggtgcgaatcttcttggtagttgttttactggtctttttccctccttaataggtaacttcatttcgaccatttctctgcttaacccaggcatttcgtggtaatcccaagcaaaacagtctttaaactctctaagaagaggcaccagcttttcttttaaacttgaggtgatattggcactgatataagttggccttttaatcgagccatctccaatatcgacctcttccaaaggatcttgagcctgcatctttggcgcctcacttatgggatttttctcaaaacccagcggctcatcatcataaatacaatccagtcttcgatcctttgtttctttgttttcatgatcttcgatcttggcttcaactgccatattttgttgagattcagcctcaaaggccgtatttagtctattttcggccatataagccgtaattctggcccatgcagtggcctcagtcatattaatcttcatatgtattccacccagttggtggaatgactccatcttcagagggaacagcatcaatttcctccctctcccatataaacccataggtaggatggagtttgacagagtggacaacattgtcacttgattcgacaacagcctccttgtcaccacaaggtgctatgttagccaactttttgtcaaaggtttgtgcagtaacattatcgacctctgacttatagaagctttgatccgcctctatattttccacaatcccatcctccctccagataatgagcttctggtgaagggtagatggcacagccccaactccatgaatccactcccttcctaatagcaagttaaaattagccttagactgtatcaccaggaaaagagttggtcgaactatactgcctacagcaacatctacttgaatggctcccaaagaatagccagttttaccctcataattcgaaagcacaatgttgtgggcagatagatcagtgtcatgtttcccgatcttgtagagcatagatcgaggcattaagttgacagccgctcctccatcaatgagcactttg

SEQ ID NO: 7289 - DNA, 1127 bp, Glycine max
  Gm_smallRNAprecursor_122
tagagcaagttggagtgaggaatctttttgggatttcttttaacattgaatgattttggtgatttttaaccacaaaaaaatataatttaattttttaaatgaatattggcagtttttaaaatagctagaaattggatttaacattcactttagcacttaagagacttagcccaatgatagggatctaaaacgaatttttcaaatatcagggatcaaacacaacaaaaaattcgagtatttattagggatcacaaacatattttagccaaataagaaggtagcgttttgtagcactttcagagtttacgaacaaattaaggatcattggttaaaatatgttaatgttccctgatatgtacccaagttttacatttgttccctgataaatttttctttcatttttgctccctaatatttgattttttttgtcataaacccctatcgttagcttctgtcaatttgatgctaacatgtctgttaagttacacgccagcatgttacatatgttgccacatgtgcccgaaggatgagttactgttttgtatttgctccctataacttcagggtttttgcatctattccctataatcttaggggtttttgcatttgctcctataaagtcatccttcgagaatatgtgacaacatacgtggcatggtgacatgttaacttaatgagcacattaacaccaaatcgacggaagctaaagtcagggacctatgacaaaaattttcaaatattagagagcaaaaataaaaaaaaaattatcaaaaaattaatacaaaactcatatatatcaaggatcacaaacattttaaccaataatcatttgatctagcttagagcaaacgagtttaaagttcacatggaccactattcaatgctccgaaatgaataagatacatgactattgacacataataatatgctctattattccgcttctaaacaacaaactgaaaaataaaaataaaattcaatctttagcttcttcctttggcttcctcaggagatagaacaaaccttctgtcaaagcagctttggaagtcaaagaagctcccagcaggtttagtgcctaatcatcaaatcatgtatagataatgaaagtcattgttctaatgtattag

SEQ ID NO: 7290 - DNA, 1116 bp, Glycine max
  Gm_smallRNAprecursor_123
tgatcaacatttggcaaagggactgcttcgatccattttgtaaagtaatcgacaccaactatgatataacgctggttcttagaagaagcaggcttgatttcaccaattaggtccaaagcccatcctctgaaaggccaaggtttgattatggagtgtaactcactagcaggtacatgctgtatccctgcatgcttttggcattcctgacagcctttagcaaattctatacaatcttttaacatcgaaggccaatacaaaccttgtcgaaataaaagccatttcattttatggcctgcttgatgtgatccacaagccccactgtgaacatgggaaactgccaagtatgcttctgattcacttagacatttcagcaacactccttctgcagtctttttaaacaaatcatttcccacaatcacgtaatttaaagccctatatttgacctttcgagccacattgcctattggattttccaaatattcaataatggactttctccaatcattatctaacatattgtcaatggccaaaatttgaattttaattttttcctggagatcatccatgctttcatcttcattattttgtggtgtacttgcccccacaagtcttggcattggcaatttagtgcttaatggctctagtaattccagtttatcttttatttcgatcaactgagttaacttttccttcgacattttgtaccctgaagctatttgggctaaatcatttgcttcttggttttcttgtcgaggtatatgctcaatgttaatataatcgaaatgattcagaagagaactcgccataacaaaatattttgctaagtgttcattaacacatttgtattcttgtgttaattgcttcaatactaattctgaatcacctcttatgttaacatttcttgcccccaggctaattaaaatttcaaggcctgtaattagagcttcatactcagccttattattagaacaaagccctttgattttatatttgaacttagttggaactttattgggggatattattaaaactccaattccagttccatgtttatgtttcgatccatcgaaatacaaaatccaaggctctgtatcgacatagtcttgcggcatctcg

SEQ ID NO: 7291 - DNA, 1114 bp, Glycine max
  Gm_smallRNAprecursor_124
acatattgtcaatggccaaaatttgaattttaattttttcctggagatcatccatgctttcatcttcattattttgtggtgtacttgcccccacaagtcttggcattggcaatttagtgcttaatggctctagtaattccagtttatcttttatttcgatcaactgagttaacttttccttcgacattttgtaccctgaagctatttgggctaaatcatttgcttcttggttttcttgtcgaggtatatgctcaatgttaatataatcgaaatgattcagaagagaactcgccataacaaaatattttgctaagtgttcattaacacatttgtattcttgtgttaattgcttcaatactaattctgaatcacctcttatgttaacatttcttgcccccaggctaattaaaatttcaaggcctgtaattagagcttcatactcagccttattattagaacaaagccctttgattttatatttgaacttagttggaactttattgggggatattattaaaactccaattccagttccatgtttatgtttcgatccatcgaaatacaaaatccaaggctctgtatcgacatagtcttgcggcatctcgatcactgagtgatctacaataaaatctgccacaatttgacccttaacagatttcaaaggcttgtacgttaaagaatattctgttaatgctaaagcccattttccaattctactgtgtaaaataggttttgacaacatgtgcttaataatatcataatgagaatacacataaacatcaacaggctttatatattgcttaagttttgcacaagagaaatacaaacaaagacaaagtttttctatggcagtatatctagtttctgcatcatttagtacacgactaagataataaattgcatgttctatgccatcatcatcttcctgagccaacatgctaccaatggtcttatcagacgcagcaatatacaacttcatagacttgtttcgactaggaggcattaacacgggaggcttgatcagatattctttaatttcatcaaaagccttttgatgctcttcattccatttgaatggttcatctttcttgagtcgaagtaatggcgaaaaaat

SEQ ID NO: 7292 - DNA, 1157 bp, Glycine max
  Gm_smallRNAprecursor_125
caattctactgtgtaaaataggttttgacaacatgtgcttaataatatcataatgagaatacacataaacatcaacaggctttatatattgcttaagttttgcacaagagaaatacaaacaaagacaaagtttttctatggcagtatatctagtttctgcatcatttagtacacgactaagataataaattgcatgttctatgccatcatcatcttcctgagccaacatgctaccaatggtcttatcagacgcagcaatatacaacttcatagacttgtttcgactaggaggcattaacacgggaggcttgatcagatattctttaatttcatcaaaagccttttgatgctcttcattccatttgaatggttcatctttcttgagtcgaagtaatggcgaaaaaatttgagctttgccacttagattcgaaatgaatcgcctcaagaagttgatttttcctagcaaagactgaagctgttttttggtcgaaggaggcttcgtctcaagaatagcctttgtcttgttttgatttatctcaatgccttttttatgcaccacaaaaccaaggaagtctcctgcacgcacacaaaaagcacattttaatggattcatttttaatccatgtttcctcattcgttcgaaagattgcctaaggtaatccaaatggctatcttctgaagaggatttgatgattatatcatcaatataaacttgcataaatgtgtcaataaaatcatgaaacatggaattcatggccctttgataagtggccccagcatttttcaacccaaaaggcataaccacccattcataagtgcctaaagcaccagggcatcgaaatgctgttttcgacacatcactttcagcaataaatatttggttataaccagaataaccatctaacatgcttaaaaattcgaagccagctgccgaatctaccaacatttccgctactggcatagcatattcatctttaggtgtagcattatttaaatccctaaaatctatgcatactctaagagttccattctttttaatgacagggactatatttgctaaccattcgacatacctggcagatctgatgaatttacacctcagcagcctttcgatctcttccttaattttggacatgatttctggtgcgaatcttctt

SEQ ID NO: 7293 - DNA, 1039 bp, Glycine max
  Gm_smallRNAprecursor_126
atttctggtgcgaatcttcttggtagttgtttcactggtcttttgccttccttaatcggtaatttcatttcgaccatttctctgcttaacccaggcatttcgtggtaatcccaagcaaaacagtctttaaattctctgagaagaggcaccagcttttcttttaaacttgaggtgatattggcactgatataggttggcctttttatcgagccatctccaatgtcgacctcttccaaaggatcttgagcctgcatctttggcgcctcacttatgggatttttctcaaaacccagcggctcatcatcataaatacaatccagtcttcgatcctttgtttctttgttttcatgatcttcgatcttggcttcaactgccatattttgttgagattcagcctcaaaggtcgtatttagtctaatttcggccatataagccgtaattctggcccatgcagtggcctcagtcatattaatcttcatatataatccacccagttggtggaatgactccatcttcagagggaacagcatcaatttcctccctctcccatataaacccataggtaggatggagtttgacagagtggataacattgtcatttgattcgacaacagcctccctgtcaccacaaggtgctatgttagccaactttttgtcaaaggtttgtgcagtaacattatcgacctctgacttatagaagctttgatccgcctctatattttcaacaatcccatcctccctccagataatgagtttctggtgaagggtagatggcacagccccaactccatgaatccattcccttcctaatagcaagttaaaattagccttagactgtatcaccaggaatagagttggtcgaactatactgcctacagcaacatctacttgaatggctcccaaagaatagccagttttaccctcataattcgaaagcacaatgttgtgggcagatagatcagtgtcatgtttcccgatcttgtagagcatagatcgaggcattaaattgacagccgctcctccatcaatgagcacttta

SEQ ID NO: 7294 - DNA, 1200 bp, Glycine max
  Gm_smallRNAprecursor_127
ttgttcatcagcaacacaatgtacaaccatcagtcggtgtactcaaggttggcatgaccttcgatgacaaagcacaatgtattcgagcaatcaaagaatacaacatcagaaatcattttgattgcagaacaatttactctgaccaaagaaggctacactttgtctgcaagttacatgaaaatggttgtacatggagcttgggcgcatgcaattcaaagaggcataacaaatggattatgaagagtatcagaggtcatcacacttgtctcgtgccgatgctcagacaagatcatcgccaactcgacaaacacgtcatagcacagatcatccaaccaattgtcaaaacaaacccaactgtctccatcaagacattgattgtagagatcaaaacgttcatgaattataccccatcctacaagaagacatggttagcaaagcaaaaagcattggagatgattcatggaaactgggaagaatcatatgtcaaactgccaaaacttttcggagctttgcaatcttgtgttcccgggactgtggtcgctgctcaaacagaatccttgtatgaggggggagaaatagtaccgggcaaaagattgtttaaacgtgtcttttggtcatttggtccatgcattaatggttttgcatattgcaaacccattgtacaagtagatggtacatggctttacggaaagtatactggcacactgttgatagctaccgcacaagatggagctaaccatatcttcccgattgcctatgccattgtagaaggggagacaacttcagcttggggttttttctaaagaatttgagaagacatgttactccgcaaattaacatttctcttattttagaccgacaccccacaattataagtgcctacaacaacccaagtaacttatgggtccaggacacatcccatttcttttgcctgcgccacattgcacaaaactttctttgtggtaactcaaactgcaaacatttaaagaaaccacttaagttggctggtgagaatctattttatttattcgttataattttctttcaatcaaattttataacataatacattgattaaatatttacagggtacgcatacacggagaagatgcactggcgacatcttggggatattcgtgcgaataagccaagtgcagctgaatggcttgatcaattacccaaacaaaaatgggtacaatg

SEQ ID NO: 7295 - DNA, 1076 bp, Glycine max
  Gm_smallRNAprecursor_128
catcagcaacacaatgtacaaccatcagtcggtgtactcaaggttggcatgaccttcgatgacaaagcacaatgtattcgagcaatcaaagaatacaacatcagaaatcattttgattgcagaacaatttactctgaccaaagaaggctacactttgtctgcaagttacatgaaaatggttgtacatggagcttgggcgcatgcaattcaaagaggcataacaaatggattatgaagagtatcagaggtcatcacacttgtctcgtgccgatgctcagacaagatcatcgccaactcgacaaacacgtcatagcacagatcatccaaccaattgtcaaaacaaacccaactgtctccatcaagacattgattgtagagatcaaaacgttcatgaattataccccatcctacaagaagacatggttagcaaagcaaaaagcattggagatgattcatggaaactgggaagaatcatatgtcaaactgccaaaacttttcggagctttgcaatcttgtgttcccgggactgtggtcgctgctcaaacagaatccttgtatgaggggggagaaatagtaccgggcaaaagattgtttaaacgtgtcttttggtcatttggtccatgcattaatggttttgcatattgcaaacccattgtacaagtagatggtacatggctttacggaaagtatactggcacactgttgatagctaccgcacaagatggagctaaccatatcttcccgattgcctatgccattgtagaaggggagacaacttcagcttggggttttttctaaagaatttgagaagacatgttactccgcaaattaacatttctcttattttagaccgacaccccacaattataagtgcctacaacaacccaagtaacttatgggtccaggacacatcccatttcttttgcctgcgccacattgcacaaaactttctttgtggtaactcaaactgcaaacatttaaagaaaccacttaagttggctggtgagaatctattttatttattcgttataattttctttcaatcaaattttataacataatacattgattaaata

SEQ ID NO: 7296 - DNA, 1075 bp, Glycine max
  Gm_smallRNAprecursor_129
atcagcaacacaatgtacaaccatcagtcggtgtactcaaggttggcatgaccttcgatgacaaagcacaatgtattcgagcaatcaaagaatacaacatcagaaatcattttgattgcagaacaatttactctgaccaaagaaggctacactttgtctgcaagttacatgaaaatggttgtacatggagcttgggcgcatgcaattcaaagaggcataacaaatggattatgaagagtatcagaggtcatcacacttgtctcgtgccgatgctcagacaagatcatcgccaactcgacaaacacgtcatagcacagatcatccaaccaattgtcaaaacaaacccaactgtctccatcaagacattgattgtagagatcaaaacgttcatgaattataccccatcctacaagaagacatggttagcaaagcaaaaagcattggagatgattcatggaaactgggaagaatcatatgtcaaactgccaaaacttttcggagctttgcaatcttgtgttcccgggactgtggtcgctgctcaaacagaatccttgtatgaggggggagaaatagtaccgggcaaaagattgtttaaacgtgtcttttggtcatttggtccatgcattaatggttttgcatattgcaaacccattgtacaagtagatggtacatggctttacggaaagtatactggcacactgttgatagctaccgcacaagatggagctaaccatatcttcccgattgcctatgccattgtagaaggggagacaacttcagcttggggttttttctaaagaatttgagaagacatgttactccgcaaattaacatttctcttattttagaccgacaccccacaattataagtgcctacaacaacccaagtaacttatgggtccaggacacatcccatttcttttgcctgcgccacattgcacaaaactttctttgtggtaactcaaactgcaaacatttaaagaaaccacttaagttggctggtgagaatctattttatttattcgttataattttctttcaatcaaattttataacataatacattgattaaata

SEQ ID NO: 7297 - DNA, 1066 bp, Glycine max
  Gm_smallRNAprecursor_130
gcaacacaatgtacaaccatcagtcggtgtactcaaggttggcatgaccttcgatgacaaagcacaatgtattcgagcaatcaaagaatacaacatcagaaatcattttgattgcagaacaatttactctgaccaaagaaggctacactttgtctgcaagttacatgaaaatggttgtacatggagcttgggcgcatgcaattcaaagaggcataacaaatggattatgaagagtatcagaggtcatcacacttgtctcgtgccgatgctcagacaagatcatcgccaactcgacaaacacgtcatagcacagatcatccaaccaattgtcaaaacaaacccaactgtctccatcaagacattgattgtagagatcaaaacgttcatgaattataccccatcctacaagaagacatggttagcaaagcaaaaagcattggagatgattcatggaaactgggaagaatcatatgtcaaactgccaaaacttttcggagctttgcaatcttgtgttcccgggactgtggtcgctgctcaaacagaatccttgtatgaggggggagaaatagtaccgggcaaaagattgtttaaacgtgtcttttggtcatttggtccatgcattaatggttttgcatattgcaaacccattgtacaagtagatggtacatggctttacggaaagtatactggcacactgttgatagctaccgcacaagatggagctaaccatatcttcccgattgcctatgccattgtagaaggggagacaacttcagcttggggttttttctaaagaatttgagaagacatgttactccgcaaattaacatttctcttattttagaccgacaccccacaattataagtgcctacaacaacccaagtaacttatgggtccaggacacatcccatttcttttgcctgcgccacattgcacaaaactttctttgtggtaactcaaactgcaaacatttaaagaaaccacttaagttggctggtgagaatctattttatttattcgttataattttctttcaatcaaattttataacataatacattgatt

SEQ ID NO: 7298 - DNA, 1067 bp, Glycine max
  Gm_smallRNAprecursor_131
gcaacacaatgtacaaccatcagtcggtgtactcaaggttggcatgaccttcgatgacaaagcacaatgtattcgagcaatcaaagaatacaacatcagaaatcattttgattgcagaacaatttactctgaccaaagaaggctacactttgtctgcaagttacatgaaaatggttgtacatggagcttgggcgcatgcaattcaaagaggcataacaaatggattatgaagagtatcagaggtcatcacacttgtctcgtgccgatgctcagacaagatcatcgccaactcgacaaacacgtcatagcacagatcatccaaccaattgtcaaaacaaacccaactgtctccatcaagacattgattgtagagatcaaaacgttcatgaattataccccatcctacaagaagacatggttagcaaagcaaaaagcattggagatgattcatggaaactgggaagaatcatatgtcaaactgccaaaacttttcggagctttgcaatcttgtgttcccgggactgtggtcgctgctcaaacagaatccttgtatgaggggggagaaatagtaccgggcaaaagattgtttaaacgtgtcttttggtcatttggtccatgcattaatggttttgcatattgcaaacccattgtacaagtagatggtacatggctttacggaaagtatactggcacactgttgatagctaccgcacaagatggagctaaccatatcttcccgattgcctatgccattgtagaaggggagacaacttcagcttggggttttttctaaagaatttgagaagacatgttactccgcaaattaacatttctcttattttagaccgacaccccacaattataagtgcctacaacaacccaagtaacttatgggtccaggacacatcccatttcttttgcctgcgccacattgcacaaaactttctttgtggtaactcaaactgcaaacatttaaagaaaccacttaagttggctggtgagaatctattttatttattcgttataattttctttcaatcaaattttataacataatacattgatta

SEQ ID NO: 7299 - DNA, 1065 bp, Glycine max
  Gm_smallRNAprecursor_132
caacacaatgtacaaccatcagtcggtgtactcaaggttggcatgaccttcgatgacaaagcacaatgtattcgagcaatcaaagaatacaacatcagaaatcattttgattgcagaacaatttactctgaccaaagaaggctacactttgtctgcaagttacatgaaaatggttgtacatggagcttgggcgcatgcaattcaaagaggcataacaaatggattatgaagagtatcagaggtcatcacacttgtctcgtgccgatgctcagacaagatcatcgccaactcgacaaacacgtcatagcacagatcatccaaccaattgtcaaaacaaacccaactgtctccatcaagacattgattgtagagatcaaaacgttcatgaattataccccatcctacaagaagacatggttagcaaagcaaaaagcattggagatgattcatggaaactgggaagaatcatatgtcaaactgccaaaacttttcggagctttgcaatcttgtgttcccgggactgtggtcgctgctcaaacagaatccttgtatgaggggggagaaatagtaccgggcaaaagattgtttaaacgtgtcttttggtcatttggtccatgcattaatggttttgcatattgcaaacccattgtacaagtagatggtacatggctttacggaaagtatactggcacactgttgatagctaccgcacaagatggagctaaccatatcttcccgattgcctatgccattgtagaaggggagacaacttcagcttggggttttttctaaagaatttgagaagacatgttactccgcaaattaacatttctcttattttagaccgacaccccacaattataagtgcctacaacaacccaagtaacttatgggtccaggacacatcccatttcttttgcctgcgccacattgcacaaaactttctttgtggtaactcaaactgcaaacatttaaagaaaccacttaagttggctggtgagaatctattttatttattcgttataattttctttcaatcaaattttataacataatacattgatt

SEQ ID NO: 7300 - DNA, 1050 bp, Glycine max
  Gm_smallRNAprecursor_133
cagggtacgcatacacggagaagatgcactggcgacatcttggggatattcgtgcgaataagccaagtgcagctgaatggcttgatcaattacccaaacaaaaatgggtacaatgctttgatgaggggaaacgttggggacatatgactaccaatttgtcggagtctgttaattccatgttaaaaaacacaagacatttaccggtgtcatcattggttgaggagacctatttcaagaccgcacaactctttgctaatagaggtcgacaaactcaggcaatgatcaactctggctcacagtattctgaagtcgtcttcgatgcaatcaatagtggtcaacaagaatctaatacacacattgtaaatgaattcgacagacacaatcacacttttattataacagagactcaatccccacttgaaacacccagaccacctggaaggtttagagtaatgttacaatcccaaaagtgtgattgtggtgaatttcaggctaaacatttaccatgttctcacgtcatggctgcctgcaaatctatcaatgttgatcccatgacctatgtgccgatgatattcactttacaacacattttgcacatctatgacaactcctttggtttattgccacacgaatcaatgtggcaagaatatgaaggagatcagtggggttctgatccaagaagaaagaggactgcaaagggtcatcccgtttcaactcgtatttctactgagatggacgaagacgaaaatgaacgagaaagtagaaaaaaatgtggactttgccggcaacatggtcatagcagaaataattgtcctgatatatcctcatcttagtttttccttagacaaatgtcattgtttaaatattttattgatgacgtagtataatgttcttatataaataaattgttaaaagctttagttttatcatttttaattaaatctaatagcataaacaaactaattatatttagtaaaatagttaaattaaaatttttaaaattcagattattatacaaaataaatatttactaaaataaatatattatta

SEQ ID NO: 7301 - DNA, 1036 bp, Glycine max
  Gm_smallRNAprecursor_134
tttggatattaattaaacgttaactacaattagtgtacacacacataaaatatatataagtagaacttttatttaaatcacgtaccttaacaacaatccacctagcaacagccttggatttcggttgtggagtatcatcaagtcctttcaaagcactagtgttgaatataaggaacattaaaatattgatgttgttgagttatgccaatgaaaatgtattgaaaacaatactgacctgttaattattcccttaaggtagttgtctggcctgttatgcaaagaacaaaaccagacaactaggttttccttaggtagaatgacgaccatttgccagtgtccactgcagtagagacgaatatagtttattgtagtagtatagattatttaaattcaattattgtgtttgacttacctattcagataggctccaaggtaaacatctcgttttgaactctgtatccaactcttgatgtaactttcggattcaaattgtgattgtccagatctctgaatggactgtggctcgaggaatccatacacatcagaattccccgctcgcacacttgtctcagtcagatggctgtgttgttaagtcaaagttaattatgtatgaatttaaaacaattactttggtaattaatagtaatctaaaatgacttacagaatccacaactgtataactgatatgctgagacattgaccaccatgtgcaatttcagagagatcttcgtgctttatatacaacgggaagttttgattaaacaccccgaatatggtagcatcccacataacctggagcggcttcaaaaacagttgtgggatggtcaatgtcatcaggtacaggggatcatcgacctcttcatccgggctttctggaggttttgctggagacacagctgcctattgataaaacatagttaattagcaagttttgattacagtgaacaaattaattgaaaaaaataaacatataatcagagtaaaatacctgttctgataaacgcttcacaagatgtgttggccaagcaaggaaagt

SEQ ID NO: 7302 - DNA, 1079 bp, Glycine max
  Gm_smallRNAprecursor_135
taaggaaattcctagagccttctcttcttttggaggtttctccataatttttctttcctctattttctttgttttggggctgaaatttaaactttgactggaaggcattttcaattgtaacttctttatgcctatatagtctttgctcatatgcttcaagagagcccataagttctgtctctgatagagtggacagatatttggtttcctcaatcgttgtcacgattgggtcaaacttttggggcatagtaattagaattttctcaacaattttcttgtcaagaatatcttccccaaaagctctcatttgattaactatttctttaactttagaatagtaatctttaactgtctcagactccttcatcttcaatagttcaaaatctcttcttagagattgaattttaacggcacgtaccttaacacttccttgaaactcctcctgcaatgtgttccacgcttctttggcagtcttagctcccataattcttgggaaaattggatcagtcaccgcttgttgcaaggtgaacaacgcctttgaatttttttgtttatttttcttcaactctttttcttgagatgcattaagagctgaagtatccgcgggaatggtgaagccttcttctactatgtcccataaatcttgagatgaaaaatatgtttccattttaacacgccagaaatcataattttcaccattgaagatagggacagaaatagttgacgattgagtagtgttatccatagcttagaaaaaatattattagagtgagttaatagtacaaaggaaatttttgaagtagttgggagaattttggaatggtaggtaggtaatataactacgcctaatgtatgaccgaacgtagctctgataccactgttggcagttgattagatgatagttgatagttttagagaattgttttagaaagaaggctatgtcattgatttcttggattgatcaattacaacataccaattgcctatttataggctcaagtcaccaacctctcaatggtggtgaatgtttctacattactttaggtctttctagagttttcatgataaattagtatcat

SEQ ID NO: 7303 - DNA, 1187 bp, Glycine max
  Gm_smallRNAprecursor_136
atcggcttcacgaacgtcccgcagttcttcctccatgcctcctgaagacctagaacagctgacccaacaaatcagagaccaactggaggagtcaatcacagaaaaagtgactcggaagcttatggcatccttcagctagatgtagtcccagttttagtctcacatgcaatcaaagggacttgcactacctccagagccagagtttggtcccttaggtccttgtgtcagcacaaaggagagttgtgttgctccctcagggaacgatccagggatgggtgactcagacaaatgcgggctatacattgaagaaaatccttcccgcttggttgccctaggaagactttataagggatccacaatagttcacaacatccctttgttgcatggccaagtcaaggatggtgttgaagaggttaaagatgcagaagctctcattcctgtacccactgatgaggttaccttaatggggcaggcacttaacaccttccttgcttggctaacacatcttgtgaagcgtttattagaacatgtattttactctggttatatgtttatttttttcaattaatttgttcactgtaatcaaaacttgctaattaactatgtttgatcaacaagcagttgtgtctccagcaaaacctccagaaagcccggatgaagaggtcgatgatcccctgtacctgatgacattgaccatcccacaactgtttttgaagcctctccaggttatgtgggatgctaccatattcggggtgtttaatcaaaacttcccgttatataaagcacgaagatctctctgaaattgcacacggtagtcaatgtcttagcatatctgttatacagttgtggattctgtaagtcattttagattactgttaattaccaaagtaattgttttacattcatacataattaactttggcttaacaacacagccatctgactgagacaagtgtgcaagcgtggaattctgatgtgtatggattcctcgagccgcagttcattcagagatatgggcaatcacaatttgaatccgaaagttacatcaagagttggatgcagagttcaaaacgagatgtttaccttggagcctacctgaatgggtaagtcaaaacaacaattgaatttaaataatctatactactacaataacctatattcgtctctactgcagtggacactggcaa

SEQ ID NO: 7304 - DNA, 1051 bp, Glycine max
  Gm_smallRNAprecursor_137
tttaagatattttttgggtgaatatatgttttaaaatctgaattttgtataataatatatttattttagtaaatatttattttgtataataatctgaattttaaaatttttaatttaactattttactaaatataattagtttgtttatgttactagatttaattaaaaatgatagaacaaaagtttttaacaatttatttatataagaacattatactacgccatcaataaaatatttaaacaatgacatttgtctaaggaaaaactaagatgaggatacattaggacaattatttctgctatgaccatgttgccggcaaagtccacatttttttctacttgctcgttcattttcgtcttcgtccatctcagtaggaatgcgagttgaaacgggacgaccctttgcagtcctctttctccttggatcaggaccccactgatctccttcatattcttgccacattgattcgtctggcaataaaccaaaggagttgtcgtagatgtgcaaaatgtgttgtaaagtgaatatcatcggcacataggtcatgggatcaacattgacagatttacaggcagtcatgacatgagaacacggtaaatgtttagcctgaaattcaccacaatcacacttttgggattgtaacattactctaaaccttccaggtggtctgggtgtttcaagtggggattgagtctctgttataataaaagtgtgattgtgtctgtcgaattcatttacaatgtgtgtattagattcttgttgaccactattgattgcatcgaagacgacttcagaatactatgagccggagttgatcattgcctgagtttgtcgacctctattagcaaagagttgtgcgatcttgaaataggtctcctcaaccaacgatgacaccgccaaatgtcttgtgttttttaacatggaattaacagactccgacaaattggtaatcatatgtccccaacgtttcccctcatcaaagcattgtacccatttttgtttgggtaattgatcaagccattcagctgcacttggcttattcgcacgaa

SEQ ID NO: 7305 - DNA, 1167 bp, Glycine max
  Gm_smallRNAprecursor_138
aataatatatttattttagtaaatatttattttgtataataatctgaattttaaaatttttaatttaactattttactaaatataattagtttgtttatgttactagatttaattaaaaatgatagaacaaaagtttttaacaatttatttatataagaacattatactacgccatcaataaaatatttaaacaatgacatttgtctaaggaaaaactaagatgaggatacattaggacaattatttctgctatgaccatgttgccggcaaagtccacatttttttctacttgctcgttcattttcgtcttcgtccatctcagtaggaatgcgagttgaaacgggacgaccctttgcagtcctctttctccttggatcaggaccccactgatctccttcatattcttgccacattgattcgtctggcaataaaccaaaggagttgtcgtagatgtgcaaaatgtgttgtaaagtgaatatcatcggcacataggtcatgggatcaacattgacagatttacaggcagtcatgacatgagaacacggtaaatgtttagcctgaaattcaccacaatcacacttttgggattgtaacattactctaaaccttccaggtggtctgggtgtttcaagtggggattgagtctctgttataataaaagtgtgattgtgtctgtcgaattcatttacaatgtgtgtattagattcttgttgaccactattgattgcatcgaagacgacttcagaatactatgagccggagttgatcattgcctgagtttgtcgacctctattagcaaagagttgtgcgatcttgaaataggtctcctcaaccaacgatgacaccgccaaatgtcttgtgttttttaacatggaattaacagactccgacaaattggtaatcatatgtccccaacgtttcccctcatcaaagcattgtacccatttttgtttgggtaattgatcaagccattcagctgcacttggcttattcgcacgaatatccccaagatgtcgccagtgcatcttctccgtgtatgcgtaccctataaatatttaatcaatgtattatgttataaaatttgattgaaagaaaattataacgaataaataaaatagattctcaccagccaacataagtggtttctttaaatgtttgcagtttga

SEQ ID NO: 7306 - DNA, 1190 bp, Glycine max
  Gm_smallRNAprecursor_139
caacctctaatcttgaggacttatcatgtgaatacgagacttgttggctcaaaaaccatgatagtgatacggactcctcttccgggcccgaaggaagtaacctgtctccatcccacgaacctatattcaaacgagattggtaatatacggatcattcatgtctaagttatttcttctttgagattttcatgtaatgtcttatgtctgtcttcagttatcactttatgtattgaaataatttttcctttaaatttaaattagcaatttttagtttacccacttttactgcagtagttgacatggtaacataactgtcaaaattcacaatactttgtcatttacactacattgtttttaaaaattaaatgtctcatcgacaaaactgacatgaaatggacaactcataatctctttattcactctgaaaataattatggacgtttgctgctttaattacaagggaaaaataacaatccaaattgacaatactctgcaatttgcacacgtctctaaaaattaaatgtctcacctgtaaaactgtcatgaaatggatagctcatcaactctttattcactctgaaaatcatcgtgaacgtctgttgctttaattacatgggaaaaatcacagtccaaattaacaacactctgcattatgagctgtccatttcatgtcagttttacaggtgatacatttaatttttagagacgtgtgtaaaactgatatgagatggacaactcataatctctttgttcactctgaaattataatgggcgtctgctacatcacttactagggaaaaagaaacattggattccaatacacatcaacgtggcagaatactcatacaactataaataacacaacacagacacaatacaaacacaccatctcacacaacataatttcacaaaccaaattcaatcttattactatgtcattttttggagaaacaagcagtcagaccattactaactctagattagcttttatttttccaaatggatcaatcagttacaaccaaactggtgtttattttcaaagtctcattccaacaccaatgcgagttcctaacaactgttcttttgatacactcaagcgtagaatgcacaacacccttcaactaaccaacgatcaattactggatgaaatctactatcgacaaccattcatagatgcaggtcaacaatat

SEQ ID NO: 7307 - DNA, 1067 bp, Glycine max
  Gm_smallRNAprecursor_140
agatgtaaattttctgcatttcataaaggcaattgtcaatagaatttcatgatatatggaaataaaaattagtaaatacataactactgaaatttatgaaattttaaactaagtgcaagttttagtataaaaatacaggttaggaagtaaccaatgtgccatcttccatcagacgacacgtgaagtggaaaatgacttacaccaagaaaactgatcaaatgatgtttgaggcggcaaagaaaattgctaacaagattgtaagtcactttcaattgtcaattgcaattatttatgtttattgtttgattgagtaaacaaataaatgtgttccttataggattccatggaggagcaggcttcagaggattccattgtcgctcatggacgttaagatgtactgactattgtcattggccgaccagaacaccctggtcgtgtgcgtgctgctggagccgatgtcatgatcaaacaatactttgaaccggctccaaggacctcccacacgtcttcgtccatgactccgaaagacatggagcagttgaggcaaaaaatcagggaccaactggaggagtcaatcacagaaaaagtgactcgacaagtaatgttgtcctttagccagatgcaatcccggtttcaatcgtagatgcaatcacatgtactcgcactacctcctgagcctgaggatggttgttcaactactcgtattagcacaaaggaaaatgttgtcatctggttttgacgatactccacaaagtaaatccaaggctactgctaggtggattgttgctaaagtaagtcatttaaacaatgcttctagttatattttaatactgtgtagactaatttgaaattaacattgaatatctaaatttcataatgtatttagtgtaattgacaaaaaggaagtactgcgtgcgtttattacgtcaggcatcggatgtcaactataatcttaggaagtttcaagaataattggaaaacgataattgtttaactcaaacgtatttcattttgttataattggtattatatattattaacttatgttttattatatcatgtcatat

SEQ ID NO: 7308 - DNA, 1067 bp, Glycine max
  Gm_smallRNAprecursor_141
agatgtaaattttctgcatttcataaaggcaattgtcaatagaatttcatgatatatggaaataaaaattagtaaatacataactactgaaatttataaaattttaaactaagtgcaagttttagtataaaaatacaggttaggaagtaaccaatgtgtcatcttccatcagacgacacgtgaagtggaaaatgacttacaccaagaaaactgatcaaatgatgtttgaggcggcaaagaaaattgctaacaagattgtaagtcactttcaattgtccattgcaattatttatgtttattgtttgattgagtaaacaaataaatgtgttccttataggattccatggaggagcaggcttcagaggattccattgtcgctcatggacgttaagatgtactgactattgtcattggccgaccagaacaccctggtcgtgtgtgtgctgctggagccgatgtcatgatcaaacaatactttgaaccggctccaaggacctcccacacgtcttcgtccatgactccgaaatacatggagcagttgaggcaaaaaatcagggaccaactggaggagtcaatcacagaaaaagtgactcgacaagtaatgttgtcctttagccagatgcaatcccagtttcaatcgtagatgcaatcacatgtactcgcactacctcctgagcctgaggatggttgttcaactactcgtattagcacaaaggaaaatgttgtcatctggttttgacgatactccacaaagtaaatccaaggctactgctaggtggattgttgttaaagtaagtcatttaaacaatgcttctagctatattttaatattgtgtagactaatttgaaattaacattgaatatctaaatttgataatgtatttagtgtaacagacaaaaaggaagtactgtgtgcgggtattacgtcatgcatcggatgtcaactataatcttaggaagtttaaagaataattgaaaaaccataattgtttaattcaaacgtatttcattttgttataattggtattatatattattaacttatgttttattatatcatgtcatat

SEQ ID NO: 7309 - DNA, 1130 bp, Glycine max
  Gm_smallRNAprecursor_142
ttacaagattggtgctgaccactttggttccgactttgcaatggctcaaaggaaaacccattctcctagtaagaaacttttatcatactattttttttatgtattagtgttagaattcagaattctaagttatgctcttggttggtaattggtattgcagcatattggtggcgaatgtttgggtcacaaactccaaatttgcagaagctggctattaagattttgagtttgacttgcagtgcttcaggatgtgaaagaaattggagtgtgtttgagcaagtaattgtgacaaaactctaactatactttttaattttatttaattttgatgatcaagttatatttggagtatatttgagattgaaatcaacatttatttgttatgttgtagattcattccaaaaaaagaaataggcttgagcacaagaggttgcatgatttggtgtttgtcaaatacaaccaacaattgaagcaaagatataatgcaagagatgaaattgatccaatttctcttaatgatattgatgtatgcaatgaatggctcgtgggagagatggatcaagatgatgataatgatgctggaaatgatttggtatttgaagatgatgatgctctaaattgggcaactgtgtatcaggcttcgggggttggagagtgtaggatgtatactaggcggaaaaagcaaaaaacaagtgttgctgctgcccaaacttctaaaaaacaggcaatggttgttggatcttcatcaaggaagcaaaaagcagtccaagaaaatgatgaggatctagatgttgaggagaatattgatgttgaatctgaagaagaagaaatcatggtcaattttgaggcgtctgatggggaagagggagagggagatgctccattaccatatgataacaacgaagatgattatgttgggattggagaagatgattagagcctcaaccttcactttgcactttgcattatgtttttatcattttcttattttgaactctttaatgagtttatttggtgttggtacttgattattgtatgaacttatgaaacttttttagtttatttgaatgcaatcctttgtttttttcaatttcaatgagtttatatatatgttttttttttttttttgt

SEQ ID NO: 7310 - DNA, 1082 bp, Glycine max
  Gm_smallRNAprecursor_143
tcaagatgatgataatgatgctggaaatgatttggtatttgaagatgatgatgctctaaattgggcaactgtgtatcaggcttcgggggttggagagtgtaggatgtatactaggcggaaaaagcaaaaaacaagtgttgctgctgcccaaacttctaaaaaacaggcaatggttgttggatcttcatcaaggaagcaaaaagcagtccaagaaaatgatgaggatctagatgttgaggagaatattgatgttgaatctgaagaagaagaaatcatggtcaattttgaggcgtctgatggggaagagggagagggagatgctccattaccatatgataacaacgaagatgattatgttgggattggagaagatgattagagcctcaaccttcactttgcactttgcattatgtttttatcattttcttattttgaactctttaatgagtttatttggtgttggtacttgattattgtatgaacttatgaaacttttttagtttatttgaatgcaatcctttgtttttttcaatttcaatgagtttatatatatgttttttttttttttttgtgtccgctatgacatccgccattttccgctacgccatccgccatatttttatggcggatttttgactttccgccatgaaccgccatccgccattaacaacattgaaaacaacagaaattttgaaactgagtaccatctatctcttctgtaaataacaataataataataataataataataatagaactatcaattcaattgtctatatatacaggcatcagtgttgttaagtggcggtgccatggccgctatagcagaatggtgtggtggattttttgccaaccccccataggcaatttgtgaaggaaggcccactatggcagcgccattggccgcaattgtgtgtctatatggcggaattttggccttccaccatattccgccattgatagcattgataggcatacagcttggggtggaattgagccaagccaagtcaagctttactaggcttgagcttggtttgagttgaatacgcaagacttgagcttggctcattatctatcatag

SEQ ID NO: 7311 - DNA, 1188 bp, Glycine max
  Gm_smallRNAprecursor_144
ttgaaatagatacaacacataaaaaacctcagcacccactttagactaatagcaatattatttgacataattatacatgactcataaataatttttgtttattctattaattgtattttaaaaactatagtctaccaaatatttaatcgactatgtaattataattgacaacaataattaataacttaaaatattttattaatagtccattattaaaatatatcaaaaagaatttaaaatatgaataattcctaatataaatttaagaaaaatatttatacatttaaaatatttcataaaaatattcgtagataatatttactcgttcatgacacacatcacacattttagttataagtcactggtagaaaaagcggtttcaacgacggtggaaagagacaaacaacgacagtgtttgaccgtctttgaatctaatgtcgttgaaagtgtctcactttcaaagacggtcgaaaggacaccgtcttagaaaatctcaactttcaaagacggtgctgacatcacgaccgtcttagaaaaccaggcttcaaagacggtgttgacgtcacggctgtctttgaaggttggctttctaagacgttgtcgacgtcagcactgtcttagaagcctgactttctaagacgttcgtgatgtcaacaacgtctttgaagcctggctttctaagacggtcgtgatgtcagcaccgtctttgaagcttgactttctaagacgttcgtgatgttagcaccgtctttgaagcctgactttctaagacattcgtgatatcaacaccatcttagaaaaatatttatattacataaaatcagattagaatatattaatcctacactaatgcacgaagttaatgaacgactaacaattaaagtaaatagatttctatatatatatatatatatatatatatatatatataatgtaacataaacctatgatgaattacaatgtttagttaaataaaatagaaatacacacaagggaaaattaaatacagtcacaagcccacgacatcaaatgtaaaggactaacaccaatcatgatacattcctattaaccctctatccattataatcgaaacactatctagcagatcaatggtactcaatgagaggtgcggcaaatctgcaaataacagacttagaggaaactagtcaattaaataagatacaagag

SEQ ID NO: 7312 - DNA, 1128 bp, Glycine max
  Gm_smallRNAprecursor_145
agatacaacacataaaaaacctcagcacccactttagactaatagcaatattatttgacataattatacatgactcataaataatttttgtttattctattaattgtattttaaaaactatagtctaccaaatatttaatcgactatgtaattataattgacaacaataattaataacttaaaatattttattaatagtccattattaaaatatatcaaaaagaatttaaaatatgaataattcctaatataaatttaagaaaaatatttatacatttaaaatatttcataaaaatattcgtagataatatttactcgttcatgacacacatcacacattttagttataagtcactggtagaaaaagcggtttcaacgacggtggaaagagacaaacaacgacagtgtttgaccgtctttgaatctaatgtcgttgaaagtgtctcactttcaaagacggtcgaaaggacaccgtcttagaaaatctcaactttcaaagacggtgctgacatcacgaccgtcttagaaaaccaggcttcaaagacggtgttgacgtcacggctgtctttgaaggttggctttctaagacgttgtcgacgtcagcactgtcttagaagcctgactttctaagacgttcgtgatgtcaacaacgtctttgaagcctggctttctaagacggtcgtgatgtcagcaccgtctttgaagcttgactttctaagacgttcgtgatgttagcaccgtctttgaagcctgactttctaagacattcgtgatatcaacaccatcttagaaaaatatttatattacataaaatcagattagaatatattaatcctacactaatgcacgaagttaatgaacgactaacaattaaagtaaatagatttctatatatatatatatatatatatatatatatatataatgtaacataaacctatgatgaattacaatgtttagttaaataaaatagaaatacacacaagggaaaattaaatacagtcacaagcccacgacatcaaatgtaaaggactaacaccaatcatgatacattcctattaaccctctatccattataatcgaaacactatctagcagatcaatggtactcaatgagaggtgcggcaa

SEQ ID NO: 7313 - DNA, 1173 bp, Glycine max
  Gm_smallRNAprecursor_146
agatacaacacataaaaaacctcagcacccactttagactaatagcaatattatttgacataattatacatgactcataaataatttttgtttattctattaattgtattttaaaaactatagtctaccaaatatttaatcgactatgtaattataattgacaacaataattaataacttaaaatattttattaatagtccattattaaaatatatcaaaaagaatttaaaatatgaataattcctaatataaatttaagaaaaatatttatacatttaaaatatttcataaaaatattcgtagataatatttactcgttcatgacacacatcacacattttagttataagtcactggtagaaaaagcggtttcaacgacggtggaaagagacaaacaacgacagtgtttgaccgtctttgaatctaatgtcgttgaaagtgtctcactttcaaagacggtcgaaaggacaccgtcttagaaaatctcaactttcaaagacggtgctgacatcacgaccgtcttagaaaaccaggcttcaaagacggtgttgacgtcacggctgtctttgaaggttggctttctaagacgttgtcgacgtcagcactgtcttagaagcctgactttctaagacgttcgtgatgtcaacaacgtctttgaagcctggctttctaagacggtcgtgatgtcagcaccgtctttgaagcttgactttctaagacgttcgtgatgttagcaccgtctttgaagcctgactttctaagacattcgtgatatcaacaccatcttagaaaaatatttatattacataaaatcagattagaatatattaatcctacactaatgcacgaagttaatgaacgactaacaattaaagtaaatagatttctatatatatatatatatatatatatatatatatataatgtaacataaacctatgatgaattacaatgtttagttaaataaaatagaaatacacacaagggaaaattaaatacagtcacaagcccacgacatcaaatgtaaaggactaacaccaatcatgatacattcctattaaccctctatccattataatcgaaacactatctagcagatcaatggtactcaatgagaggtgcggcaaatctgcaaataacagacttagaggaaactagtcaattaaataaga

SEQ ID NO: 7314 - DNA, 1113 bp, Glycine max
  Gm_smallRNAprecursor_147
actttagactaatagcaatattatttgacataattatacatgactcataaataatttttgtttattctattaattgtattttaaaaactatagtctaccaaatatttaatcgactatgtaattataattgacaacaataattaataacttaaaatattttattaatagtccattattaaaatatatcaaaaagaatttaaaatatgaataattcctaatataaatttaagaaaaatatttatacatttaaaatatttcataaaaatattcgtagataatatttactcgttcatgacacacatcacacattttagttataagtcactggtagaaaaagcggtttcaacgacggtggaaagagacaaacaacgacagtgtttgaccgtctttgaatctaatgtcgttgaaagtgtctcactttcaaagacggtcgaaaggacaccgtcttagaaaatctcaactttcaaagacggtgctgacatcacgaccgtcttagaaaaccaggcttcaaagacggtgttgacgtcacggctgtctttgaaggttggctttctaagacgttgtcgacgtcagcactgtcttagaagcctgactttctaagacgttcgtgatgtcaacaacgtctttgaagcctggctttctaagacggtcgtgatgtcagcaccgtctttgaagcttgactttctaagacgttcgtgatgttagcaccgtctttgaagcctgactttctaagacattcgtgatatcaacaccatcttagaaaaatatttatattacataaaatcagattagaatatattaatcctacactaatgcacgaagttaatgaacgactaacaattaaagtaaatagatttctatatatatatatatatatatatatatatatatataatgtaacataaacctatgatgaattacaatgtttagttaaataaaatagaaatacacacaagggaaaattaaatacagtcacaagcccacgacatcaaatgtaaaggactaacaccaatcatgatacattcctattaaccctctatccattataatcgaaacactatctagcagatcaatggtactcaatgagaggtgcggcaaatctgcaaataacag

SEQ ID NO: 7315 - DNA, 1157 bp, Glycine max
  Gm_smallRNAprecursor_148
actttagactaatagcaatattatttgacataattatacatgactcataaataatttttgtttattctattaattgtattttaaaaactatagtctaccaaatatttaatcgactatgtaattataattgacaacaataattaataacttaaaatattttattaatagtccattattaaaatatatcaaaaagaatttaaaatatgaataattcctaatataaatttaagaaaaatatttatacatttaaaatatttcataaaaatattcgtagataatatttactcgttcatgacacacatcacacattttagttataagtcactggtagaaaaagcggtttcaacgacggtggaaagagacaaacaacgacagtgtttgaccgtctttgaatctaatgtcgttgaaagtgtctcactttcaaagacggtcgaaaggacaccgtcttagaaaatctcaactttcaaagacggtgctgacatcacgaccgtcttagaaaaccaggcttcaaagacggtgttgacgtcacggctgtctttgaaggttggctttctaagacgttgtcgacgtcagcactgtcttagaagcctgactttctaagacgttcgtgatgtcaacaacgtctttgaagcctggctttctaagacggtcgtgatgtcagcaccgtctttgaagcttgactttctaagacgttcgtgatgttagcaccgtctttgaagcctgactttctaagacattcgtgatatcaacaccatcttagaaaaatatttatattacataaaatcagattagaatatattaatcctacactaatgcacgaagttaatgaacgactaacaattaaagtaaatagatttctatatatatatatatatatatatatatatatatataatgtaacataaacctatgatgaattacaatgtttagttaaataaaatagaaatacacacaagggaaaattaaatacagtcacaagcccacgacatcaaatgtaaaggactaacaccaatcatgatacattcctattaaccctctatccattataatcgaaacactatctagcagatcaatggtactcaatgagaggtgcggcaaatctgcaaataacagacttagaggaaactagtcaattaaataagatacaagagtcataa

SEQ ID NO: 7316 - DNA, 1035 bp, Glycine max
  Gm_smallRNAprecursor_149
caatgtagccatgtttgcattttgtgggtcaacaaacatctttgtctttcgcctataccagaccatgtagtctgagttaaagctcaataggccttcttgtcggggataagcgtcgaccctaaatgcatggcgattattccattgatgaatcattggggcgaacaattgcccccaatttttgtcatgtttccctcttaatgttatgccatgaatgtttaagggttgcgaaggagactctggaattggttgctgcatcccaaattgtctcaatactctgtccggttggtgccactcaataacttggaaacaaattagtggcaccaccgcgtatcacgcgagacttccgactacacaaatgggaggcaacaatgatataacggttgctgtgtaaggctcccacacaaactgcatataacaacatagttgtcaacattttagtaaaataacacatatcattttttattttacaaatacaataccattttcttatctcatgacgtttcataatatccaacttgcgacgaaaaactctcacatcatcattgccgatatgttggttttcacgtcgcagccacctacaaagattaaaatttaatataccctaaaaccatttattctattgaaatgaaagacgcttttaaaaatgactaacctgtgccccagtggtttattttctacttgggaaggagtcctctttggagccaaggttggacatcgttcccatgcccacatttgtagtaagatgcacatacctccgattgatttagttttataatcggtgacactgcacatctctctgtatagaaagccaagtacaacagctccccatgcatatgtgccacagtcttcaaagtcacgtaaaaattgaaggtaccttagcgaaactttgttactgcttttgtcaacgaacaagacacctccaatgaatctcaatatccatgcacgggcaaaccttcatacttgttcttcgtcatcgtcgttatttatttgtgcaaaatggtgagccagccaacttaatttaaccacactaccttt

SEQ ID NO: 7317 - DNA, 1157 bp, Glycine max
  Gm_smallRNAprecursor_150
aggcaacaatgatataacggttgctgtgtaaggctcccacacaaactgcatataacaacatagttgtcaacattttagtaaaataacacatatcattttttattttacaaatacaataccattttcttatctcatgacgtttcataatatccaacttgcgacgaaaaactctcacatcatcattgccgatatgttggttttcacgtcgcagccacctacaaagattaaaatttaatataccctaaaaccatttattctattgaaatgaaagacgcttttaaaaatgactaacctgtgccccagtggtttattttctacttgggaaggagtcctctttggagccaaggttggacatcgttcccatgcccacatttgtagtaagatgcacatacctccgattgatttagttttataatcggtgacactgcacatctctctgtatagaaagccaagtacaacagctccccatgcatatgtgccacagtcttcaaagtcacgtaaaaattgaaggtaccttagcgaaactttgttactgcttttgtcaacgaacaagacacctccaatgaatctcaatatccatgcacgggcaaaccttcatacttgttcttcgtcatcgtcgttatttatttgtgcaaaatggtgagccagccaacttaatttaaccacactacctttaatttcaccttcttgtggtctgactcccaataattcctcacataaattagcccaatcaagatttgttggaccgattaatggtaaaacatccacacttatacctaacaatacaaagacgtcttggagagtaatagtacactctccgcatctcatgtgaaacgtatgtgtttccagcctccatctttctatcagagcactaattaatgaggcatttatttttaagtatcacatcttcataatccagtaaaaaccagattgtcgaagaaaaggaaaaatttgctctgaaatttcttattccccttgatacgtggggacaactcctccgatatgtaatttccgatcttcttccccattccaaacatgttctgaaacatgcttaggttgcatccataatacatcagcatcgatggggccagacttaatgttaatatgtgatgaacatgacgatgaagatgtcattgctattgcaaagtaaaatataa

SEQ ID NO: 7318 - DNA, 1158 bp, Glycine max
  Gm_smallRNAprecursor_151
aggcaacaatgatataacggttgctgtgtaaggctcccacacaaactgcatataacaacatagttgtcaacattttagtaaaataacacatatcattttttattttacaaatacaataccattttcttatctcatgacgtttcataatatccaacttgcgacgaaaaactctcacatcatcattgccgatatgttggttttcacgtcgcagccacctacaaagattaaaatttaatataccctaaaaccatttattctattgaaatgaaagacgcttttaaaaatgactaacctgtgccccagtggtttattttctacttgggaaggagtcctctttggagccaaggttggacatcgttcccatgcccacatttgtagtaagatgcacatacctccgattgatttagttttataatcggtgacactgcacatctctctgtatagaaagccaagtacaacagctccccatgcatatgtgccacagtcttcaaagtcacgtaaaaattgaaggtaccttagcgaaactttgttactgcttttgtcaacgaacaagacacctccaatgaatctcaatatccatgcacgggcaaaccttcatacttgttcttcgtcatcgtcgttatttatttgtgcaaaatggtgagccagccaacttaatttaaccacactacctttaatttcaccttcttgtggtctgactcccaataattcctcacataaattagcccaatcaagatttgttggaccgattaatggtaaaacatccacacttatacctaacaatacaaagacgtcttggagagtaatagtacactctccgcatctcatgtgaaacgtatgtgtttccagcctccatctttctatcagagcactaattaatgaggcatttatttttaagtatcacatcttcataatccagtaaaaaccagattgtcgaagaaaaggaaaaatttgctctgaaatttcttattccccttgatacgtggggacaactcctccgatatgtaatttccgatcttcttccccattccaaacatgttctgaaacatgcttaggttgcatccataatacatcagcatcgatggggccagacttaatgttaatatgtgatgaacatgacgatgaagatgtcattgctattgcaaagtaaaatataat

SEQ ID NO: 7319 - DNA, 1155 bp, Glycine max
  Gm_smallRNAprecursor_152
gcaacaatgatataacggttgctgtgtaaggctcccacacaaactgcatataacaacatagttgtcaacattttagtaaaataacacatatcattttttattttacaaatacaataccattttcttatctcatgacgtttcataatatccaacttgcgacgaaaaactctcacatcatcattgccgatatgttggttttcacgtcgcagccacctacaaagattaaaatttaatataccctaaaaccatttattctattgaaatgaaagacgcttttaaaaatgactaacctgtgccccagtggtttattttctacttgggaaggagtcctctttggagccaaggttggacatcgttcccatgcccacatttgtagtaagatgcacatacctccgattgatttagttttataatcggtgacactgcacatctctctgtatagaaagccaagtacaacagctccccatgcatatgtgccacagtcttcaaagtcacgtaaaaattgaaggtaccttagcgaaactttgttactgcttttgtcaacgaacaagacacctccaatgaatctcaatatccatgcacgggcaaaccttcatacttgttcttcgtcatcgtcgttatttatttgtgcaaaatggtgagccagccaacttaatttaaccacactacctttaatttcaccttcttgtggtctgactcccaataattcctcacataaattagcccaatcaagatttgttggaccgattaatggtaaaacatccacacttatacctaacaatacaaagacgtcttggagagtaatagtacactctccgcatctcatgtgaaacgtatgtgtttccagcctccatctttctatcagagcactaattaatgaggcatttatttttaagtatcacatcttcataatccagtaaaaaccagattgtcgaagaaaaggaaaaatttgctctgaaatttcttattccccttgatacgtggggacaactcctccgatatgtaatttccgatcttcttccccattccaaacatgttctgaaacatgcttaggttgcatccataatacatcagcatcgatggggccagacttaatgttaatatgtgatgaacatgacgatgaagatgtcattgctattgcaaagtaaaatataa

SEQ ID NO: 7320 - DNA, 1036 bp, Glycine max
  Gm_smallRNAprecursor_153
ttttcttatctcatgacgtttcataatatccaacttgcgacgaaaaactctcacatcatcattgccgatatgttggttttcacgtcgcagccacctacaaagattaaaatttaatataccctaaaaccatttattctattgaaatgaaagacgcttttaaaaatgactaacctgtgccccagtggtttattttctacttgggaaggagtcctctttggagccaaggttggacatcgttcccatgcccacatttgtagtaagatgcacatacctccgattgatttagttttataatcggtgacactgcacatctctctgtatagaaagccaagtacaacagctccccatgcatatgtgccacagtcttcaaagtcacgtaaaaattgaaggtaccttagcgaaactttgttactgcttttgtcaacgaacaagacacctccaatgaatctcaatatccatgcacgggcaaaccttcatacttgttcttcgtcatcgtcgttatttatttgtgcaaaatggtgagccagccaacttaatttaaccacactacctttaatttcaccttcttgtggtctgactcccaataattcctcacataaattagcccaatcaagatttgttggaccgattaatggtaaaacatccacacttatacctaacaatacaaagacgtcttggagagtaatagtacactctccgcatctcatgtgaaacgtatgtgtttccagcctccatctttctatcagagcactaattaatgaggcatttatttttaagtatcacatcttcataatccagtaaaaaccagattgtcgaagaaaaggaaaaatttgctctgaaatttcttattccccttgatacgtggggacaactcctccgatatgtaatttccgatcttcttccccattccaaacatgttctgaaacatgcttaggttgcatccataatacatcagcatcgatggggccagacttaatgttaatatgtgatgaacatgacgatgaagatgtcattgctattgcaaagtaaaatataa

SEQ ID NO: 7321 - DNA, 1037 bp, Glycine max
  Gm_smallRNAprecursor_154
ttttcttatctcatgacgtttcataatatccaacttgcgacgaaaaactctcacatcatcattgccgatatgttggttttcacgtcgcagccacctacaaagattaaaatttaatataccctaaaaccatttattctattgaaatgaaagacgcttttaaaaatgactaacctgtgccccagtggtttattttctacttgggaaggagtcctctttggagccaaggttggacatcgttcccatgcccacatttgtagtaagatgcacatacctccgattgatttagttttataatcggtgacactgcacatctctctgtatagaaagccaagtacaacagctccccatgcatatgtgccacagtcttcaaagtcacgtaaaaattgaaggtaccttagcgaaactttgttactgcttttgtcaacgaacaagacacctccaatgaatctcaatatccatgcacgggcaaaccttcatacttgttcttcgtcatcgtcgttatttatttgtgcaaaatggtgagccagccaacttaatttaaccacactacctttaatttcaccttcttgtggtctgactcccaataattcctcacataaattagcccaatcaagatttgttggaccgattaatggtaaaacatccacacttatacctaacaatacaaagacgtcttggagagtaatagtacactctccgcatctcatgtgaaacgtatgtgtttccagcctccatctttctatcagagcactaattaatgaggcatttatttttaagtatcacatcttcataatccagtaaaaaccagattgtcgaagaaaaggaaaaatttgctctgaaatttcttattccccttgatacgtggggacaactcctccgatatgtaatttccgatcttcttccccattccaaacatgttctgaaacatgcttaggttgcatccataatacatcagcatcgatggggccagacttaatgttaatatgtgatgaacatgacgatgaagatgtcattgctattgcaaagtaaaatataat

SEQ ID NO: 7322 - DNA, 1045 bp, Glycine max
  Gm_smallRNAprecursor_155
gatcagtttttccccttcaccaattactctgtatttgttgttattaatccatgcatgcttagtgcttgattagttgtctctgcgcttaatttacgttcatgcttaatgatcagtttcgttcatgattaattggtgtatgtgctgcttaatcacataatgacagccttatgttaattttcacctagtaatttaatttagggttggattaagtggttgaactggttagggataaatcctcgtaacctaggataagagacttgcgtgtgaatcaagggaaaacaacatgttttaattctattattttctaattaaaatttgcttcctgtttaaattacaaaaacaaacaaccccccccccccaattcattactattttattgagtgaataggcaatttagtccctgagattgtacccatttttcatattagtccctaacttaatattaaattcaaaatagtccctatctttgcaaaagtgttgcaaaatagtccttccgttaaattttaaagtaacgccgttagtgaggtcaattttagtgccacgtggactatccaacgtgacactaaaggatgacgtggcataacacgtggacgtgcctcctaaaagatgccacgtcatttgatgataacaaaacgagtaaataagcaatttagtccctgattttgtacccctattgcatattagtccctaacttaatgaaaaattcaaaatagtccctatcttttgcataagtgttgcaaaatagtacctaacttaaaagatgccggaaatcgtgcttaaagtgtccatgcattgcaaaggttgtgcctagcatgatttctggcggcgcagattcctccttggattccttgtcatcttttgattcctctggttttttctcttcttctttcttttcttcttcatttgcttttttctcctccactttgttttcctctggtttcttctcttcctattcaaaacacacaaaaaaaaatcagaacccagaatgatatattgatggtaattgaagaaagaaaaaaggaaaagagaatggttatgcagacct

SEQ ID NO: 7323 - DNA, 1044 bp, Glycine max
  Gm_smallRNAprecursor_156
atcagtttttccccttcaccaattactctgtatttgttgttattaatccatgcatgcttagtgcttgattagttgtctctgcgcttaatttacgttcatgcttaatgatcagtttcgttcatgattaattggtgtatgtgctgcttaatcacataatgacagccttatgttaattttcacctagtaatttaatttagggttggattaagtggttgaactggttagggataaatcctcgtaacctaggataagagacttgcgtgtgaatcaagggaaaacaacatgttttaattctattattttctaattaaaatttgcttcctgtttaaattacaaaaacaaacaaccccccccccccaattcattactattttattgagtgaataggcaatttagtccctgagattgtacccatttttcatattagtccctaacttaatattaaattcaaaatagtccctatctttgcaaaagtgttgcaaaatagtccttccgttaaattttaaagtaacgccgttagtgaggtcaattttagtgccacgtggactatccaacgtgacactaaaggatgacgtggcataacacgtggacgtgcctcctaaaagatgccacgtcatttgatgataacaaaacgagtaaataagcaatttagtccctgattttgtacccctattgcatattagtccctaacttaatgaaaaattcaaaatagtccctatcttttgcataagtgttgcaaaatagtacctaacttaaaagatgccggaaatcgtgcttaaagtgtccatgcattgcaaaggttgtgcctagcatgatttctggcggcgcagattcctccttggattccttgtcatcttttgattcctctggttttttctcttcttctttcttttcttcttcatttgcttttttctcctccactttgttttcctctggtttcttctcttcctattcaaaacacacaaaaaaaaatcagaacccagaatgatatattgatggtaattgaagaaagaaaaaaggaaaagagaatggttatgcagacct

SEQ ID NO: 7324 - DNA, 1044 bp, Glycine max; identical to SEQ ID NO: 7323
  Gm_smallRNAprecursor_157

SEQ ID NO: 7325 - DNA, 1043 bp, Glycine max
  Gm_smallRNAprecursor_158
tcagtttttccccttcaccaattactctgtatttgttgttattaatccatgcatgcttagtgcttgattagttgtctctgcgcttaatttacgttcatgcttaatgatcagtttcgttcatgattaattggtgtatgtgctgcttaatcacataatgacagccttatgttaattttcacctagtaatttaatttagggttggattaagtggttgaactggttagggataaatcctcgtaacctaggataagagacttgcgtgtgaatcaagggaaaacaacatgttttaattctattattttctaattaaaatttgcttcctgtttaaattacaaaaacaaacaaccccccccccccaattcattactattttattgagtgaataggcaatttagtccctgagattgtacccatttttcatattagtccctaacttaatattaaattcaaaatagtccctatctttgcaaaagtgttgcaaaatagtccttccgttaaattttaaagtaacgccgttagtgaggtcaattttagtgccacgtggactatccaacgtgacactaaaggatgacgtggcataacacgtggacgtgcctcctaaaagatgccacgtcatttgatgataacaaaacgagtaaataagcaatttagtccctgattttgtacccctattgcatattagtccctaacttaatgaaaaattcaaaatagtccctatcttttgcataagtgttgcaaaatagtacctaacttaaaagatgccggaaatcgtgcttaaagtgtccatgcattgcaaaggttgtgcctagcatgatttctggcggcgcagattcctccttggattccttgtcatcttttgattcctctggttttttctcttcttctttcttttcttcttcatttgcttttttctcctccactttgttttcctctggtttcttctcttcctattcaaaacacacaaaaaaaaatcagaacccagaatgatatattgatggtaattgaagaaagaaaaaaggaaaagagaatggttatgcagacct

SEQ ID NO: 7326 - DNA, 1157 bp, Glycine max
  Gm_smallRNAprecursor_159
ggcaacaatgatataacggttgatgagtaaggctcccacacaaactgcatataacaacatagttgtgaacattgtagtaaaataagacatacaattttgtattttacaaatacagtagcatggttcttacctcatgacgtttcataatatccaacttgcgacgaaaaactttcacatcatcattgtcgatatgttggtttccacgtcgcagccacctacaaagaataaaatttaatataccctaaaaccatttattctattgaaatgaaagacgctgttaaaaatgactgacctatgccctagtggtatattttctatttgggaaggagtcctctttggagccaaggttggacatcgttcccatgcccacaattgtagtaagatgcacatacctccgattgatttagttttataatcggtggcactgcacatctctctgtatagaaaaccaagtacggcagctccccatgcatatctgctacattcttcaaagtcacgtaaaaattgaaggtaccttagcgaaactctgttactggttttgtcaacgaacaagacacctccaataaatctcaatatccatgcacgggcaaaccttcgtacttgttcttcgtcgtcgtcattattaatttgatcaaaatggtgagccagccaacttaatttaaccacactacctttaatttcaccttcttgtggtctaactcccaataagtcctcacataaatcagcctaatcaagatttgttggaccgattaatggtaaaccatccacacttatacctaacaacacaaagacgtcttgtaaagtgatagtacactctccgcatctcatgtgaaacgtatgtgtttctggcctccatctttctatcagagcactaattagtgagacatttatttttaagtatcccatcttgataatccacccgaaaccagattgttgaagaaaaggaaaaatttgttctggaatttgttcttccccttgatacgtggggacaactcgtctgatatgtaatttcctttcttcttccccattccaaacatgttctgaaacatgcttaggttgcatccataatacatcagtatcgatggggccagatttaatgttaatatgtgatgaagatgatgatgaagatgccattgctactgcaaaataaaatataa

SEQ ID NO: 7327 - DNA, 1158 bp, Glycine max
  Gm_smallRNAprecursor_160
ggcaacaatgatataacggttgatgagtaaggctcccacacaaactgcatataacaacatagttgtgaacattgtagtaaaataagacatacaattttgtattttacaaatacagtagcatggttcttacctcatgacgtttcataatatccaacttgcgacgaaaaactttcacatcatcattgtcgatatgttggtttccacgtcgcagccacctacaaagaataaaatttaatataccctaaaaccatttattctattgaaatgaaagacgctgttaaaaatgactgacctatgccctagtggtatattttctatttgggaaggagtcctctttggagccaaggttggacatcgttcccatgcccacaattgtagtaagatgcacatacctccgattgatttagttttataatcggtggcactgcacatctctctgtatagaaaaccaagtacggcagctccccatgcatatctgctacattcttcaaagtcacgtaaaaattgaaggtaccttagcgaaactctgttactggttttgtcaacgaacaagacacctccaataaatctcaatatccatgcacgggcaaaccttcgtacttgttcttcgtcgtcgtcattattaatttgatcaaaatggtgagccagccaacttaatttaaccacactacctttaatttcaccttcttgtggtctaactcccaataagtcctcacataaatcagcctaatcaagatttgttggaccgattaatggtaaaccatccacacttatacctaacaacacaaagacgtcttgtaaagtgatagtacactctccgcatctcatgtgaaacgtatgtgtttctggcctccatctttctatcagagcactaattagtgagacatttatttttaagtatcccatcttgataatccacccgaaaccagattgttgaagaaaaggaaaaatttgttctggaatttgttcttccccttgatacgtggggacaactcgtctgatatgtaatttcctttcttcttccccattccaaacatgttctgaaacatgcttaggttgcatccataatacatcagtatcgatggggccagatttaatgttaatatgtgatgaagatgatgatgaagatgccattgctactgcaaaataaaatataat

SEQ ID NO: 7328 - DNA, 1155 bp, Glycine max
  Gm_smallRNAprecursor_161
caacaatgatataacggttgatgagtaaggctcccacacaaactgcatataacaacatagttgtgaacattgtagtaaaataagacatacaattttgtattttacaaatacagtagcatggttcttacctcatgacgtttcataatatccaacttgcgacgaaaaactttcacatcatcattgtcgatatgttggtttccacgtcgcagccacctacaaagaataaaatttaatataccctaaaaccatttattctattgaaatgaaagacgctgttaaaaatgactgacctatgccctagtggtatattttctatttgggaaggagtcctctttggagccaaggttggacatcgttcccatgcccacaattgtagtaagatgcacatacctccgattgatttagttttataatcggtggcactgcacatctctctgtatagaaaaccaagtacggcagctccccatgcatatctgctacattcttcaaagtcacgtaaaaattgaaggtaccttagcgaaactctgttactggttttgtcaacgaacaagacacctccaataaatctcaatatccatgcacgggcaaaccttcgtacttgttcttcgtcgtcgtcattattaatttgatcaaaatggtgagccagccaacttaatttaaccacactacctttaatttcaccttcttgtggtctaactcccaataagtcctcacataaatcagcctaatcaagatttgttggaccgattaatggtaaaccatccacacttatacctaacaacacaaagacgtcttgtaaagtgatagtacactctccgcatctcatgtgaaacgtatgtgtttctggcctccatctttctatcagagcactaattagtgagacatttatttttaagtatcccatcttgataatccacccgaaaccagattgttgaagaaaaggaaaaatttgttctggaatttgttcttccccttgatacgtggggacaactcgtctgatatgtaatttcctttcttcttccccattccaaacatgttctgaaacatgcttaggttgcatccataatacatcagtatcgatggggccagatttaatgttaatatgtgatgaagatgatgatgaagatgccattgctactgcaaaataaaatataa

SEQ ID NO: 7329 - DNA, 1036 bp, Glycine max
  Gm_smallRNAprecursor_162
gaaatttggatattaaatgttaactacaattagtgtacacagacataaaatatatatataagtagaagttttatttaaatcatataccttaacaacaatccaccttgcaccagccttggatttaggttgtggagtatcatcaagtcctttcaaagcactgttgaatacaaggaacattaaaattttgatgttgttgagttatgctaatacaaatgtattgaaaagcaacactgacctattaattattcctttaaggtagttgtctggcctgttatgcaaggaacaaaaccagacaacaagattttccttaggcaaaatgacgaccatttgccagtgtgcactgcagtggagatcaatatgggttattgtagtattatacattatttaaattcagttgttcaatttgacttacccatttaggtaggctccaaggtagacatcgcgttttgaactctgcatccaactcttcatgtaactttctgattcaaatttcgattgcccagatctctgaatggactgtggctcgaggaatccatacacatcagaattccccgctcgcatacttgtcttagtcagatgcctattgttgttaatacaaagttaattatgtatgaatttaaaacaataacttaggtaattaacaataatctaaattgacttacagaatccacaactgtataacaaatatgccgagacattgaccaccgtgtgcaatttcaaagagatctttgtgttttatgtacaactggaagtcttcattaaacaccccgaacacagtagcatcccacataacctggagaggcttcaaaaaaaagttgtgggatggtcaatgtcatcaaatataggggatcatcgacctcatgatctggcctatctagaggttttgctggagacacaactgcttgtttatccaacaaagttaattaacataatttaattacagtgaacaattcaattgaaaaaaaaagcatataatgagagtaaaatacctgttatgataaatgcttcacgagatgtgtcggccaagcaaggaagg

SEQ ID NO: 7330 - DNA, 1112 bp, Glycine max
  Gm_smallRNAprecursor_163
cccgagtgtccttcgcaaccactgaatatccatggcctaacgttgaaaggcaaacaagttgaaaattggtttcagctgttggtcccaatgatcagtcaatggaacaatcgagctgagtttagggtcgacgtttatcctcgacaggagggcctattgagttttaactctgacttcatagtctggtataggtgaaaaacgaagatgtttgtcaacccaaagaatgcaaacacagctacattggtatttatttcttttagaatatttaacttcaatttattttttaaagcatgggcattaatttcctgacactaataattgcaggctgaagttgcagagacattacagtatatgttgtcacaccacaagggaggaacacatggacaattgatgatctcgtgccttatgtggagaagataacgattttatctgaagagcaagagagaatcactgagcctgtgacacatggtctagcattagagcatcgatttccactacaagagtttcacatgcttcagtcaagtgttgaaattcggggttttgacagatgaagggaggatgttgaagcgcaagaattttcccaacaaattgaggagcgtggccatggaatgtattacacgccaccaacattttctcagtatgcttcgcagatgtatcagtatccattcaaaggtcatcacattgatatgtctgcaagcgaacattcgttcggtggtgttgtggaaacacatcctcatttttcatggccgactatgacccattcacagcaacatgatgccccaatgacaacacctaacgccccattagctctgcaatggaatgtactcggagcaatacctgatatgggtgacttattaggtgttgatttgcgtcagtagttttctgttgaggctgagcaagtagaagcggggagacatcgcggtagaagaaatcctgatcgtcaagcgcgaagatgggatcaaccatgtggcacatcctcgcgtcatcacggacatcataatgaatgattttcatgtctctgtttaaatttgttgttgtatgtttgtcatttgaatttgatacttaatctatcgtatgtcatttattaaggcttactaatggttacagtttatgtc

SEQ ID NO: 7331 - DNA, 1079 bp, Glycine max
  Gm_smallRNAprecursor_164
taaggaaattcctagaaccttctcttcttctagaagtttctccataatttttctttcctctattttctttgttttggggctgaaatttaaactttgactggaaggcatttttaattgtatcttctttatgcctatacaatctttgctcatatgttttaagagagcccacaagttttgtctctgatagagtggacagatctttggtttcctcaattgttgtcacgattgggtcaaacttttggggcatagtaattagaattttctcaacaattttcttgtcaataatatcttccccaaaagctctcatttgattaactattcctttaactttagaatagtaatctttaactgtctcggactccttcatcttcaatagttcaaaatctcttcttagagattgaagtttaacggcacgtaccttaacacttccttgaaattcctcctgcaatgtgttccacgcttctttggcagtcttagctcccataattcttgggaaaattggatcagtcaccgcttgttgcaaggtgaacaacgcctttgaatttttctgtttatttttcttcaactctttttcttgagatgcattaagagctgaagtatccgcgggaatggtgaagccttcttctactatgtcccataaatcttgagatgaaaaatatgtttccattttagcacgccagaaatcataattttcaccattgaagatagggacagaaataattgacgattgagtagtgttatccatagcttagaaaaaatattattggagtgggttagtagtacaaaggaaatttttgaagtagttgggaggattttggaatggtaggtaggtaagataactacgcccaatgtatgaccgaacgtagctttgatgccactgttggtagttggttagatgatagttgatagttttagagaattgttttagaaagaaggctatgtcattgatttcttggattgtcaattacaacataccaattgcctatttataggctcaagtcaccaacctctcaatggtggtgaacgtttctacattactttaggtctttctagagttttcatgatagattagtatcatg

SEQ ID NO: 7332 - DNA, 1120 bp, Glycine max
  Gm_smallRNAprecursor_165
atagtacacttaattaatcacattatcactagttcatctgtgtaagttaagagtgtaattactacaaaagcaatagtaccttttgttaaatgttaaggggagttgatcaataaaaatgtttagatactaaaaaaatcctaaaatacttaagactaaaaaactaataaactctaaaaataacattattaagaaacattttgcggggtggctcttggatggacttgctggtttcttgacagatttttttattaagaaacatttgggaaataatgaggcacgatacaggagatacaatgtttgttttcctttcttagtttatctgatctttgtgaaggttaacttatcatgcattagcctgtaaaaaaaaattatgaacttgttctatttattactatctaaaaatgttgttactgcaattctacagagggaatggagaacgggaagcggtgggggtagcagccactggcaatcacaaaaaaaaaactatctaagacggttttaaaagaaccgtcgtagtatgtctacgaaactaaggcggtcatggtgataactgtcgtagcaagtcaacagcaaaaacgctattctaagacggttatcaaaataaccgtcttagttactaagacatactacgacggttcttttaaaaccgtcttagaattcacatgctgactacagcatattacatcgggtttagtacgtggaccgcctttgtatctactacattctaagacggttattaaataaccgtcttagaaaacattagcttttacgacggttcaaaaaccgttgttgtaagtgtattatgatattacgacactggcttataagacggttcaaaaccgtcgtaaaaggtcttaaataaccgacttaaaagatcattattgtagtagtgaacttggcttaggattgactaaaagtaagggaacggtgaaaaagttgcaacaaaaccttgacaagcatgtcgcctatatgtccagtaagactaaggaaaacaaggccttgagtggccgagttgttgacctagagcagcaagtgaaggtcataggcaagaagatgaaggatctaaccttggagaagaagatgactaaggaggagttagggaccgcaagggacgagatgg

SEQ ID NO: 7333 - DNA, 1051 bp, Glycine max
  Gm_smallRNAprecursor_166
attatttttttacattatttaatttatttaagatatttttggttgaatatttgttttaaaatctgaattttgtataataatatatttattttagaaaaaaatttaaatattaaatttaattattttactaaatataattagttagtttatgtcattagatttaattaaaaatgataaaactaaagcttttaacaatttatttatagaagaatattatactgcattatcaataaaatatttaaacaatgacatttgggtaaagaaaaacaagatgaggatatattaggacaattgtttctgctatgatcatgttgccgataaagtccacatttttttctacttgcttgttcattttcatcttcgtccatctcagtaggaatgcgagttgaaatgggacgaccctttgtagtcctctttctccttggatcaggactccactaatctccttcatattcttgccacattgattcgtgtggcaataaaccaaaggagttgtcgtagatgtgcaaaatgtgttgtaaagtgaataacatcgacacataggtcatgggatcaacattgacagatttacagacagtcatgacgtgagaacacgataagtgtttagcctgatattcaccacaatcacacttttgggattgtaacattactctaaatctttcaggtggtctgggtgtttcaagtggggattgagtctctgttataataaaagtgtgattatgtctgtcgaattcatttacaatgtgtgtattagattcttgttgtccgctattcattgcatcgaagacgacttcagaatactgtgaaccggagttgatcattgcctgagtttgtcgacctctattagcaaagagttgtgcggtcttgaaatacgtctcctcaaccaacgatgacaccagcaaatgtcttgtgtttttgaacatggaattaacagactctgacaaattggtagtcatatgtccccaacgtttcccctcatcgaagcattgtaccaatttttgtttgggtaattaatcaagccatttagctgcacttggcttattcgcacgaa

SEQ ID NO: 7334 - DNA, 1040 bp, Glycine max
  Gm_smallRNAprecursor_167
attcgcacgaatatccccaagatgttgccagtgcatcttctctatgtatgcgtaacctgtaaatattcaatcaatctattatgttataaaatttgattgaaagaaaattataacgaataaataaaatagattctcaccagccaacatgagtgatttctttaaatgtttgcagtttgagttaccgcgaagaaagttttgtgcaatgtggcgcaggcaaaagaaatgggatgtgtcttggacccataagttacttgggttgttgtaggaacttataattgaggggtgtcggtctgaaataagagaaatgttaatttgcagattagcatgtcttatcaaattctttagaaaaaaaccccaagctgaagttgtctccccttctacaatggcataggcaatcaggaagatatggttagctccatcttgtgcggtagctatcaacagtgtgccagtatacttcccgtaaaaccatgtaccatctacttgtactttgggtttgcaatatgcaaaaccattaatgcatggaccaaatgaccaaaagacacgtttaaacaatcttttgcccggtactatttctcccccctcatacaaggattttgtttgagctgcgaccacagtcccagaaacacaagattgcaaagctccgaaaacttttggcagtttgacatatgattcttcccaattttcatgaatcatctccaactctctttgctttgctaaccatgtgttcttgtaggatggggtataattcatgaacattttgatctctgcaatcaacgtcttgatggagacgattgggtttgttttaacaattggttggatgatctgtgctatgacatgtttgttgagttggcgatgatcttgtctgagcatcgacacgagacaagtgtgatgacctctgatactcttgataattcatttgttatgcctcttttaattgcatgcacccaagctccatgtacaaccattttcatgtaacttgcagacgaagtttagccttctctggtcagagtaaattgttttgtaattaaaatgatttctga

SEQ ID NO: 7335 - DNA, 1180 bp, Glycine max
  Gm_smallRNAprecursor_168
caacctctaatcttgaggacttatcagatgaatacgagacttgttgggtcaaaaaccatgatagtgatactaactcctcttctgggcccgaaggaagtaacctgtctccatcccacgaacctatattcaaacgggattgataatctacggatcattcatgtctaagttatttcttctttgagattttcatgtaatgtcttatgttcgtcttcagttatcactttacgtattgaaataatttttcctctaaatttaaattagcaattttcagtttacccacttttattgcaatagttgacatggtaacataactgtcaaaattcacaatactttgccatttacactacactatttctaaaaattaaatgtctcatcgacaaaactgacatgaaatggacaactcataatctctttgttcactctgaaaataatcacgaacgtttgctgctttaattacaagggaaaaatcacagtccaaattgacaacactctgcaatttgcacacgtctctaaaaattaaatgtctcacctgcaaaaatgacatgaaatggacagctttgttcactctgaaaatcatcatgaacgtctgctgctttaattacatgagaaaaaacacagtccaaattgacagcactttgcattatgagttgtccatttcatgtcagttttgcaggtgagacatttaatttttagagacgtgtgcaaaactgacatgagatggacaactcataatccctttgttcactctagaattgtaatggacgtctgttacatcacttactagggagaaaaagaaacattggattccaatacacatcaacctggaagaatactcatacaactataaataacacaacacacacacaatacaaacacacaatctcacacaacataatttcataaaccaaattcaatcttattactatgtcatttttgggagaaacaaacagtcagaccatccattgctaacttcagattaactttcattttttcaaatggatcaatcactcacaatcaaactgatgtttattttcaaattctcactccaacaccaatgcgagttcctaacaattgttcttttgatacactcaagtgtagaatgcacaacacccttcaactaaccaacgatcaattacttgatgaaatctattaccgacaacccattcatagatgaaggtca

SEQ ID NO: 7336 - DNA, 1061 bp, Glycine max
  Gm_smallRNAprecursor_169
tttaattttgtttaatattttctatatattttttatatgattttatttaatatttcctatatttttactttttgacacaactttttagattaaattattagacttgtgtcaatataaaaagttgcaaaatcataataatttattgataaataaaatgaattttatgttggagattccatcatgtgaaaaaaaactaaattattaactttgtgactttagttggaaaatatcagcaaaattatatatatatatatatatatatatatatatatatatatatatatatatgtaagaattcacgggtaaggtagtcaggtagtgaatttgaggtgcccttgatgtattctatgtcaaaatcaaagacacaactatttgactgtttgttacaagacaagtagttttgaccgggactttaatggctacaggacaggtagtattgtctagcattaattacatattaattacaaacagacggttttgtgaccgaaattaaatttaatctaaacagataccaaaacaatcatcttcgttttggtaaaagggatcttcttcttcttcttcagcagaacttgtttcttccttctttgaggatgaagcttcttcttcctgctgtaacatttgcagaacttccttcagatttttagctaagacctcctttgatgtcgatcctgctaaaaatgctgttagatgagacttttggttcaaaaacacagaagtctctggatcagctgctttgaggaattctggatgggatcgaaaccagagttttacttgttctggatccgctttggatgagtcaaattgtgtccaccattttacaaatgcgtgtctttgtagtgatggatattggtttgtcttttcagtcttgctataacgatattgccatgagaatatccatgacagtgcaaagcttgaaaagtattgaagatctgctggaattcgtgattcctgcgaattgtattgtttcttaaattgggcaaatccttgttggaccgtttctgggaatatctctgggattggtccaaagaagtcccaccattgcaaaaaccaattgggaaaat

SEQ ID NO: 7337 - DNA, 1063 bp, Glycine max
  Gm_smallRNAprecursor_170
tttaattttgtttaatattttctatatattttttatatgattttatttaatatttcctatatttttactttttgacacaactttttagattaaattattagacttgtgtcaatataaaaagttgcaaaatcataataatttattgataaataaaatgaattttatgttggagattccatcatgtgaaaaaaaactaaattattaactttgtgactttagttggaaaatatcagcaaaattatatatatatatatatatatatatatatatatatatatatatatatatgtaagaattcacgggtaaggtagtcaggtagtgaatttgaggtgcccttgatgtattctatgtcaaaatcaaagacacaactatttgactgtttgttacaagacaagtagttttgaccgggactttaatggctacaggacaggtagtattgtctagcattaattacatattaattacaaacagacggttttgtgaccgaaattaaatttaatctaaacagataccaaaacaatcatcttcgttttggtaaaagggatcttcttcttcttcttcagcagaacttgtttcttccttctttgaggatgaagcttcttcttcctgctgtaacatttgcagaacttccttcagatttttagctaagacctcctttgatgtcgatcctgctaaaaatgctgttagatgagacttttggttcaaaaacacagaagtctctggatcagctgctttgaggaattctggatgggatcgaaaccagagttttacttgttctggatccgctttggatgagtcaaattgtgtccaccattttacaaatgcgtgtctttgtagtgatggatattggtttgtcttttcagtcttgctataacgatattgccatgagaatatccatgacagtgcaaagcttgaaaagtattgaagatctgctggaattcgtgattcctgcgaattgtattgtttcttaaattgggcaaatccttgttggaccgtttctgggaatatctctgggattggtccaaagaagtcccaccattgcaaaaaccaattgggaaaattg

SEQ ID NO: 7338 - DNA, 1063 bp, Glycine max; identical to SEQ ID NO: 7337
  Gm_smallRNAprecursor_171

SEQ ID NO: 7339 - DNA, 1064 bp, Glycine max
  Gm_smallRNAprecursor_172
tttaattttgtttaatattttctatatattttttatatgattttatttaatatttcctatatttttactttttgacacaactttttagattaaattattagacttgtgtcaatataaaaagttgcaaaatcataataatttattgataaataaaatgaattttatgttggagattccatcatgtgaaaaaaaactaaattattaactttgtgactttagttggaaaatatcagcaaaattatatatatatatatatatatatatatatatatatatatatatatatatgtaagaattcacgggtaaggtagtcaggtagtgaatttgaggtgcccttgatgtattctatgtcaaaatcaaagacacaactatttgactgtttgttacaagacaagtagttttgaccgggactttaatggctacaggacaggtagtattgtctagcattaattacatattaattacaaacagacggttttgtgaccgaaattaaatttaatctaaacagataccaaaacaatcatcttcgttttggtaaaagggatcttcttcttcttcttcagcagaacttgtttcttccttctttgaggatgaagcttcttcttcctgctgtaacatttgcagaacttccttcagatttttagctaagacctcctttgatgtcgatcctgctaaaaatgctgttagatgagacttttggttcaaaaacacagaagtctctggatcagctgctttgaggaattctggatgggatcgaaaccagagttttacttgttctggatccgctttggatgagtcaaattgtgtccaccattttacaaatgcgtgtctttgtagtgatggatattggtttgtcttttcagtcttgctataacgatattgccatgagaatatccatgacagtgcaaagcttgaaaagtattgaagatctgctggaattcgtgattcctgcgaattgtattgtttcttaaattgggcaaatccttgttggaccgtttctgggaatatctctgggattggtccaaagaagtcccaccattgcaaaaaccaattgggaaaattgt

SEQ ID NO: 7340 - DNA, 1209 bp, Glycine max
  Gm_smallRNAprecursor_173
tttaattttgtttaatattttctatatattttttatatgattttatttaatatttcctatatttttactttttgacacaactttttagattaaattattagacttgtgtcaatataaaaagttgcaaaatcataataatttattgataaataaaatgaattttatgttggagattccatcatgtgaaaaaaaactaaattattaactttgtgactttagttggaaaatatcagcaaaattatatatatatatatatatatatatatatatatatatatatatatatatgtaagaattcacgggtaaggtagtcaggtagtgaatttgaggtgcccttgatgtattctatgtcaaaatcaaagacacaactatttgactgtttgttacaagacaagtagttttgaccgggactttaatggctacaggacaggtagtattgtctagcattaattacatattaattacaaacagacggttttgtgaccgaaattaaatttaatctaaacagataccaaaacaatcatcttcgttttggtaaaagggatcttcttcttcttcttcagcagaacttgtttcttccttctttgaggatgaagcttcttcttcctgctgtaacatttgcagaacttccttcagatttttagctaagacctcctttgatgtcgatcctgctaaaaatgctgttagatgagacttttggttcaaaaacacagaagtctctggatcagctgctttgaggaattctggatgggatcgaaaccagagttttacttgttctggatccgctttggatgagtcaaattgtgtccaccattttacaaatgcgtgtctttgtagtgatggatattggtttgtcttttcagtcttgctataacgatattgccatgagaatatccatgacagtgcaaagcttgaaaagtattgaagatctgctggaattcgtgattcctgcgaattgtattgtttcttaaattgggcaaatccttgttggaccgtttctgggaatatctctgggattggtccaaagaagtcccaccattgcaaaaaccaattgggaaaattgtaaattgtgttggtcttgaaatatatcagccatgaatgcttgaagcgggtattttggtgccaaaacaccttagtccaagcatcaacgtaatcccaataggtataacctaccggatcaaatggaactaaagatatctataatggttt

SEQ ID NO: 7341 - DNA, 1057 bp, Glycine max
  Gm_smallRNAprecursor_174
aattttgtttaatattttctatatattttttatatgattttatttaatatttcctatatttttactttttgacacaactttttagattaaattattagacttgtgtcaatataaaaagttgcaaaatcataataatttattgataaataaaatgaattttatgttggagattccatcatgtgaaaaaaaactaaattattaactttgtgactttagttggaaaatatcagcaaaattatatatatatatatatatatatatatatatatatatatatatatatatgtaagaattcacgggtaaggtagtcaggtagtgaatttgaggtgcccttgatgtattctatgtcaaaatcaaagacacaactatttgactgtttgttacaagacaagtagttttgaccgggactttaatggctacaggacaggtagtattgtctagcattaattacatattaattacaaacagacggttttgtgaccgaaattaaatttaatctaaacagataccaaaacaatcatcttcgttttggtaaaagggatcttcttcttcttcttcagcagaacttgtttcttccttctttgaggatgaagcttcttcttcctgctgtaacatttgcagaacttccttcagatttttagctaagacctcctttgatgtcgatcctgctaaaaatgctgttagatgagacttttggttcaaaaacacagaagtctctggatcagctgctttgaggaattctggatgggatcgaaaccagagttttacttgttctggatccgctttggatgagtcaaattgtgtccaccattttacaaatgcgtgtctttgtagtgatggatattggtttgtcttttcagtcttgctataacgatattgccatgagaatatccatgacagtgcaaagcttgaaaagtattgaagatctgctggaattcgtgattcctgcgaattgtattgtttcttaaattgggcaaatccttgttggaccgtttctgggaatatctctgggattggtccaaagaagtcccaccattgcaaaaaccaattgggaaaa

SEQ ID NO: 7342 - DNA, 1058 bp, Glycine max
  Gm_smallRNAprecursor_175
aattttgtttaatattttctatatattttttatatgattttatttaatatttcctatatttttactttttgacacaactttttagattaaattattagacttgtgtcaatataaaaagttgcaaaatcataataatttattgataaataaaatgaattttatgttggagattccatcatgtgaaaaaaaactaaattattaactttgtgactttagttggaaaatatcagcaaaattatatatatatatatatatatatatatatatatatatatatatatatatgtaagaattcacgggtaaggtagtcaggtagtgaatttgaggtgcccttgatgtattctatgtcaaaatcaaagacacaactatttgactgtttgttacaagacaagtagttttgaccgggactttaatggctacaggacaggtagtattgtctagcattaattacatattaattacaaacagacggttttgtgaccgaaattaaatttaatctaaacagataccaaaacaatcatcttcgttttggtaaaagggatcttcttcttcttcttcagcagaacttgtttcttccttctttgaggatgaagcttcttcttcctgctgtaacatttgcagaacttccttcagatttttagctaagacctcctttgatgtcgatcctgctaaaaatgctgttagatgagacttttggttcaaaaacacagaagtctctggatcagctgctttgaggaattctggatgggatcgaaaccagagttttacttgttctggatccgctttggatgagtcaaattgtgtccaccattttacaaatgcgtgtctttgtagtgatggatattggtttgtcttttcagtcttgctataacgatattgccatgagaatatccatgacagtgcaaagcttgaaaagtattgaagatctgctggaattcgtgattcctgcgaattgtattgtttcttaaattgggcaaatccttgttggaccgtttctgggaatatctctgggattggtccaaagaagtcccaccattgcaaaaaccaattgggaaaat

SEQ ID NO: 7343 - DNA, 1083 bp, Glycine max
  Gm_smallRNAprecursor_176
aattttgtttaatattttctatatattttttatatgattttatttaatatttcctatatttttactttttgacacaactttttagattaaattattagacttgtgtcaatataaaaagttgcaaaatcataataatttattgataaataaaatgaattttatgttggagattccatcatgtgaaaaaaaactaaattattaactttgtgactttagttggaaaatatcagcaaaattatatatatatatatatatatatatatatatatatatatatatatatatgtaagaattcacgggtaaggtagtcaggtagtgaatttgaggtgcccttgatgtattctatgtcaaaatcaaagacacaactatttgactgtttgttacaagacaagtagttttgaccgggactttaatggctacaggacaggtagtattgtctagcattaattacatattaattacaaacagacggttttgtgaccgaaattaaatttaatctaaacagataccaaaacaatcatcttcgttttggtaaaagggatcttcttcttcttcttcagcagaacttgtttcttccttctttgaggatgaagcttcttcttcctgctgtaacatttgcagaacttccttcagatttttagctaagacctcctttgatgtcgatcctgctaaaaatgctgttagatgagacttttggttcaaaaacacagaagtctctggatcagctgctttgaggaattctggatgggatcgaaaccagagttttacttgttctggatccgctttggatgagtcaaattgtgtccaccattttacaaatgcgtgtctttgtagtgatggatattggtttgtcttttcagtcttgctataacgatattgccatgagaatatccatgacagtgcaaagcttgaaaagtattgaagatctgctggaattcgtgattcctgcgaattgtattgtttcttaaattgggcaaatccttgttggaccgtttctgggaatatctctgggattggtccaaagaagtcccaccattgcaaaaaccaattgggaaaattgtaaattgtgttggtcttgaaata

SEQ ID NO: 7344 - DNA, 1056 bp, Glycine max
  Gm_smallRNAprecursor_177
attttgtttaatattttctatatattttttatatgattttatttaatatttcctatatttttactttttgacacaactttttagattaaattattagacttgtgtcaatataaaaagttgcaaaatcataataatttattgataaataaaatgaattttatgttggagattccatcatgtgaaaaaaaactaaattattaactttgtgactttagttggaaaatatcagcaaaattatatatatatatatatatatatatatatatatatatatatatatatatgtaagaattcacgggtaaggtagtcaggtagtgaatttgaggtgcccttgatgtattctatgtcaaaatcaaagacacaactatttgactgtttgttacaagacaagtagttttgaccgggactttaatggctacaggacaggtagtattgtctagcattaattacatattaattacaaacagacggttttgtgaccgaaattaaatttaatctaaacagataccaaaacaatcatcttcgttttggtaaaagggatcttcttcttcttcttcagcagaacttgtttcttccttctttgaggatgaagcttcttcttcctgctgtaacatttgcagaacttccttcagatttttagctaagacctcctttgatgtcgatcctgctaaaaatgctgttagatgagacttttggttcaaaaacacagaagtctctggatcagctgctttgaggaattctggatgggatcgaaaccagagttttacttgttctggatccgctttggatgagtcaaattgtgtccaccattttacaaatgcgtgtctttgtagtgatggatattggtttgtcttttcagtcttgctataacgatattgccatgagaatatccatgacagtgcaaagcttgaaaagtattgaagatctgctggaattcgtgattcctgcgaattgtattgtttcttaaattgggcaaatccttgttggaccgtttctgggaatatctctgggattggtccaaagaagtcccaccattgcaaaaaccaattgggaaaa

SEQ ID NO: 7345 - DNA, 1056 bp, Glycine max; identical to SEQ ID NO: 7344
  Gm_smallRNAprecursor_178

SEQ ID NO: 7346 - DNA, 1057 bp, Glycine max
  Gm_smallRNAprecursor_179
attttgtttaatattttctatatattttttatatgattttatttaatatttcctatatttttactttttgacacaactttttagattaaattattagacttgtgtcaatataaaaagttgcaaaatcataataatttattgataaataaaatgaattttatgttggagattccatcatgtgaaaaaaaactaaattattaactttgtgactttagttggaaaatatcagcaaaattatatatatatatatatatatatatatatatatatatatatatatatatgtaagaattcacgggtaaggtagtcaggtagtgaatttgaggtgcccttgatgtattctatgtcaaaatcaaagacacaactatttgactgtttgttacaagacaagtagttttgaccgggactttaatggctacaggacaggtagtattgtctagcattaattacatattaattacaaacagacggttttgtgaccgaaattaaatttaatctaaacagataccaaaacaatcatcttcgttttggtaaaagggatcttcttcttcttcttcagcagaacttgtttcttccttctttgaggatgaagcttcttcttcctgctgtaacatttgcagaacttccttcagatttttagctaagacctcctttgatgtcgatcctgctaaaaatgctgttagatgagacttttggttcaaaaacacagaagtctctggatcagctgctttgaggaattctggatgggatcgaaaccagagttttacttgttctggatccgctttggatgagtcaaattgtgtccaccattttacaaatgcgtgtctttgtagtgatggatattggtttgtcttttcagtcttgctataacgatattgccatgagaatatccatgacagtgcaaagcttgaaaagtattgaagatctgctggaattcgtgattcctgcgaattgtattgtttcttaaattgggcaaatccttgttggaccgtttctgggaatatctctgggattggtccaaagaagtcccaccattgcaaaaaccaattgggaaaat

SEQ ID NO: 7347 - DNA, 1059 bp, Glycine max
  Gm_smallRNAprecursor_180
attttgtttaatattttctatatattttttatatgattttatttaatatttcctatatttttactttttgacacaactttttagattaaattattagacttgtgtcaatataaaaagttgcaaaatcataataatttattgataaataaaatgaattttatgttggagattccatcatgtgaaaaaaaactaaattattaactttgtgactttagttggaaaatatcagcaaaattatatatatatatatatatatatatatatatatatatatatatatatatgtaagaattcacgggtaaggtagtcaggtagtgaatttgaggtgcccttgatgtattctatgtcaaaatcaaagacacaactatttgactgtttgttacaagacaagtagttttgaccgggactttaatggctacaggacaggtagtattgtctagcattaattacatattaattacaaacagacggttttgtgaccgaaattaaatttaatctaaacagataccaaaacaatcatcttcgttttggtaaaagggatcttcttcttcttcttcagcagaacttgtttcttccttctttgaggatgaagcttcttcttcctgctgtaacatttgcagaacttccttcagatttttagctaagacctcctttgatgtcgatcctgctaaaaatgctgttagatgagacttttggttcaaaaacacagaagtctctggatcagctgctttgaggaattctggatgggatcgaaaccagagttttacttgttctggatccgctttggatgagtcaaattgtgtccaccattttacaaatgcgtgtctttgtagtgatggatattggtttgtcttttcagtcttgctataacgatattgccatgagaatatccatgacagtgcaaagcttgaaaagtattgaagatctgctggaattcgtgattcctgcgaattgtattgtttcttaaattgggcaaatccttgttggaccgtttctgggaatatctctgggattggtccaaagaagtcccaccattgcaaaaaccaattgggaaaattg

SEQ ID NO: 7348 - DNA, 1059 bp, Glycine max; identical to SEQ ID NO: 7347
  Gm_smallRNAprecursor_181

SEQ ID NO: 7349 - DNA, 1082 bp, Glycine max
  Gm_smallRNAprecursor_182
attttgtttaatattttctatatattttttatatgattttatttaatatttcctatatttttactttttgacacaactttttagattaaattattagacttgtgtcaatataaaaagttgcaaaatcataataatttattgataaataaaatgaattttatgttggagattccatcatgtgaaaaaaaactaaattattaactttgtgactttagttggaaaatatcagcaaaattatatatatatatatatatatatatatatatatatatatatatatatatgtaagaattcacgggtaaggtagtcaggtagtgaatttgaggtgcccttgatgtattctatgtcaaaatcaaagacacaactatttgactgtttgttacaagacaagtagttttgaccgggactttaatggctacaggacaggtagtattgtctagcattaattacatattaattacaaacagacggttttgtgaccgaaattaaatttaatctaaacagataccaaaacaatcatcttcgttttggtaaaagggatcttcttcttcttcttcagcagaacttgtttcttccttctttgaggatgaagcttcttcttcctgctgtaacatttgcagaacttccttcagatttttagctaagacctcctttgatgtcgatcctgctaaaaatgctgttagatgagacttttggttcaaaaacacagaagtctctggatcagctgctttgaggaattctggatgggatcgaaaccagagttttacttgttctggatccgctttggatgagtcaaattgtgtccaccattttacaaatgcgtgtctttgtagtgatggatattggtttgtcttttcagtcttgctataacgatattgccatgagaatatccatgacagtgcaaagcttgaaaagtattgaagatctgctggaattcgtgattcctgcgaattgtattgtttcttaaattgggcaaatccttgttggaccgtttctgggaatatctctgggattggtccaaagaagtcccaccattgcaaaaaccaattgggaaaattgtaaattgtgttggtcttgaaata

SEQ ID NO: 7350 - DNA, 1055 bp, Glycine max
  Gm_smallRNAprecursor_183
ttttgtttaatattttctatatattttttatatgattttatttaatatttcctatatttttactttttgacacaactttttagattaaattattagacttgtgtcaatataaaaagttgcaaaatcataataatttattgataaataaaatgaattttatgttggagattccatcatgtgaaaaaaaactaaattattaactttgtgactttagttggaaaatatcagcaaaattatatatatatatatatatatatatatatatatatatatatatatatatgtaagaattcacgggtaaggtagtcaggtagtgaatttgaggtgcccttgatgtattctatgtcaaaatcaaagacacaactatttgactgtttgttacaagacaagtagttttgaccgggactttaatggctacaggacaggtagtattgtctagcattaattacatattaattacaaacagacggttttgtgaccgaaattaaatttaatctaaacagataccaaaacaatcatcttcgttttggtaaaagggatcttcttcttcttcttcagcagaacttgtttcttccttctttgaggatgaagcttcttcttcctgctgtaacatttgcagaacttccttcagatttttagctaagacctcctttgatgtcgatcctgctaaaaatgctgttagatgagacttttggttcaaaaacacagaagtctctggatcagctgctttgaggaattctggatgggatcgaaaccagagttttacttgttctggatccgctttggatgagtcaaattgtgtccaccattttacaaatgcgtgtctttgtagtgatggatattggtttgtcttttcagtcttgctataacgatattgccatgagaatatccatgacagtgcaaagcttgaaaagtattgaagatctgctggaattcgtgattcctgcgaattgtattgtttcttaaattgggcaaatccttgttggaccgtttctgggaatatctctgggattggtccaaagaagtcccaccattgcaaaaaccaattgggaaaa

SEQ ID NO: 7351 - DNA, 1058 bp, Glycine max
  Gm_smallRNAprecursor_184
ttttgtttaatattttctatatattttttatatgattttatttaatatttcctatatttttactttttgacacaactttttagattaaattattagacttgtgtcaatataaaaagttgcaaaatcataataatttattgataaataaaatgaattttatgttggagattccatcatgtgaaaaaaaactaaattattaactttgtgactttagttggaaaatatcagcaaaattatatatatatatatatatatatatatatatatatatatatatatatatgtaagaattcacgggtaaggtagtcaggtagtgaatttgaggtgcccttgatgtattctatgtcaaaatcaaagacacaactatttgactgtttgttacaagacaagtagttttgaccgggactttaatggctacaggacaggtagtattgtctagcattaattacatattaattacaaacagacggttttgtgaccgaaattaaatttaatctaaacagataccaaaacaatcatcttcgttttggtaaaagggatcttcttcttcttcttcagcagaacttgtttcttccttctttgaggatgaagcttcttcttcctgctgtaacatttgcagaacttccttcagatttttagctaagacctcctttgatgtcgatcctgctaaaaatgctgttagatgagacttttggttcaaaaacacagaagtctctggatcagctgctttgaggaattctggatgggatcgaaaccagagttttacttgttctggatccgctttggatgagtcaaattgtgtccaccattttacaaatgcgtgtctttgtagtgatggatattggtttgtcttttcagtcttgctataacgatattgccatgagaatatccatgacagtgcaaagcttgaaaagtattgaagatctgctggaattcgtgattcctgcgaattgtattgtttcttaaattgggcaaatccttgttggaccgtttctgggaatatctctgggattggtccaaagaagtcccaccattgcaaaaaccaattgggaaaattg

SEQ ID NO: 7352 - DNA, 1058 bp, Glycine max; identical to SEQ ID NO: 7351
  Gm_smallRNAprecursor_185

SEQ ID NO: 7353 - DNA, 1081 bp, Glycine max
  Gm_smallRNAprecursor_186
ttttgtttaatattttctatatattttttatatgattttatttaatatttcctatatttttactttttgacacaactttttagattaaattattagacttgtgtcaatataaaaagttgcaaaatcataataatttattgataaataaaatgaattttatgttggagattccatcatgtgaaaaaaaactaaattattaactttgtgactttagttggaaaatatcagcaaaattatatatatatatatatatatatatatatatatatatatatatatatatgtaagaattcacgggtaaggtagtcaggtagtgaatttgaggtgcccttgatgtattctatgtcaaaatcaaagacacaactatttgactgtttgttacaagacaagtagttttgaccgggactttaatggctacaggacaggtagtattgtctagcattaattacatattaattacaaacagacggttttgtgaccgaaattaaatttaatctaaacagataccaaaacaatcatcttcgttttggtaaaagggatcttcttcttcttcttcagcagaacttgtttcttccttctttgaggatgaagcttcttcttcctgctgtaacatttgcagaacttccttcagatttttagctaagacctcctttgatgtcgatcctgctaaaaatgctgttagatgagacttttggttcaaaaacacagaagtctctggatcagctgctttgaggaattctggatgggatcgaaaccagagttttacttgttctggatccgctttggatgagtcaaattgtgtccaccattttacaaatgcgtgtctttgtagtgatggatattggtttgtcttttcagtcttgctataacgatattgccatgagaatatccatgacagtgcaaagcttgaaaagtattgaagatctgctggaattcgtgattcctgcgaattgtattgtttcttaaattgggcaaatccttgttggaccgtttctgggaatatctctgggattggtccaaagaagtcccaccattgcaaaaaccaattgggaaaattgtaaattgtgttggtcttgaaata

SEQ ID NO: 7354 - DNA, 1188 bp, Glycine max
  Gm_smallRNAprecursor_187
aatattttctatatattttttatatgattttatttaatatttcctatatttttactttttgacacaactttttagattaaattattagacttgtgtcaatataaaaagttgcaaaatcataataatttattgataaataaaatgaattttatgttggagattccatcatgtgaaaaaaaactaaattattaactttgtgactttagttggaaaatatcagcaaaattatatatatatatatatatatatatatatatatatatatatatatatatgtaagaattcacgggtaaggtagtcaggtagtgaatttgaggtgcccttgatgtattctatgtcaaaatcaaagacacaactatttgactgtttgttacaagacaagtagttttgaccgggactttaatggctacaggacaggtagtattgtctagcattaattacatattaattacaaacagacggttttgtgaccgaaattaaatttaatctaaacagataccaaaacaatcatcttcgttttggtaaaagggatcttcttcttcttcttcagcagaacttgtttcttccttctttgaggatgaagcttcttcttcctgctgtaacatttgcagaacttccttcagatttttagctaagacctcctttgatgtcgatcctgctaaaaatgctgttagatgagacttttggttcaaaaacacagaagtctctggatcagctgctttgaggaattctggatgggatcgaaaccagagttttacttgttctggatccgctttggatgagtcaaattgtgtccaccattttacaaatgcgtgtctttgtagtgatggatattggtttgtcttttcagtcttgctataacgatattgccatgagaatatccatgacagtgcaaagcttgaaaagtattgaagatctgctggaattcgtgattcctgcgaattgtattgtttcttaaattgggcaaatccttgttggaccgtttctgggaatatctctgggattggtccaaagaagtcccaccattgcaaaaaccaattgggaaaattgtaaattgtgttggtcttgaaatatatcagccatgaatgcttgaagcgggtattttggtgccaaaacaccttagtccaagcatcaacgtaatcccaataggtataacctaccggatcaaatggaactaaagatatctat

SEQ ID NO: 7355 - DNA, 1142 bp, Glycine max
  Gm_smallRNAprecursor_188
tatttttactttttgacacaactttttagattaaattattagacttgtgtcaatataaaaagttgcaaaatcataataatttattgataaataaaatgaattttatgttggagattccatcatgtgaaaaaaaactaaattattaactttgtgactttagttggaaaatatcagcaaaattatatatatatatatatatatatatatatatatatatatatatatatatgtaagaattcacgggtaaggtagtcaggtagtgaatttgaggtgcccttgatgtattctatgtcaaaatcaaagacacaactatttgactgtttgttacaagacaagtagttttgaccgggactttaatggctacaggacaggtagtattgtctagcattaattacatattaattacaaacagacggttttgtgaccgaaattaaatttaatctaaacagataccaaaacaatcatcttcgttttggtaaaagggatcttcttcttcttcttcagcagaacttgtttcttccttctttgaggatgaagcttcttcttcctgctgtaacatttgcagaacttccttcagatttttagctaagacctcctttgatgtcgatcctgctaaaaatgctgttagatgagacttttggttcaaaaacacagaagtctctggatcagctgctttgaggaattctggatgggatcgaaaccagagttttacttgttctggatccgctttggatgagtcaaattgtgtccaccattttacaaatgcgtgtctttgtagtgatggatattggtttgtcttttcagtcttgctataacgatattgccatgagaatatccatgacagtgcaaagcttgaaaagtattgaagatctgctggaattcgtgattcctgcgaattgtattgtttcttaaattgggcaaatccttgttggaccgtttctgggaatatctctgggattggtccaaagaagtcccaccattgcaaaaaccaattgggaaaattgtaaattgtgttggtcttgaaatatatcagccatgaatgcttgaagcgggtattttggtgccaaaacaccttagtccaagcatcaacgtaatcccaataggtataacctaccggatcaaatggaactaaagatatctat

SEQ ID NO: 7356 - DNA, 1141 bp, Glycine max
  Gm_smallRNAprecursor_189
atttttactttttgacacaactttttagattaaattattagacttgtgtcaatataaaaagttgcaaaatcataataatttattgataaataaaatgaattttatgttggagattccatcatgtgaaaaaaaactaaattattaactttgtgactttagttggaaaatatcagcaaaattatatatatatatatatatatatatatatatatatatatatatatatatgtaagaattcacgggtaaggtagtcaggtagtgaatttgaggtgcccttgatgtattctatgtcaaaatcaaagacacaactatttgactgtttgttacaagacaagtagttttgaccgggactttaatggctacaggacaggtagtattgtctagcattaattacatattaattacaaacagacggttttgtgaccgaaattaaatttaatctaaacagataccaaaacaatcatcttcgttttggtaaaagggatcttcttcttcttcttcagcagaacttgtttcttccttctttgaggatgaagcttcttcttcctgctgtaacatttgcagaacttccttcagatttttagctaagacctcctttgatgtcgatcctgctaaaaatgctgttagatgagacttttggttcaaaaacacagaagtctctggatcagctgctttgaggaattctggatgggatcgaaaccagagttttacttgttctggatccgctttggatgagtcaaattgtgtccaccattttacaaatgcgtgtctttgtagtgatggatattggtttgtcttttcagtcttgctataacgatattgccatgagaatatccatgacagtgcaaagcttgaaaagtattgaagatctgctggaattcgtgattcctgcgaattgtattgtttcttaaattgggcaaatccttgttggaccgtttctgggaatatctctgggattggtccaaagaagtcccaccattgcaaaaaccaattgggaaaattgtaaattgtgttggtcttgaaatatatcagccatgaatgcttgaagcgggtattttggtgccaaaacaccttagtccaagcatcaacgtaatcccaataggtataacctaccggatcaaatggaactaaagatatctat

SEQ ID NO: 7357 - DNA, 1173 bp, Glycine max
  Gm_smallRNAprecursor_190
gttggaaaatatcagcaaaattatatatatatatatatatatatatatatatatatatatatatatatatgtaagaattcacgggtaaggtagtcaggtagtgaatttgaggtgcccttgatgtattctatgtcaaaatcaaagacacaactatttgactgtttgttacaagacaagtagttttgaccgggactttaatggctacaggacaggtagtattgtctagcattaattacatattaattacaaacagacggttttgtgaccgaaattaaatttaatctaaacagataccaaaacaatcatcttcgttttggtaaaagggatcttcttcttcttcttcagcagaacttgtttcttccttctttgaggatgaagcttcttcttcctgctgtaacatttgcagaacttccttcagatttttagctaagacctcctttgatgtcgatcctgctaaaaatgctgttagatgagacttttggttcaaaaacacagaagtctctggatcagctgctttgaggaattctggatgggatcgaaaccagagttttacttgttctggatccgctttggatgagtcaaattgtgtccaccattttacaaatgcgtgtctttgtagtgatggatattggtttgtcttttcagtcttgctataacgatattgccatgagaatatccatgacagtgcaaagcttgaaaagtattgaagatctgctggaattcgtgattcctgcgaattgtattgtttcttaaattgggcaaatccttgttggaccgtttctgggaatatctctgggattggtccaaagaagtcccaccattgcaaaaaccaattgggaaaattgtaaattgtgttggtcttgaaatatatcagccatgaatgcttgaagcgggtattttggtgccaaaacaccttagtccaagcatcaacgtaatcccaataggtataacctaccggatcaaatggaactaaagatatctataatggtttcttctgaacactcgtgggaggtttggtaagccgtagctaccatggtcatatgttggagtgtattcatgatattatactccgtttgtgcatctatgttccattcatagatgttatttgcactaaaactcttaaaattgttttcacctctttcttctaatagaaggtcaggggcagttggacgt

SEQ ID NO: 7358 - DNA, 1078 bp, Glycine max
  Gm_smallRNAprecursor_191
tatcagcaaaattatatatatatatatatatatatatatatatatatatatatatatatatgtaagaattcacgggtaaggtagtcaggtagtgaatttgaggtgcccttgatgtattctatgtcaaaatcaaagacacaactatttgactgtttgttacaagacaagtagttttgaccgggactttaatggctacaggacaggtagtattgtctagcattaattacatattaattacaaacagacggttttgtgaccgaaattaaatttaatctaaacagataccaaaacaatcatcttcgttttggtaaaagggatcttcttcttcttcttcagcagaacttgtttcttccttctttgaggatgaagcttcttcttcctgctgtaacatttgcagaacttccttcagatttttagctaagacctcctttgatgtcgatcctgctaaaaatgctgttagatgagacttttggttcaaaaacacagaagtctctggatcagctgctttgaggaattctggatgggatcgaaaccagagttttacttgttctggatccgctttggatgagtcaaattgtgtccaccattttacaaatgcgtgtctttgtagtgatggatattggtttgtcttttcagtcttgctataacgatattgccatgagaatatccatgacagtgcaaagcttgaaaagtattgaagatctgctggaattcgtgattcctgcgaattgtattgtttcttaaattgggcaaatccttgttggaccgtttctgggaatatctctgggattggtccaaagaagtcccaccattgcaaaaaccaattgggaaaattgtaaattgtgttggtcttgaaatatatcagccatgaatgcttgaagcgggtattttggtgccaaaacaccttagtccaagcatcaacgtaatcccaataggtataacctaccggatcaaatggaactaaagatatctataatggtttcttctgaacactcgtgggaggtttggtaagccgtagctaccatggtcatatgttggagtgtattcatgatattatactccgtttgtgcatctatgt

SEQ ID NO: 7359 - DNA, 1164 bp, Glycine max
  Gm_smallRNAprecursor_192
tatcagcaaaattatatatatatatatatatatatatatatatatatatatatatatatatgtaagaattcacgggtaaggtagtcaggtagtgaatttgaggtgcccttgatgtattctatgtcaaaatcaaagacacaactatttgactgtttgttacaagacaagtagttttgaccgggactttaatggctacaggacaggtagtattgtctagcattaattacatattaattacaaacagacggttttgtgaccgaaattaaatttaatctaaacagataccaaaacaatcatcttcgttttggtaaaagggatcttcttcttcttcttcagcagaacttgtttcttccttctttgaggatgaagcttcttcttcctgctgtaacatttgcagaacttccttcagatttttagctaagacctcctttgatgtcgatcctgctaaaaatgctgttagatgagacttttggttcaaaaacacagaagtctctggatcagctgctttgaggaattctggatgggatcgaaaccagagttttacttgttctggatccgctttggatgagtcaaattgtgtccaccattttacaaatgcgtgtctttgtagtgatggatattggtttgtcttttcagtcttgctataacgatattgccatgagaatatccatgacagtgcaaagcttgaaaagtattgaagatctgctggaattcgtgattcctgcgaattgtattgtttcttaaattgggcaaatccttgttggaccgtttctgggaatatctctgggattggtccaaagaagtcccaccattgcaaaaaccaattgggaaaattgtaaattgtgttggtcttgaaatatatcagccatgaatgcttgaagcgggtattttggtgccaaaacaccttagtccaagcatcaacgtaatcccaataggtataacctaccggatcaaatggaactaaagatatctataatggtttcttctgaacactcgtgggaggtttggtaagccgtagctaccatggtcatatgttggagtgtattcatgatattatactccgtttgtgcatctatgttccattcatagatgttatttgcactaaaactcttaaaattgttttcacctctttcttctaatagaaggtcaggggcagttggacgt

SEQ ID NO: 7360 - DNA, 1077 bp, Glycine max
  Gm_smallRNAprecursor_193
atcagcaaaattatatatatatatatatatatatatatatatatatatatatatatatatgtaagaattcacgggtaaggtagtcaggtagtgaatttgaggtgcccttgatgtattctatgtcaaaatcaaagacacaactatttgactgtttgttacaagacaagtagttttgaccgggactttaatggctacaggacaggtagtattgtctagcattaattacatattaattacaaacagacggttttgtgaccgaaattaaatttaatctaaacagataccaaaacaatcatcttcgttttggtaaaagggatcttcttcttcttcttcagcagaacttgtttcttccttctttgaggatgaagcttcttcttcctgctgtaacatttgcagaacttccttcagatttttagctaagacctcctttgatgtcgatcctgctaaaaatgctgttagatgagacttttggttcaaaaacacagaagtctctggatcagctgctttgaggaattctggatgggatcgaaaccagagttttacttgttctggatccgctttggatgagtcaaattgtgtccaccattttacaaatgcgtgtctttgtagtgatggatattggtttgtcttttcagtcttgctataacgatattgccatgagaatatccatgacagtgcaaagcttgaaaagtattgaagatctgctggaattcgtgattcctgcgaattgtattgtttcttaaattgggcaaatccttgttggaccgtttctgggaatatctctgggattggtccaaagaagtcccaccattgcaaaaaccaattgggaaaattgtaaattgtgttggtcttgaaatatatcagccatgaatgcttgaagcgggtattttggtgccaaaacaccttagtccaagcatcaacgtaatcccaataggtataacctaccggatcaaatggaactaaagatatctataatggtttcttctgaacactcgtgggaggtttggtaagccgtagctaccatggtcatatgttggagtgtattcatgatattatactccgtttgtgcatctatgt

SEQ ID NO: 7361 - DNA, 1163 bp, Glycine max
  Gm_smallRNAprecursor_194
atcagcaaaattatatatatatatatatatatatatatatatatatatatatatatatatgtaagaattcacgggtaaggtagtcaggtagtgaatttgaggtgcccttgatgtattctatgtcaaaatcaaagacacaactatttgactgtttgttacaagacaagtagttttgaccgggactttaatggctacaggacaggtagtattgtctagcattaattacatattaattacaaacagacggttttgtgaccgaaattaaatttaatctaaacagataccaaaacaatcatcttcgttttggtaaaagggatcttcttcttcttcttcagcagaacttgtttcttccttctttgaggatgaagcttcttcttcctgctgtaacatttgcagaacttccttcagatttttagctaagacctcctttgatgtcgatcctgctaaaaatgctgttagatgagacttttggttcaaaaacacagaagtctctggatcagctgctttgaggaattctggatgggatcgaaaccagagttttacttgttctggatccgctttggatgagtcaaattgtgtccaccattttacaaatgcgtgtctttgtagtgatggatattggtttgtcttttcagtcttgctataacgatattgccatgagaatatccatgacagtgcaaagcttgaaaagtattgaagatctgctggaattcgtgattcctgcgaattgtattgtttcttaaattgggcaaatccttgttggaccgtttctgggaatatctctgggattggtccaaagaagtcccaccattgcaaaaaccaattgggaaaattgtaaattgtgttggtcttgaaatatatcagccatgaatgcttgaagcgggtattttggtgccaaaacaccttagtccaagcatcaacgtaatcccaataggtataacctaccggatcaaatggaactaaagatatctataatggtttcttctgaacactcgtgggaggtttggtaagccgtagctaccatggtcatatgttggagtgtattcatgatattatactccgtttgtgcatctatgttccattcatagatgttatttgcactaaaactcttaaaattgttttcacctctttcttctaatagaaggtcaggggcagttggacgt

SEQ ID NO: 7362 - DNA, 1130 bp, Glycine max
  Gm_smallRNAprecursor_195
tatatatatatatatatatatatatatgtaagaattcacgggtaaggtagtcaggtagtgaatttgaggtgcccttgatgtattctatgtcaaaatcaaagacacaactatttgactgtttgttacaagacaagtagttttgaccgggactttaatggctacaggacaggtagtattgtctagcattaattacatattaattacaaacagacggttttgtgaccgaaattaaatttaatctaaacagataccaaaacaatcatcttcgttttggtaaaagggatcttcttcttcttcttcagcagaacttgtttcttccttctttgaggatgaagcttcttcttcctgctgtaacatttgcagaacttccttcagatttttagctaagacctcctttgatgtcgatcctgctaaaaatgctgttagatgagacttttggttcaaaaacacagaagtctctggatcagctgctttgaggaattctggatgggatcgaaaccagagttttacttgttctggatccgctttggatgagtcaaattgtgtccaccattttacaaatgcgtgtctttgtagtgatggatattggtttgtcttttcagtcttgctataacgatattgccatgagaatatccatgacagtgcaaagcttgaaaagtattgaagatctgctggaattcgtgattcctgcgaattgtattgtttcttaaattgggcaaatccttgttggaccgtttctgggaatatctctgggattggtccaaagaagtcccaccattgcaaaaaccaattgggaaaattgtaaattgtgttggtcttgaaatatatcagccatgaatgcttgaagcgggtattttggtgccaaaacaccttagtccaagcatcaacgtaatcccaataggtataacctaccggatcaaatggaactaaagatatctataatggtttcttctgaacactcgtgggaggtttggtaagccgtagctaccatggtcatatgttggagtgtattcatgatattatactccgtttgtgcatctatgttccattcatagatgttatttgcactaaaactcttaaaattgttttcacctctttcttctaatagaaggtcaggggcagttggacgt

SEQ ID NO: 7363 - DNA, 1131 bp, Glycine max
  Gm_smallRNAprecursor_196
acaagtagttttgaccgggactttaatggctacaggacaggtagtattgtctagcattaattacatattaattacaaacagacggttttgtgaccgaaattaaatttaatctaaacagataccaaaacaatcatcttcgttttggtaaaagggatcttcttcttcttcttcagcagaacttgtttcttccttctttgaggatgaagcttcttcttcctgctgtaacatttgcagaacttccttcagatttttagctaagacctcctttgatgtcgatcctgctaaaaatgctgttagatgagacttttggttcaaaaacacagaagtctctggatcagctgctttgaggaattctggatgggatcgaaaccagagttttacttgttctggatccgctttggatgagtcaaattgtgtccaccattttacaaatgcgtgtctttgtagtgatggatattggtttgtcttttcagtcttgctataacgatattgccatgagaatatccatgacagtgcaaagcttgaaaagtattgaagatctgctggaattcgtgattcctgcgaattgtattgtttcttaaattgggcaaatccttgttggaccgtttctgggaatatctctgggattggtccaaagaagtcccaccattgcaaaaaccaattgggaaaattgtaaattgtgttggtcttgaaatatatcagccatgaatgcttgaagcgggtattttggtgccaaaacaccttagtccaagcatcaacgtaatcccaataggtataacctaccggatcaaatggaactaaagatatctataatggtttcttctgaacactcgtgggaggtttggtaagccgtagctaccatggtcatatgttggagtgtattcatgatattatactccgtttgtgcatctatgttccattcatagatgttatttgcactaaaactcttaaaattgttttcacctctttcttctaatagaaggtcaggggcagttggacgttgataatataatttggagggtgttttccagtgtttggaattaattggatttatattcttttctgacactgatcctatctcagttgtgttatctgagttttggtcactatcttcattaataacattaatta

SEQ ID NO: 7364 - DNA, 1080 bp, Glycine max
  Gm_smallRNAprecursor_197
ttcagcagaacttgtttcttccttctttgaggatgaagcttcttcttcctgctgtaacatttgcagaacttccttcagatttttagctaagacctcctttgatgtcgatcctgctaaaaatgctgttagatgagacttttggttcaaaaacacagaagtctctggatcagctgctttgaggaattctggatgggatcgaaaccagagttttacttgttctggatccgctttggatgagtcaaattgtgtccaccattttacaaatgcgtgtctttgtagtgatggatattggtttgtcttttcagtcttgctataacgatattgccatgagaatatccatgacagtgcaaagcttgaaaagtattgaagatctgctggaattcgtgattcctgcgaattgtattgtttcttaaattgggcaaatccttgttggaccgtttctgggaatatctctgggattggtccaaagaagtcccaccattgcaaaaaccaattgggaaaattgtaaattgtgttggtcttgaaatatatcagccatgaatgcttgaagcgggtattttggtgccaaaacaccttagtccaagcatcaacgtaatcccaataggtataacctaccggatcaaatggaactaaagatatctataatggtttcttctgaacactcgtgggaggtttggtaagccgtagctaccatggtcatatgttggagtgtattcatgatattatactccgtttgtgcatctatgttccattcatagatgttatttgcactaaaactcttaaaattgttttcacctctttcttctaatagaaggtcaggggcagttggacgttgataatataatttggagggtgttttccagtgtttggaattaattggatttatattcttttctgacactgatcctatctcagttgtgttatctgagttttggtcactatcttcattaataacattaattaatttggaggtacttcttgttaccattttggaagtattttccgaggcttggggagtatctggaatgaccttaagtaaactaccaatcttgtttagtaattcactatggttgtcaccta

SEQ ID NO: 7365 - DNA, 1104 bp, Glycine max
  Gm_smallRNAprecursor_198
ttcagcagaacttgtttcttccttctttgaggatgaagcttcttcttcctgctgtaacatttgcagaacttccttcagatttttagctaagacctcctttgatgtcgatcctgctaaaaatgctgttagatgagacttttggttcaaaaacacagaagtctctggatcagctgctttgaggaattctggatgggatcgaaaccagagttttacttgttctggatccgctttggatgagtcaaattgtgtccaccattttacaaatgcgtgtctttgtagtgatggatattggtttgtcttttcagtcttgctataacgatattgccatgagaatatccatgacagtgcaaagcttgaaaagtattgaagatctgctggaattcgtgattcctgcgaattgtattgtttcttaaattgggcaaatccttgttggaccgtttctgggaatatctctgggattggtccaaagaagtcccaccattgcaaaaaccaattgggaaaattgtaaattgtgttggtcttgaaatatatcagccatgaatgcttgaagcgggtattttggtgccaaaacaccttagtccaagcatcaacgtaatcccaataggtataacctaccggatcaaatggaactaaagatatctataatggtttcttctgaacactcgtgggaggtttggtaagccgtagctaccatggtcatatgttggagtgtattcatgatattatactccgtttgtgcatctatgttccattcatagatgttatttgcactaaaactcttaaaattgttttcacctctttcttctaatagaaggtcaggggcagttggacgttgataatataatttggagggtgttttccagtgtttggaattaattggatttatattcttttctgacactgatcctatctcagttgtgttatctgagttttggtcactatcttcattaataacattaattaatttggaggtacttcttgttaccattttggaagtattttccgaggcttggggagtatctggaatgaccttaagtaaactaccaatcttgtttagtaattcactatggttgtcacctacgccttcaattaaggatttagttt

SEQ ID NO: 7366 - DNA, 1084 bp, Glycine max
  Gm_smallRNAprecursor_199
ccaagttacaggtttcatatatgtccaccaaagatcttactcgtcttggagtagactctggtgatgatagttcttgatcttgttgttgtggtggaggtgaaggtggttcacctgggtcttcttcctcatcttcttcttgaggtagttgagcaggtataagaacgttcttctccactttttcttcatcccaattccaagaagcatattcatcaacttcaacatctcgactgatgacgagtttcttagtttgcaagttgtagacacggtagcccttagagatattgctatacccaaggaagatacctcgtatagtcttgtcttcaagcttgtgcctcttcatgtctagaatatgaatgtagcatatagatccaaagcccttaggtgctttgctgatggcttcttcctgttccaagcttcaatcggagtcttgccttttacagacttagttggacatctgttgagtatgtaaacagcagtgtagactgcttcagcccagaatgtgttaggtagtcccttctccttgagcatcgatctagccatctccataactgtgcgattctttctctcggacactccattttgttgaggagaatatgcgactgtaagttgtctctcaatgccttcatcctcacaaaatctttcaaactcgcgagaggtgtactttttgccgcgatcacttcttagtacttttatccgttttccactttgattttcagcaagggccttgaactttttgaatactccaaagacttctgatttctcttttagaaaatatgcccatgtcattctagagaggtcatcaatgaagagtatgaagtacctgttgttcccatgtgatggcgtcctcattggtccacaaacgtccgtatgtatcagctccaatagatctttcgctctccatgctccgtttgttgagaaaggaaatcgttgttgcttaccaagaagacatccttcacacacttcattgttctcctttatgcttggaagatctctcatcatgttcttctcatgtaacaacttcaaggcatgtgagttgaagtggccaaatcttcgatgccatagccatgaatcatcaacttgtacc

SEQ ID NO: 7367 - DNA, 1086 bp, Glycine max
  Gm_smallRNAprecursor_200
cagttgctttgagaaattttggatgtgattggaaccaaagcttcacttgttctggatcagctttggatgtatcaaattgtgcccaccattttacaaatgcttgcctccgtagtgatggatattgattagttttctcagtcttactgtaacgatattgccatgaaaaaattcatgacaaagaaaaactggagaaatattttaagtctgtcggaattcgtgattcctgagaattaaattgttttttaaattgagcaaatccttgttgaacctgctctgagaaaatctccggaatagggccaaagaaatcccaccattgtaagaaccaatttgggaaattatagattgtgttggttttgaaatatattaaccatgagtgcttgaagcgggtgttttggtgccaaaaaacctttgtccaagcatcaacataatcccaataggtataacctacaagatcaaatggtactaaatttttttccctttgtttaagtctgaaccaaaatgtcttggttgaagaacttttaggatctgtattgttgagtgaatgttcaacgtctgatcctttgggtctttgaagtgcttgatagacactgaatttgagtctaccaatattagttaatagaaggttcttgacttgttgatggcagttggtttgaagtgaaatcctgtcgggaacgccttggctgttgccttaaatgggttcttatcccagaattcagattccatctgcaaaatagttgaaaatttgtttttgtaaatataattgttagtttgtttggtgggtggtgtttgagttttggctagggtttgtttccctttagaattgataattgttttggtcattggaacatcttggatcatgttttgtaaatttgtttcagaatcgtcgtcagattctgaggcaatgtctgcctaagattttttaattatttttgggaatttagtcatacccatttcttaaagagcctaaaatgtttgaattgaccaagtatagttggctgatgtttgtttggcggttgccggtttaggagattcctgagtggatgactcaggtttgacaaagatgatttgggtcgatgacccttcaat

SEQ ID NO: 7368 - DNA, 1085 bp, Glycine max
  Gm_smallRNAprecursor_201
agttgctttgagaaattttggatgtgattggaaccaaagcttcacttgttctggatcagctttggatgtatcaaattgtgcccaccattttacaaatgcttgcctccgtagtgatggatattgattagttttctcagtcttactgtaacgatattgccatgaaaaaattcatgacaaagaaaaactggagaaatattttaagtctgtcggaattcgtgattcctgagaattaaattgttttttaaattgagcaaatccttgttgaacctgctctgagaaaatctccggaatagggccaaagaaatcccaccattgtaagaaccaatttgggaaattatagattgtgttggttttgaaatatattaaccatgagtgcttgaagcgggtgttttggtgccaaaaaacctttgtccaagcatcaacataatcccaataggtataacctacaagatcaaatggtactaaatttttttccctttgtttaagtctgaaccaaaatgtcttggttgaagaacttttaggatctgtattgttgagtgaatgttcaacgtctgatcctttgggtctttgaagtgcttgatagacactgaatttgagtctaccaatattagttaatagaaggttcttgacttgttgatggcagttggtttgaagtgaaatcctgtcgggaacgccttggctgttgccttaaatgggttcttatcccagaattcagattccatctgcaaaatagttgaaaatttgtttttgtaaatataattgttagtttgtttggtgggtggtgtttgagttttggctagggtttgtttccctttagaattgataattgttttggtcattggaacatcttggatcatgttttgtaaatttgtttcagaatcgtcgtcagattctgaggcaatgtctgcctaagattttttaattatttttgggaatttagtcatacccatttcttaaagagcctaaaatgtttgaattgaccaagtatagttggctgatgtttgtttggcggttgccggtttaggagattcctgagtggatgactcaggtttgacaaagatgatttgggtcgatgacccttcaat

SEQ ID NO: 7369 - DNA, 1037 bp, Glycine max
  Gm_smallRNAprecursor_202
gttcaaatgtgggattgtaaatcacatccatataaactatgtgtgatggttaataaccttgagatattattatctacttgtcaaacaaagttaactatcattagaaggctaactgtttcagttatcagatcaccttcatttgcatgcaatccatgcatgttttacatttttccctgttttggcttattgttatatttaggccctctttctaaaaattgctgctgcattacctggaatggaaacactatcctccacaaaacaagaagatatctttgacgtgaacctaagatcttctggtggctatcaatctcaacctcagtccggcggatgtgcttgcagaatctgccttatcttgaagttctgcacctttttgctttgtgatatttgtttttaaatgtacgtttctcagatctgtaaaggttcattgtcttttagacttttaacggcattttatgataaaacacttaatcaagatctatgaagcacggacacttcagccctttgccgtgtccggtgtccgacacgcgtccgtgtcagtgtccgacaccgacacgacacccgtattacgttttatattttggacattacaggtgtccacgtgtccgtatccgtgtcgtgtccggtgtccgtgtcggtgtcggtgtcggtgcttcatagatcaagattcaagaactaagaactaatattgatacagtcggttgcctgtttagttgactgttcattataattttattatgcctgtaatgtgaaatataaacctggagaaattcactttcttcttttattatgcttggaattcatttcatttacatatatagtccaggtcccctcctccatttaaggcactgttgtttttcctaacgttatttctcaagcgatggatgtttggagtcttccaaagttggtgaagacagcaccatctaaaccattggtcatcagaatcaacttggtctgtcttgccatctttgatgttaagtagtatcaggctatattttgtatctttaatccttatatcattctgttctttatctttcgaa

SEQ ID NO: 7370 - DNA, 1038 bp, Glycine max
  Gm_smallRNAprecursor_203
gttcaaatgtgggattgtaaatcacatccatataaactatgtgtgatggttaataaccttgagatattattatctacttgtcaaacaaagttaactatcattagaaggctaactgtttcagttatcagatcaccttcatttgcatgcaatccatgcatgttttacatttttccctgttttggcttattgttatatttaggccctctttctaaaaattgctgctgcattacctggaatggaaacactatcctccacaaaacaagaagatatctttgacgtgaacctaagatcttctggtggctatcaatctcaacctcagtccggcggatgtgcttgcagaatctgccttatcttgaagttctgcacctttttgctttgtgatatttgtttttaaatgtacgtttctcagatctgtaaaggttcattgtcttttagacttttaacggcattttatgataaaacacttaatcaagatctatgaagcacggacacttcagccctttgccgtgtccggtgtccgacacgcgtccgtgtcagtgtccgacaccgacacgacacccgtattacgttttatattttggacattacaggtgtccacgtgtccgtatccgtgtcgtgtccggtgtccgtgtcggtgtcggtgtcggtgcttcatagatcaagattcaagaactaagaactaatattgatacagtcggttgcctgtttagttgactgttcattataattttattatgcctgtaatgtgaaatataaacctggagaaattcactttcttcttttattatgcttggaattcatttcatttacatatatagtccaggtcccctcctccatttaaggcactgttgtttttcctaacgttatttctcaagcgatggatgtttggagtcttccaaagttggtgaagacagcaccatctaaaccattggtcatcagaatcaacttggtctgtcttgccatctttgatgttaagtagtatcaggctatattttgtatctttaatccttatatcattctgttctttatctttcgaag

SEQ ID NO: 7371 - DNA, 1039 bp, Glycine max
  Gm_smallRNAprecursor_204
gttcaaatgtgggattgtaaatcacatccatataaactatgtgtgatggttaataaccttgagatattattatctacttgtcaaacaaagttaactatcattagaaggctaactgtttcagttatcagatcaccttcatttgcatgcaatccatgcatgttttacatttttccctgttttggcttattgttatatttaggccctctttctaaaaattgctgctgcattacctggaatggaaacactatcctccacaaaacaagaagatatctttgacgtgaacctaagatcttctggtggctatcaatctcaacctcagtccggcggatgtgcttgcagaatctgccttatcttgaagttctgcacctttttgctttgtgatatttgtttttaaatgtacgtttctcagatctgtaaaggttcattgtcttttagacttttaacggcattttatgataaaacacttaatcaagatctatgaagcacggacacttcagccctttgccgtgtccggtgtccgacacgcgtccgtgtcagtgtccgacaccgacacgacacccgtattacgttttatattttggacattacaggtgtccacgtgtccgtatccgtgtcgtgtccggtgtccgtgtcggtgtcggtgtcggtgcttcatagatcaagattcaagaactaagaactaatattgatacagtcggttgcctgtttagttgactgttcattataattttattatgcctgtaatgtgaaatataaacctggagaaattcactttcttcttttattatgcttggaattcatttcatttacatatatagtccaggtcccctcctccatttaaggcactgttgtttttcctaacgttatttctcaagcgatggatgtttggagtcttccaaagttggtgaagacagcaccatctaaaccattggtcatcagaatcaacttggtctgtcttgccatctttgatgttaagtagtatcaggctatattttgtatctttaatccttatatcattctgttctttatctttcgaagg

SEQ ID NO: 7372 - DNA, 1035 bp, Glycine max
  Gm_smallRNAprecursor_205
ttcaaatgtgggattgtaaatcacatccatataaactatgtgtgatggttaataaccttgagatattattatctacttgtcaaacaaagttaactatcattagaaggctaactgtttcagttatcagatcaccttcatttgcatgcaatccatgcatgttttacatttttccctgttttggcttattgttatatttaggccctctttctaaaaattgctgctgcattacctggaatggaaacactatcctccacaaaacaagaagatatctttgacgtgaacctaagatcttctggtggctatcaatctcaacctcagtccggcggatgtgcttgcagaatctgccttatcttgaagttctgcacctttttgctttgtgatatttgtttttaaatgtacgtttctcagatctgtaaaggttcattgtcttttagacttttaacggcattttatgataaaacacttaatcaagatctatgaagcacggacacttcagccctttgccgtgtccggtgtccgacacgcgtccgtgtcagtgtccgacaccgacacgacacccgtattacgttttatattttggacattacaggtgtccacgtgtccgtatccgtgtcgtgtccggtgtccgtgtcggtgtcggtgtcggtgcttcatagatcaagattcaagaactaagaactaatattgatacagtcggttgcctgtttagttgactgttcattataattttattatgcctgtaatgtgaaatataaacctggagaaattcactttcttcttttattatgcttggaattcatttcatttacatatatagtccaggtcccctcctccatttaaggcactgttgtttttcctaacgttatttctcaagcgatggatgtttggagtcttccaaagttggtgaagacagcaccatctaaaccattggtcatcagaatcaacttggtctgtcttgccatctttgatgttaagtagtatcaggctatattttgtatctttaatccttatatcattctgttctttatctttcga

SEQ ID NO: 7373 - DNA, 1035 bp, Glycine max; identical to SEQ ID NO: 7372
  Gm_smallRNAprecursor_206

SEQ ID NO: 7374 - DNA, 1036 bp, Glycine max
  Gm_smallRNAprecursor_207
ttcaaatgtgggattgtaaatcacatccatataaactatgtgtgatggttaataaccttgagatattattatctacttgtcaaacaaagttaactatcattagaaggctaactgtttcagttatcagatcaccttcatttgcatgcaatccatgcatgttttacatttttccctgttttggcttattgttatatttaggccctctttctaaaaattgctgctgcattacctggaatggaaacactatcctccacaaaacaagaagatatctttgacgtgaacctaagatcttctggtggctatcaatctcaacctcagtccggcggatgtgcttgcagaatctgccttatcttgaagttctgcacctttttgctttgtgatatttgtttttaaatgtacgtttctcagatctgtaaaggttcattgtcttttagacttttaacggcattttatgataaaacacttaatcaagatctatgaagcacggacacttcagccctttgccgtgtccggtgtccgacacgcgtccgtgtcagtgtccgacaccgacacgacacccgtattacgttttatattttggacattacaggtgtccacgtgtccgtatccgtgtcgtgtccggtgtccgtgtcggtgtcggtgtcggtgcttcatagatcaagattcaagaactaagaactaatattgatacagtcggttgcctgtttagttgactgttcattataattttattatgcctgtaatgtgaaatataaacctggagaaattcactttcttcttttattatgcttggaattcatttcatttacatatatagtccaggtcccctcctccatttaaggcactgttgtttttcctaacgttatttctcaagcgatggatgtttggagtcttccaaagttggtgaagacagcaccatctaaaccattggtcatcagaatcaacttggtctgtcttgccatctttgatgttaagtagtatcaggctatattttgtatctttaatccttatatcattctgttctttatctttcgaa

SEQ ID NO: 7375 - DNA, 1037 bp, Glycine max
  Gm_smallRNAprecursor_208
ttcaaatgtgggattgtaaatcacatccatataaactatgtgtgatggttaataaccttgagatattattatctacttgtcaaacaaagttaactatcattagaaggctaactgtttcagttatcagatcaccttcatttgcatgcaatccatgcatgttttacatttttccctgttttggcttattgttatatttaggccctctttctaaaaattgctgctgcattacctggaatggaaacactatcctccacaaaacaagaagatatctttgacgtgaacctaagatcttctggtggctatcaatctcaacctcagtccggcggatgtgcttgcagaatctgccttatcttgaagttctgcacctttttgctttgtgatatttgtttttaaatgtacgtttctcagatctgtaaaggttcattgtcttttagacttttaacggcattttatgataaaacacttaatcaagatctatgaagcacggacacttcagccctttgccgtgtccggtgtccgacacgcgtccgtgtcagtgtccgacaccgacacgacacccgtattacgttttatattttggacattacaggtgtccacgtgtccgtatccgtgtcgtgtccggtgtccgtgtcggtgtcggtgtcggtgcttcatagatcaagattcaagaactaagaactaatattgatacagtcggttgcctgtttagttgactgttcattataattttattatgcctgtaatgtgaaatataaacctggagaaattcactttcttcttttattatgcttggaattcatttcatttacatatatagtccaggtcccctcctccatttaaggcactgttgtttttcctaacgttatttctcaagcgatggatgtttggagtcttccaaagttggtgaagacagcaccatctaaaccattggtcatcagaatcaacttggtctgtcttgccatctttgatgttaagtagtatcaggctatattttgtatctttaatccttatatcattctgttctttatctttcgaag

SEQ ID NO: 7376 - DNA, 1113 bp, Glycine max
  Gm_smallRNAprecursor_209
ttcaaatgtgggattgtaaatcacatccatataaactatgtgtgatggttaataaccttgagatattattatctacttgtcaaacaaagttaactatcattagaaggctaactgtttcagttatcagatcaccttcatttgcatgcaatccatgcatgttttacatttttccctgttttggcttattgttatatttaggccctctttctaaaaattgctgctgcattacctggaatggaaacactatcctccacaaaacaagaagatatctttgacgtgaacctaagatcttctggtggctatcaatctcaacctcagtccggcggatgtgcttgcagaatctgccttatcttgaagttctgcacctttttgctttgtgatatttgtttttaaatgtacgtttctcagatctgtaaaggttcattgtcttttagacttttaacggcattttatgataaaacacttaatcaagatctatgaagcacggacacttcagccctttgccgtgtccggtgtccgacacgcgtccgtgtcagtgtccgacaccgacacgacacccgtattacgttttatattttggacattacaggtgtccacgtgtccgtatccgtgtcgtgtccggtgtccgtgtcggtgtcggtgtcggtgcttcatagatcaagattcaagaactaagaactaatattgatacagtcggttgcctgtttagttgactgttcattataattttattatgcctgtaatgtgaaatataaacctggagaaattcactttcttcttttattatgcttggaattcatttcatttacatatatagtccaggtcccctcctccatttaaggcactgttgtttttcctaacgttatttctcaagcgatggatgtttggagtcttccaaagttggtgaagacagcaccatctaaaccattggtcatcagaatcaacttggtctgtcttgccatctttgatgttaagtagtatcaggctatattttgtatctttaatccttatatcattctgttctttatctttcgaaggtagacatcttcctatgaatgactcctccagatgctccaacatttgggaaggtatttggtggacagagagttggac

SEQ ID NO: 7377 - DNA, 1114 bp, Glycine max
  Gm_smallRNAprecursor_210
ttcaaatgtgggattgtaaatcacatccatataaactatgtgtgatggttaataaccttgagatattattatctacttgtcaaacaaagttaactatcattagaaggctaactgtttcagttatcagatcaccttcatttgcatgcaatccatgcatgttttacatttttccctgttttggcttattgttatatttaggccctctttctaaaaattgctgctgcattacctggaatggaaacactatcctccacaaaacaagaagatatctttgacgtgaacctaagatcttctggtggctatcaatctcaacctcagtccggcggatgtgcttgcagaatctgccttatcttgaagttctgcacctttttgctttgtgatatttgtttttaaatgtacgtttctcagatctgtaaaggttcattgtcttttagacttttaacggcattttatgataaaacacttaatcaagatctatgaagcacggacacttcagccctttgccgtgtccggtgtccgacacgcgtccgtgtcagtgtccgacaccgacacgacacccgtattacgttttatattttggacattacaggtgtccacgtgtccgtatccgtgtcgtgtccggtgtccgtgtcggtgtcggtgtcggtgcttcatagatcaagattcaagaactaagaactaatattgatacagtcggttgcctgtttagttgactgttcattataattttattatgcctgtaatgtgaaatataaacctggagaaattcactttcttcttttattatgcttggaattcatttcatttacatatatagtccaggtcccctcctccatttaaggcactgttgtttttcctaacgttatttctcaagcgatggatgtttggagtcttccaaagttggtgaagacagcaccatctaaaccattggtcatcagaatcaacttggtctgtcttgccatctttgatgttaagtagtatcaggctatattttgtatctttaatccttatatcattctgttctttatctttcgaaggtagacatcttcctatgaatgactcctccagatgctccaacatttgggaaggtatttggtggacagagagttggaca

SEQ ID NO: 7378 - DNA, 1119 bp, Glycine max
  Gm_smallRNAprecursor_211
ttcaaatgtgggattgtaaatcacatccatataaactatgtgtgatggttaataaccttgagatattattatctacttgtcaaacaaagttaactatcattagaaggctaactgtttcagttatcagatcaccttcatttgcatgcaatccatgcatgttttacatttttccctgttttggcttattgttatatttaggccctctttctaaaaattgctgctgcattacctggaatggaaacactatcctccacaaaacaagaagatatctttgacgtgaacctaagatcttctggtggctatcaatctcaacctcagtccggcggatgtgcttgcagaatctgccttatcttgaagttctgcacctttttgctttgtgatatttgtttttaaatgtacgtttctcagatctgtaaaggttcattgtcttttagacttttaacggcattttatgataaaacacttaatcaagatctatgaagcacggacacttcagccctttgccgtgtccggtgtccgacacgcgtccgtgtcagtgtccgacaccgacacgacacccgtattacgttttatattttggacattacaggtgtccacgtgtccgtatccgtgtcgtgtccggtgtccgtgtcggtgtcggtgtcggtgcttcatagatcaagattcaagaactaagaactaatattgatacagtcggttgcctgtttagttgactgttcattataattttattatgcctgtaatgtgaaatataaacctggagaaattcactttcttcttttattatgcttggaattcatttcatttacatatatagtccaggtcccctcctccatttaaggcactgttgtttttcctaacgttatttctcaagcgatggatgtttggagtcttccaaagttggtgaagacagcaccatctaaaccattggtcatcagaatcaacttggtctgtcttgccatctttgatgttaagtagtatcaggctatattttgtatctttaatccttatatcattctgttctttatctttcgaaggtagacatcttcctatgaatgactcctccagatgctccaacatttgggaaggtatttggtggacagagagttggacaggtat

SEQ ID NO: 7379 - DNA, 1120 bp, Glycine max
  Gm_smallRNAprecursor_212
ttcaaatgtgggattgtaaatcacatccatataaactatgtgtgatggttaataaccttgagatattattatctacttgtcaaacaaagttaactatcattagaaggctaactgtttcagttatcagatcaccttcatttgcatgcaatccatgcatgttttacatttttccctgttttggcttattgttatatttaggccctctttctaaaaattgctgctgcattacctggaatggaaacactatcctccacaaaacaagaagatatctttgacgtgaacctaagatcttctggtggctatcaatctcaacctcagtccggcggatgtgcttgcagaatctgccttatcttgaagttctgcacctttttgctttgtgatatttgtttttaaatgtacgtttctcagatctgtaaaggttcattgtcttttagacttttaacggcattttatgataaaacacttaatcaagatctatgaagcacggacacttcagccctttgccgtgtccggtgtccgacacgcgtccgtgtcagtgtccgacaccgacacgacacccgtattacgttttatattttggacattacaggtgtccacgtgtccgtatccgtgtcgtgtccggtgtccgtgtcggtgtcggtgtcggtgcttcatagatcaagattcaagaactaagaactaatattgatacagtcggttgcctgtttagttgactgttcattataattttattatgcctgtaatgtgaaatataaacctggagaaattcactttcttcttttattatgcttggaattcatttcatttacatatatagtccaggtcccctcctccatttaaggcactgttgtttttcctaacgttatttctcaagcgatggatgtttggagtcttccaaagttggtgaagacagcaccatctaaaccattggtcatcagaatcaacttggtctgtcttgccatctttgatgttaagtagtatcaggctatattttgtatctttaatccttatatcattctgttctttatctttcgaaggtagacatcttcctatgaatgactcctccagatgctccaacatttgggaaggtatttggtggacagagagttggacaggtatg

SEQ ID NO: 7380 - DNA, 1034 bp, Glycine max
  Gm_smallRNAprecursor_213
tcaaatgtgggattgtaaatcacatccatataaactatgtgtgatggttaataaccttgagatattattatctacttgtcaaacaaagttaactatcattagaaggctaactgtttcagttatcagatcaccttcatttgcatgcaatccatgcatgttttacatttttccctgttttggcttattgttatatttaggccctctttctaaaaattgctgctgcattacctggaatggaaacactatcctccacaaaacaagaagatatctttgacgtgaacctaagatcttctggtggctatcaatctcaacctcagtccggcggatgtgcttgcagaatctgccttatcttgaagttctgcacctttttgctttgtgatatttgtttttaaatgtacgtttctcagatctgtaaaggttcattgtcttttagacttttaacggcattttatgataaaacacttaatcaagatctatgaagcacggacacttcagccctttgccgtgtccggtgtccgacacgcgtccgtgtcagtgtccgacaccgacacgacacccgtattacgttttatattttggacattacaggtgtccacgtgtccgtatccgtgtcgtgtccggtgtccgtgtcggtgtcggtgtcggtgcttcatagatcaagattcaagaactaagaactaatattgatacagtcggttgcctgtttagttgactgttcattataattttattatgcctgtaatgtgaaatataaacctggagaaattcactttcttcttttattatgcttggaattcatttcatttacatatatagtccaggtcccctcctccatttaaggcactgttgtttttcctaacgttatttctcaagcgatggatgtttggagtcttccaaagttggtgaagacagcaccatctaaaccattggtcatcagaatcaacttggtctgtcttgccatctttgatgttaagtagtatcaggctatattttgtatctttaatccttatatcattctgttctttatctttcga

SEQ ID NO: 7381 - DNA, 1034 bp, Glycine max; identical to SEQ ID NO: 7380
  Gm_smallRNAprecursor_214

SEQ ID NO: 7382 - DNA, 1035 bp, Glycine max
  Gm_smallRNAprecursor_215
tcaaatgtgggattgtaaatcacatccatataaactatgtgtgatggttaataaccttgagatattattatctacttgtcaaacaaagttaactatcattagaaggctaactgtttcagttatcagatcaccttcatttgcatgcaatccatgcatgttttacatttttccctgttttggcttattgttatatttaggccctctttctaaaaattgctgctgcattacctggaatggaaacactatcctccacaaaacaagaagatatctttgacgtgaacctaagatcttctggtggctatcaatctcaacctcagtccggcggatgtgcttgcagaatctgccttatcttgaagttctgcacctttttgctttgtgatatttgtttttaaatgtacgtttctcagatctgtaaaggttcattgtcttttagacttttaacggcattttatgataaaacacttaatcaagatctatgaagcacggacacttcagccctttgccgtgtccggtgtccgacacgcgtccgtgtcagtgtccgacaccgacacgacacccgtattacgttttatattttggacattacaggtgtccacgtgtccgtatccgtgtcgtgtccggtgtccgtgtcggtgtcggtgtcggtgcttcatagatcaagattcaagaactaagaactaatattgatacagtcggttgcctgtttagttgactgttcattataattttattatgcctgtaatgtgaaatataaacctggagaaattcactttcttcttttattatgcttggaattcatttcatttacatatatagtccaggtcccctcctccatttaaggcactgttgtttttcctaacgttatttctcaagcgatggatgtttggagtcttccaaagttggtgaagacagcaccatctaaaccattggtcatcagaatcaacttggtctgtcttgccatctttgatgttaagtagtatcaggctatattttgtatctttaatccttatatcattctgttctttatctttcgaa

SEQ ID NO: 7383 - DNA, 1089 bp, Glycine max
  Gm_smallRNAprecursor_216
tcaaatgtgggattgtaaatcacatccatataaactatgtgtgatggttaataaccttgagatattattatctacttgtcaaacaaagttaactatcattagaaggctaactgtttcagttatcagatcaccttcatttgcatgcaatccatgcatgttttacatttttccctgttttggcttattgttatatttaggccctctttctaaaaattgctgctgcattacctggaatggaaacactatcctccacaaaacaagaagatatctttgacgtgaacctaagatcttctggtggctatcaatctcaacctcagtccggcggatgtgcttgcagaatctgccttatcttgaagttctgcacctttttgctttgtgatatttgtttttaaatgtacgtttctcagatctgtaaaggttcattgtcttttagacttttaacggcattttatgataaaacacttaatcaagatctatgaagcacggacacttcagccctttgccgtgtccggtgtccgacacgcgtccgtgtcagtgtccgacaccgacacgacacccgtattacgttttatattttggacattacaggtgtccacgtgtccgtatccgtgtcgtgtccggtgtccgtgtcggtgtcggtgtcggtgcttcatagatcaagattcaagaactaagaactaatattgatacagtcggttgcctgtttagttgactgttcattataattttattatgcctgtaatgtgaaatataaacctggagaaattcactttcttcttttattatgcttggaattcatttcatttacatatatagtccaggtcccctcctccatttaaggcactgttgtttttcctaacgttatttctcaagcgatggatgtttggagtcttccaaagttggtgaagacagcaccatctaaaccattggtcatcagaatcaacttggtctgtcttgccatctttgatgttaagtagtatcaggctatattttgtatctttaatccttatatcattctgttctttatctttcgaaggtagacatcttcctatgaatgactcctccagatgctccaacatttgggaaggt

SEQ ID NO: 7384 - DNA, 1112 bp, Glycine max
  Gm_smallRNAprecursor_217
tcaaatgtgggattgtaaatcacatccatataaactatgtgtgatggttaataaccttgagatattattatctacttgtcaaacaaagttaactatcattagaaggctaactgtttcagttatcagatcaccttcatttgcatgcaatccatgcatgttttacatttttccctgttttggcttattgttatatttaggccctctttctaaaaattgctgctgcattacctggaatggaaacactatcctccacaaaacaagaagatatctttgacgtgaacctaagatcttctggtggctatcaatctcaacctcagtccggcggatgtgcttgcagaatctgccttatcttgaagttctgcacctttttgctttgtgatatttgtttttaaatgtacgtttctcagatctgtaaaggttcattgtcttttagacttttaacggcattttatgataaaacacttaatcaagatctatgaagcacggacacttcagccctttgccgtgtccggtgtccgacacgcgtccgtgtcagtgtccgacaccgacacgacacccgtattacgttttatattttggacattacaggtgtccacgtgtccgtatccgtgtcgtgtccggtgtccgtgtcggtgtcggtgtcggtgcttcatagatcaagattcaagaactaagaactaatattgatacagtcggttgcctgtttagttgactgttcattataattttattatgcctgtaatgtgaaatataaacctggagaaattcactttcttcttttattatgcttggaattcatttcatttacatatatagtccaggtcccctcctccatttaaggcactgttgtttttcctaacgttatttctcaagcgatggatgtttggagtcttccaaagttggtgaagacagcaccatctaaaccattggtcatcagaatcaacttggtctgtcttgccatctttgatgttaagtagtatcaggctatattttgtatctttaatccttatatcattctgttctttatctttcgaaggtagacatcttcctatgaatgactcctccagatgctccaacatttgggaaggtatttggtggacagagagttggac

SEQ ID NO: 7385 - DNA, 1112 bp, Glycine max; identical to SEQ ID NO: 7384
  Gm_smallRNAprecursor_218

SEQ ID NO: 7386 - DNA, 1112 bp, Glycine max; identical to SEQ ID NO: 7384
  Gm_smallRNAprecursor_219

SEQ ID NO: 7387 - DNA, 1112 bp, Glycine max; identical to SEQ ID NO: 7384
  Gm_smallRNAprecursor_220

SEQ ID NO: 7388 - DNA, 1113 bp, Glycine max
  Gm_smallRNAprecursor_221
tcaaatgtgggattgtaaatcacatccatataaactatgtgtgatggttaataaccttgagatattattatctacttgtcaaacaaagttaactatcattagaaggctaactgtttcagttatcagatcaccttcatttgcatgcaatccatgcatgttttacatttttccctgttttggcttattgttatatttaggccctctttctaaaaattgctgctgcattacctggaatggaaacactatcctccacaaaacaagaagatatctttgacgtgaacctaagatcttctggtggctatcaatctcaacctcagtccggcggatgtgcttgcagaatctgccttatcttgaagttctgcacctttttgctttgtgatatttgtttttaaatgtacgtttctcagatctgtaaaggttcattgtcttttagacttttaacggcattttatgataaaacacttaatcaagatctatgaagcacggacacttcagccctttgccgtgtccggtgtccgacacgcgtccgtgtcagtgtccgacaccgacacgacacccgtattacgttttatattttggacattacaggtgtccacgtgtccgtatccgtgtcgtgtccggtgtccgtgtcggtgtcggtgtcggtgcttcatagatcaagattcaagaactaagaactaatattgatacagtcggttgcctgtttagttgactgttcattataattttattatgcctgtaatgtgaaatataaacctggagaaattcactttcttcttttattatgcttggaattcatttcatttacatatatagtccaggtcccctcctccatttaaggcactgttgtttttcctaacgttatttctcaagcgatggatgtttggagtcttccaaagttggtgaagacagcaccatctaaaccattggtcatcagaatcaacttggtctgtcttgccatctttgatgttaagtagtatcaggctatattttgtatctttaatccttatatcattctgttctttatctttcgaaggtagacatcttcctatgaatgactcctccagatgctccaacatttgggaaggtatttggtggacagagagttggaca

SEQ ID NO: 7389 - DNA, 1113 bp, Glycine max; identical to SEQ ID NO: 7388
  Gm_smallRNAprecursor_222

SEQ ID NO: 7390 - DNA, 1114 bp, Glycine max
  Gm_smallRNAprecursor_223
tcaaatgtgggattgtaaatcacatccatataaactatgtgtgatggttaataaccttgagatattattatctacttgtcaaacaaagttaactatcattagaaggctaactgtttcagttatcagatcaccttcatttgcatgcaatccatgcatgttttacatttttccctgttttggcttattgttatatttaggccctctttctaaaaattgctgctgcattacctggaatggaaacactatcctccacaaaacaagaagatatctttgacgtgaacctaagatcttctggtggctatcaatctcaacctcagtccggcggatgtgcttgcagaatctgccttatcttgaagttctgcacctttttgctttgtgatatttgtttttaaatgtacgtttctcagatctgtaaaggttcattgtcttttagacttttaacggcattttatgataaaacacttaatcaagatctatgaagcacggacacttcagccctttgccgtgtccggtgtccgacacgcgtccgtgtcagtgtccgacaccgacacgacacccgtattacgttttatattttggacattacaggtgtccacgtgtccgtatccgtgtcgtgtccggtgtccgtgtcggtgtcggtgtcggtgcttcatagatcaagattcaagaactaagaactaatattgatacagtcggttgcctgtttagttgactgttcattataattttattatgcctgtaatgtgaaatataaacctggagaaattcactttcttcttttattatgcttggaattcatttcatttacatatatagtccaggtcccctcctccatttaaggcactgttgtttttcctaacgttatttctcaagcgatggatgtttggagtcttccaaagttggtgaagacagcaccatctaaaccattggtcatcagaatcaacttggtctgtcttgccatctttgatgttaagtagtatcaggctatattttgtatctttaatccttatatcattctgttctttatctttcgaaggtagacatcttcctatgaatgactcctccagatgctccaacatttgggaaggtatttggtggacagagagttggacag

SEQ ID NO: 7391 - DNA, 1118 bp, Glycine max
  Gm_smallRNAprecursor_224
tcaaatgtgggattgtaaatcacatccatataaactatgtgtgatggttaataaccttgagatattattatctacttgtcaaacaaagttaactatcattagaaggctaactgtttcagttatcagatcaccttcatttgcatgcaatccatgcatgttttacatttttccctgttttggcttattgttatatttaggccctctttctaaaaattgctgctgcattacctggaatggaaacactatcctccacaaaacaagaagatatctttgacgtgaacctaagatcttctggtggctatcaatctcaacctcagtccggcggatgtgcttgcagaatctgccttatcttgaagttctgcacctttttgctttgtgatatttgtttttaaatgtacgtttctcagatctgtaaaggttcattgtcttttagacttttaacggcattttatgataaaacacttaatcaagatctatgaagcacggacacttcagccctttgccgtgtccggtgtccgacacgcgtccgtgtcagtgtccgacaccgacacgacacccgtattacgttttatattttggacattacaggtgtccacgtgtccgtatccgtgtcgtgtccggtgtccgtgtcggtgtcggtgtcggtgcttcatagatcaagattcaagaactaagaactaatattgatacagtcggttgcctgtttagttgactgttcattataattttattatgcctgtaatgtgaaatataaacctggagaaattcactttcttcttttattatgcttggaattcatttcatttacatatatagtccaggtcccctcctccatttaaggcactgttgtttttcctaacgttatttctcaagcgatggatgtttggagtcttccaaagttggtgaagacagcaccatctaaaccattggtcatcagaatcaacttggtctgtcttgccatctttgatgttaagtagtatcaggctatattttgtatctttaatccttatatcattctgttctttatctttcgaaggtagacatcttcctatgaatgactcctccagatgctccaacatttgggaaggtatttggtggacagagagttggacaggtat

SEQ ID NO: 7392 - DNA, 1118 bp, Glycine max; identical to SEQ ID NO: 7391
  Gm_smallRNAprecursor_225

SEQ ID NO: 7393 - DNA, 1119 bp, Glycine max
  Gm_smallRNAprecursor_226
tcaaatgtgggattgtaaatcacatccatataaactatgtgtgatggttaataaccttgagatattattatctacttgtcaaacaaagttaactatcattagaaggctaactgtttcagttatcagatcaccttcatttgcatgcaatccatgcatgttttacatttttccctgttttggcttattgttatatttaggccctctttctaaaaattgctgctgcattacctggaatggaaacactatcctccacaaaacaagaagatatctttgacgtgaacctaagatcttctggtggctatcaatctcaacctcagtccggcggatgtgcttgcagaatctgccttatcttgaagttctgcacctttttgctttgtgatatttgtttttaaatgtacgtttctcagatctgtaaaggttcattgtcttttagacttttaacggcattttatgataaaacacttaatcaagatctatgaagcacggacacttcagccctttgccgtgtccggtgtccgacacgcgtccgtgtcagtgtccgacaccgacacgacacccgtattacgttttatattttggacattacaggtgtccacgtgtccgtatccgtgtcgtgtccggtgtccgtgtcggtgtcggtgtcggtgcttcatagatcaagattcaagaactaagaactaatattgatacagtcggttgcctgtttagttgactgttcattataattttattatgcctgtaatgtgaaatataaacctggagaaattcactttcttcttttattatgcttggaattcatttcatttacatatatagtccaggtcccctcctccatttaaggcactgttgtttttcctaacgttatttctcaagcgatggatgtttggagtcttccaaagttggtgaagacagcaccatctaaaccattggtcatcagaatcaacttggtctgtcttgccatctttgatgttaagtagtatcaggctatattttgtatctttaatccttatatcattctgttctttatctttcgaaggtagacatcttcctatgaatgactcctccagatgctccaacatttgggaaggtatttggtggacagagagttggacaggtatg

SEQ ID NO: 7394 - DNA, 1119 bp, Glycine max; identical to SEQ ID NO: 7393
  Gm_smallRNAprecursor_227

SEQ ID NO: 7395 - DNA, 1119 bp, Glycine max; identical to SEQ ID NO: 7393
  Gm_smallRNAprecursor_228

SEQ ID NO: 7396 - DNA, 1110 bp, Glycine max
  Gm_smallRNAprecursor_229
caaatgtgggattgtaaatcacatccatataaactatgtgtgatggttaataaccttgagatattattatctacttgtcaaacaaagttaactatcattagaaggctaactgtttcagttatcagatcaccttcatttgcatgcaatccatgcatgttttacatttttccctgttttggcttattgttatatttaggccctctttctaaaaattgctgctgcattacctggaatggaaacactatcctccacaaaacaagaagatatctttgacgtgaacctaagatcttctggtggctatcaatctcaacctcagtccggcggatgtgcttgcagaatctgccttatcttgaagttctgcacctttttgctttgtgatatttgtttttaaatgtacgtttctcagatctgtaaaggttcattgtcttttagacttttaacggcattttatgataaaacacttaatcaagatctatgaagcacggacacttcagccctttgccgtgtccggtgtccgacacgcgtccgtgtcagtgtccgacaccgacacgacacccgtattacgttttatattttggacattacaggtgtccacgtgtccgtatccgtgtcgtgtccggtgtccgtgtcggtgtcggtgtcggtgcttcatagatcaagattcaagaactaagaactaatattgatacagtcggttgcctgtttagttgactgttcattataattttattatgcctgtaatgtgaaatataaacctggagaaattcactttcttcttttattatgcttggaattcatttcatttacatatatagtccaggtcccctcctccatttaaggcactgttgtttttcctaacgttatttctcaagcgatggatgtttggagtcttccaaagttggtgaagacagcaccatctaaaccattggtcatcagaatcaacttggtctgtcttgccatctttgatgttaagtagtatcaggctatattttgtatctttaatccttatatcattctgttctttatctttcgaaggtagacatcttcctatgaatgactcctccagatgctccaacatttgggaaggtatttggtggacagagagttgga

SEQ ID NO: 7397 - DNA, 1111 bp, Glycine max
  Gm_smallRNAprecursor_230
caaatgtgggattgtaaatcacatccatataaactatgtgtgatggttaataaccttgagatattattatctacttgtcaaacaaagttaactatcattagaaggctaactgtttcagttatcagatcaccttcatttgcatgcaatccatgcatgttttacatttttccctgttttggcttattgttatatttaggccctctttctaaaaattgctgctgcattacctggaatggaaacactatcctccacaaaacaagaagatatctttgacgtgaacctaagatcttctggtggctatcaatctcaacctcagtccggcggatgtgcttgcagaatctgccttatcttgaagttctgcacctttttgctttgtgatatttgtttttaaatgtacgtttctcagatctgtaaaggttcattgtcttttagacttttaacggcattttatgataaaacacttaatcaagatctatgaagcacggacacttcagccctttgccgtgtccggtgtccgacacgcgtccgtgtcagtgtccgacaccgacacgacacccgtattacgttttatattttggacattacaggtgtccacgtgtccgtatccgtgtcgtgtccggtgtccgtgtcggtgtcggtgtcggtgcttcatagatcaagattcaagaactaagaactaatattgatacagtcggttgcctgtttagttgactgttcattataattttattatgcctgtaatgtgaaatataaacctggagaaattcactttcttcttttattatgcttggaattcatttcatttacatatatagtccaggtcccctcctccatttaaggcactgttgtttttcctaacgttatttctcaagcgatggatgtttggagtcttccaaagttggtgaagacagcaccatctaaaccattggtcatcagaatcaacttggtctgtcttgccatctttgatgttaagtagtatcaggctatattttgtatctttaatccttatatcattctgttctttatctttcgaaggtagacatcttcctatgaatgactcctccagatgctccaacatttgggaaggtatttggtggacagagagttggac

SEQ ID NO: 7398 - DNA, 1111 bp, Glycine max; identical to SEQ ID NO: 7397
  Gm_smallRNAprecursor_231

SEQ ID NO: 7399 - DNA, 1117 bp, Glycine max
  Gm_smallRNAprecursor_232
caaatgtgggattgtaaatcacatccatataaactatgtgtgatggttaataaccttgagatattattatctacttgtcaaacaaagttaactatcattagaaggctaactgtttcagttatcagatcaccttcatttgcatgcaatccatgcatgttttacatttttccctgttttggcttattgttatatttaggccctctttctaaaaattgctgctgcattacctggaatggaaacactatcctccacaaaacaagaagatatctttgacgtgaacctaagatcttctggtggctatcaatctcaacctcagtccggcggatgtgcttgcagaatctgccttatcttgaagttctgcacctttttgctttgtgatatttgtttttaaatgtacgtttctcagatctgtaaaggttcattgtcttttagacttttaacggcattttatgataaaacacttaatcaagatctatgaagcacggacacttcagccctttgccgtgtccggtgtccgacacgcgtccgtgtcagtgtccgacaccgacacgacacccgtattacgttttatattttggacattacaggtgtccacgtgtccgtatccgtgtcgtgtccggtgtccgtgtcggtgtcggtgtcggtgcttcatagatcaagattcaagaactaagaactaatattgatacagtcggttgcctgtttagttgactgttcattataattttattatgcctgtaatgtgaaatataaacctggagaaattcactttcttcttttattatgcttggaattcatttcatttacatatatagtccaggtcccctcctccatttaaggcactgttgtttttcctaacgttatttctcaagcgatggatgtttggagtcttccaaagttggtgaagacagcaccatctaaaccattggtcatcagaatcaacttggtctgtcttgccatctttgatgttaagtagtatcaggctatattttgtatctttaatccttatatcattctgttctttatctttcgaaggtagacatcttcctatgaatgactcctccagatgctccaacatttgggaaggtatttggtggacagagagttggacaggtat

SEQ ID NO: 7400 - DNA, 1118 bp, Glycine max
  Gm_smallRNAprecursor_233
caaatgtgggattgtaaatcacatccatataaactatgtgtgatggttaataaccttgagatattattatctacttgtcaaacaaagttaactatcattagaaggctaactgtttcagttatcagatcaccttcatttgcatgcaatccatgcatgttttacatttttccctgttttggcttattgttatatttaggccctctttctaaaaattgctgctgcattacctggaatggaaacactatcctccacaaaacaagaagatatctttgacgtgaacctaagatcttctggtggctatcaatctcaacctcagtccggcggatgtgcttgcagaatctgccttatcttgaagttctgcacctttttgctttgtgatatttgtttttaaatgtacgtttctcagatctgtaaaggttcattgtcttttagacttttaacggcattttatgataaaacacttaatcaagatctatgaagcacggacacttcagccctttgccgtgtccggtgtccgacacgcgtccgtgtcagtgtccgacaccgacacgacacccgtattacgttttatattttggacattacaggtgtccacgtgtccgtatccgtgtcgtgtccggtgtccgtgtcggtgtcggtgtcggtgcttcatagatcaagattcaagaactaagaactaatattgatacagtcggttgcctgtttagttgactgttcattataattttattatgcctgtaatgtgaaatataaacctggagaaattcactttcttcttttattatgcttggaattcatttcatttacatatatagtccaggtcccctcctccatttaaggcactgttgtttttcctaacgttatttctcaagcgatggatgtttggagtcttccaaagttggtgaagacagcaccatctaaaccattggtcatcagaatcaacttggtctgtcttgccatctttgatgttaagtagtatcaggctatattttgtatctttaatccttatatcattctgttctttatctttcgaaggtagacatcttcctatgaatgactcctccagatgctccaacatttgggaaggtatttggtggacagagagttggacaggtatg

SEQ ID NO: 7401 - DNA, 1033 bp, Glycine max
  Gm_smallRNAprecursor_234
gtgggattgtaaatcacatccatataaactatgtgtgatggttaataaccttgagatattattatctacttgtcaaacaaagttaactatcattagaaggctaactgtttcagttatcagatcaccttcatttgcatgcaatccatgcatgttttacatttttccctgttttggcttattgttatatttaggccctctttctaaaaattgctgctgcattacctggaatggaaacactatcctccacaaaacaagaagatatctttgacgtgaacctaagatcttctggtggctatcaatctcaacctcagtccggcggatgtgcttgcagaatctgccttatcttgaagttctgcacctttttgctttgtgatatttgtttttaaatgtacgtttctcagatctgtaaaggttcattgtcttttagacttttaacggcattttatgataaaacacttaatcaagatctatgaagcacggacacttcagccctttgccgtgtccggtgtccgacacgcgtccgtgtcagtgtccgacaccgacacgacacccgtattacgttttatattttggacattacaggtgtccacgtgtccgtatccgtgtcgtgtccggtgtccgtgtcggtgtcggtgtcggtgcttcatagatcaagattcaagaactaagaactaatattgatacagtcggttgcctgtttagttgactgttcattataattttattatgcctgtaatgtgaaatataaacctggagaaattcactttcttcttttattatgcttggaattcatttcatttacatatatagtccaggtcccctcctccatttaaggcactgttgtttttcctaacgttatttctcaagcgatggatgtttggagtcttccaaagttggtgaagacagcaccatctaaaccattggtcatcagaatcaacttggtctgtcttgccatctttgatgttaagtagtatcaggctatattttgtatctttaatccttatatcattctgttctttatctttcgaaggta

SEQ ID NO: 7402 - DNA, 1113 bp, Glycine max
  Gm_smallRNAprecursor_235
gtgggattgtaaatcacatccatataaactatgtgtgatggttaataaccttgagatattattatctacttgtcaaacaaagttaactatcattagaaggctaactgtttcagttatcagatcaccttcatttgcatgcaatccatgcatgttttacatttttccctgttttggcttattgttatatttaggccctctttctaaaaattgctgctgcattacctggaatggaaacactatcctccacaaaacaagaagatatctttgacgtgaacctaagatcttctggtggctatcaatctcaacctcagtccggcggatgtgcttgcagaatctgccttatcttgaagttctgcacctttttgctttgtgatatttgtttttaaatgtacgtttctcagatctgtaaaggttcattgtcttttagacttttaacggcattttatgataaaacacttaatcaagatctatgaagcacggacacttcagccctttgccgtgtccggtgtccgacacgcgtccgtgtcagtgtccgacaccgacacgacacccgtattacgttttatattttggacattacaggtgtccacgtgtccgtatccgtgtcgtgtccggtgtccgtgtcggtgtcggtgtcggtgcttcatagatcaagattcaagaactaagaactaatattgatacagtcggttgcctgtttagttgactgttcattataattttattatgcctgtaatgtgaaatataaacctggagaaattcactttcttcttttattatgcttggaattcatttcatttacatatatagtccaggtcccctcctccatttaaggcactgttgtttttcctaacgttatttctcaagcgatggatgtttggagtcttccaaagttggtgaagacagcaccatctaaaccattggtcatcagaatcaacttggtctgtcttgccatctttgatgttaagtagtatcaggctatattttgtatctttaatccttatatcattctgttctttatctttcgaaggtagacatcttcctatgaatgactcctccagatgctccaacatttgggaaggtatttggtggacagagagttggacaggtatg

SEQ ID NO: 7403 - DNA, 1032 bp, Glycine max
  Gm_smallRNAprecursor_236
tgggattgtaaatcacatccatataaactatgtgtgatggttaataaccttgagatattattatctacttgtcaaacaaagttaactatcattagaaggctaactgtttcagttatcagatcaccttcatttgcatgcaatccatgcatgttttacatttttccctgttttggcttattgttatatttaggccctctttctaaaaattgctgctgcattacctggaatggaaacactatcctccacaaaacaagaagatatctttgacgtgaacctaagatcttctggtggctatcaatctcaacctcagtccggcggatgtgcttgcagaatctgccttatcttgaagttctgcacctttttgctttgtgatatttgtttttaaatgtacgtttctcagatctgtaaaggttcattgtcttttagacttttaacggcattttatgataaaacacttaatcaagatctatgaagcacggacacttcagccctttgccgtgtccggtgtccgacacgcgtccgtgtcagtgtccgacaccgacacgacacccgtattacgttttatattttggacattacaggtgtccacgtgtccgtatccgtgtcgtgtccggtgtccgtgtcggtgtcggtgtcggtgcttcatagatcaagattcaagaactaagaactaatattgatacagtcggttgcctgtttagttgactgttcattataattttattatgcctgtaatgtgaaatataaacctggagaaattcactttcttcttttattatgcttggaattcatttcatttacatatatagtccaggtcccctcctccatttaaggcactgttgtttttcctaacgttatttctcaagcgatggatgtttggagtcttccaaagttggtgaagacagcaccatctaaaccattggtcatcagaatcaacttggtctgtcttgccatctttgatgttaagtagtatcaggctatattttgtatctttaatccttatatcattctgttctttatctttcgaaggta

SEQ ID NO: 7404 - DNA, 1082 bp, Glycine max
  Gm_smallRNAprecursor_237
tgggattgtaaatcacatccatataaactatgtgtgatggttaataaccttgagatattattatctacttgtcaaacaaagttaactatcattagaaggctaactgtttcagttatcagatcaccttcatttgcatgcaatccatgcatgttttacatttttccctgttttggcttattgttatatttaggccctctttctaaaaattgctgctgcattacctggaatggaaacactatcctccacaaaacaagaagatatctttgacgtgaacctaagatcttctggtggctatcaatctcaacctcagtccggcggatgtgcttgcagaatctgccttatcttgaagttctgcacctttttgctttgtgatatttgtttttaaatgtacgtttctcagatctgtaaaggttcattgtcttttagacttttaacggcattttatgataaaacacttaatcaagatctatgaagcacggacacttcagccctttgccgtgtccggtgtccgacacgcgtccgtgtcagtgtccgacaccgacacgacacccgtattacgttttatattttggacattacaggtgtccacgtgtccgtatccgtgtcgtgtccggtgtccgtgtcggtgtcggtgtcggtgcttcatagatcaagattcaagaactaagaactaatattgatacagtcggttgcctgtttagttgactgttcattataattttattatgcctgtaatgtgaaatataaacctggagaaattcactttcttcttttattatgcttggaattcatttcatttacatatatagtccaggtcccctcctccatttaaggcactgttgtttttcctaacgttatttctcaagcgatggatgtttggagtcttccaaagttggtgaagacagcaccatctaaaccattggtcatcagaatcaacttggtctgtcttgccatctttgatgttaagtagtatcaggctatattttgtatctttaatccttatatcattctgttctttatctttcgaaggtagacatcttcctatgaatgactcctccagatgctccaacatttgggaaggt

SEQ ID NO: 7405 - DNA, 1094 bp, Glycine max
  Gm_smallRNAprecursor_238
tgggattgtaaatcacatccatataaactatgtgtgatggttaataaccttgagatattattatctacttgtcaaacaaagttaactatcattagaaggctaactgtttcagttatcagatcaccttcatttgcatgcaatccatgcatgttttacatttttccctgttttggcttattgttatatttaggccctctttctaaaaattgctgctgcattacctggaatggaaacactatcctccacaaaacaagaagatatctttgacgtgaacctaagatcttctggtggctatcaatctcaacctcagtccggcggatgtgcttgcagaatctgccttatcttgaagttctgcacctttttgctttgtgatatttgtttttaaatgtacgtttctcagatctgtaaaggttcattgtcttttagacttttaacggcattttatgataaaacacttaatcaagatctatgaagcacggacacttcagccctttgccgtgtccggtgtccgacacgcgtccgtgtcagtgtccgacaccgacacgacacccgtattacgttttatattttggacattacaggtgtccacgtgtccgtatccgtgtcgtgtccggtgtccgtgtcggtgtcggtgtcggtgcttcatagatcaagattcaagaactaagaactaatattgatacagtcggttgcctgtttagttgactgttcattataattttattatgcctgtaatgtgaaatataaacctggagaaattcactttcttcttttattatgcttggaattcatttcatttacatatatagtccaggtcccctcctccatttaaggcactgttgtttttcctaacgttatttctcaagcgatggatgtttggagtcttccaaagttggtgaagacagcaccatctaaaccattggtcatcagaatcaacttggtctgtcttgccatctttgatgttaagtagtatcaggctatattttgtatctttaatccttatatcattctgttctttatctttcgaaggtagacatcttcctatgaatgactcctccagatgctccaacatttgggaaggtatttggtggaca

SEQ ID NO: 7406 - DNA, 1112 bp, Glycine max
  Gm_smallRNAprecursor_239
tgggattgtaaatcacatccatataaactatgtgtgatggttaataaccttgagatattattatctacttgtcaaacaaagttaactatcattagaaggctaactgtttcagttatcagatcaccttcatttgcatgcaatccatgcatgttttacatttttccctgttttggcttattgttatatttaggccctctttctaaaaattgctgctgcattacctggaatggaaacactatcctccacaaaacaagaagatatctttgacgtgaacctaagatcttctggtggctatcaatctcaacctcagtccggcggatgtgcttgcagaatctgccttatcttgaagttctgcacctttttgctttgtgatatttgtttttaaatgtacgtttctcagatctgtaaaggttcattgtcttttagacttttaacggcattttatgataaaacacttaatcaagatctatgaagcacggacacttcagccctttgccgtgtccggtgtccgacacgcgtccgtgtcagtgtccgacaccgacacgacacccgtattacgttttatattttggacattacaggtgtccacgtgtccgtatccgtgtcgtgtccggtgtccgtgtcggtgtcggtgtcggtgcttcatagatcaagattcaagaactaagaactaatattgatacagtcggttgcctgtttagttgactgttcattataattttattatgcctgtaatgtgaaatataaacctggagaaattcactttcttcttttattatgcttggaattcatttcatttacatatatagtccaggtcccctcctccatttaaggcactgttgtttttcctaacgttatttctcaagcgatggatgtttggagtcttccaaagttggtgaagacagcaccatctaaaccattggtcatcagaatcaacttggtctgtcttgccatctttgatgttaagtagtatcaggctatattttgtatctttaatccttatatcattctgttctttatctttcgaaggtagacatcttcctatgaatgactcctccagatgctccaacatttgggaaggtatttggtggacagagagttggacaggtatg

SEQ ID NO: 7407 - DNA, 1101 bp, Glycine max
  Gm_smallRNAprecursor_240
attgtaaatcacatccatataaactatgtgtgatggttaataaccttgagatattattatctacttgtcaaacaaagttaactatcattagaaggctaactgtttcagttatcagatcaccttcatttgcatgcaatccatgcatgttttacatttttccctgttttggcttattgttatatttaggccctctttctaaaaattgctgctgcattacctggaatggaaacactatcctccacaaaacaagaagatatctttgacgtgaacctaagatcttctggtggctatcaatctcaacctcagtccggcggatgtgcttgcagaatctgccttatcttgaagttctgcacctttttgctttgtgatatttgtttttaaatgtacgtttctcagatctgtaaaggttcattgtcttttagacttttaacggcattttatgataaaacacttaatcaagatctatgaagcacggacacttcagccctttgccgtgtccggtgtccgacacgcgtccgtgtcagtgtccgacaccgacacgacacccgtattacgttttatattttggacattacaggtgtccacgtgtccgtatccgtgtcgtgtccggtgtccgtgtcggtgtcggtgtcggtgcttcatagatcaagattcaagaactaagaactaatattgatacagtcggttgcctgtttagttgactgttcattataattttattatgcctgtaatgtgaaatataaacctggagaaattcactttcttcttttattatgcttggaattcatttcatttacatatatagtccaggtcccctcctccatttaaggcactgttgtttttcctaacgttatttctcaagcgatggatgtttggagtcttccaaagttggtgaagacagcaccatctaaaccattggtcatcagaatcaacttggtctgtcttgccatctttgatgttaagtagtatcaggctatattttgtatctttaatccttatatcattctgttctttatctttcgaaggtagacatcttcctatgaatgactcctccagatgctccaacatttgggaaggtatttggtggacagagagttggac

SEQ ID NO: 7408 - DNA, 1101 bp, Glycine max; identical to SEQ ID NO: 7407
  Gm_smallRNAprecursor_241

SEQ ID NO: 7409 - DNA, 1102 bp, Glycine max
  Gm_smallRNAprecursor_242
attgtaaatcacatccatataaactatgtgtgatggttaataaccttgagatattattatctacttgtcaaacaaagttaactatcattagaaggctaactgtttcagttatcagatcaccttcatttgcatgcaatccatgcatgttttacatttttccctgttttggcttattgttatatttaggccctctttctaaaaattgctgctgcattacctggaatggaaacactatcctccacaaaacaagaagatatctttgacgtgaacctaagatcttctggtggctatcaatctcaacctcagtccggcggatgtgcttgcagaatctgccttatcttgaagttctgcacctttttgctttgtgatatttgtttttaaatgtacgtttctcagatctgtaaaggttcattgtcttttagacttttaacggcattttatgataaaacacttaatcaagatctatgaagcacggacacttcagccctttgccgtgtccggtgtccgacacgcgtccgtgtcagtgtccgacaccgacacgacacccgtattacgttttatattttggacattacaggtgtccacgtgtccgtatccgtgtcgtgtccggtgtccgtgtcggtgtcggtgtcggtgcttcatagatcaagattcaagaactaagaactaatattgatacagtcggttgcctgtttagttgactgttcattataattttattatgcctgtaatgtgaaatataaacctggagaaattcactttcttcttttattatgcttggaattcatttcatttacatatatagtccaggtcccctcctccatttaaggcactgttgtttttcctaacgttatttctcaagcgatggatgtttggagtcttccaaagttggtgaagacagcaccatctaaaccattggtcatcagaatcaacttggtctgtcttgccatctttgatgttaagtagtatcaggctatattttgtatctttaatccttatatcattctgttctttatctttcgaaggtagacatcttcctatgaatgactcctccagatgctccaacatttgggaaggtatttggtggacagagagttggaca

SEQ ID NO: 7410 - DNA, 1103 bp, Glycine max
  Gm_smallRNAprecursor_243
attgtaaatcacatccatataaactatgtgtgatggttaataaccttgagatattattatctacttgtcaaacaaagttaactatcattagaaggctaactgtttcagttatcagatcaccttcatttgcatgcaatccatgcatgttttacatttttccctgttttggcttattgttatatttaggccctctttctaaaaattgctgctgcattacctggaatggaaacactatcctccacaaaacaagaagatatctttgacgtgaacctaagatcttctggtggctatcaatctcaacctcagtccggcggatgtgcttgcagaatctgccttatcttgaagttctgcacctttttgctttgtgatatttgtttttaaatgtacgtttctcagatctgtaaaggttcattgtcttttagacttttaacggcattttatgataaaacacttaatcaagatctatgaagcacggacacttcagccctttgccgtgtccggtgtccgacacgcgtccgtgtcagtgtccgacaccgacacgacacccgtattacgttttatattttggacattacaggtgtccacgtgtccgtatccgtgtcgtgtccggtgtccgtgtcggtgtcggtgtcggtgcttcatagatcaagattcaagaactaagaactaatattgatacagtcggttgcctgtttagttgactgttcattataattttattatgcctgtaatgtgaaatataaacctggagaaattcactttcttcttttattatgcttggaattcatttcatttacatatatagtccaggtcccctcctccatttaaggcactgttgtttttcctaacgttatttctcaagcgatggatgtttggagtcttccaaagttggtgaagacagcaccatctaaaccattggtcatcagaatcaacttggtctgtcttgccatctttgatgttaagtagtatcaggctatattttgtatctttaatccttatatcattctgttctttatctttcgaaggtagacatcttcctatgaatgactcctccagatgctccaacatttgggaaggtatttggtggacagagagttggacag

SEQ ID NO: 7411 - DNA, 1108 bp, Glycine max
  Gm_smallRNAprecursor_244
attgtaaatcacatccatataaactatgtgtgatggttaataaccttgagatattattatctacttgtcaaacaaagttaactatcattagaaggctaactgtttcagttatcagatcaccttcatttgcatgcaatccatgcatgttttacatttttccctgttttggcttattgttatatttaggccctctttctaaaaattgctgctgcattacctggaatggaaacactatcctccacaaaacaagaagatatctttgacgtgaacctaagatcttctggtggctatcaatctcaacctcagtccggcggatgtgcttgcagaatctgccttatcttgaagttctgcacctttttgctttgtgatatttgtttttaaatgtacgtttctcagatctgtaaaggttcattgtcttttagacttttaacggcattttatgataaaacacttaatcaagatctatgaagcacggacacttcagccctttgccgtgtccggtgtccgacacgcgtccgtgtcagtgtccgacaccgacacgacacccgtattacgttttatattttggacattacaggtgtccacgtgtccgtatccgtgtcgtgtccggtgtccgtgtcggtgtcggtgtcggtgcttcatagatcaagattcaagaactaagaactaatattgatacagtcggttgcctgtttagttgactgttcattataattttattatgcctgtaatgtgaaatataaacctggagaaattcactttcttcttttattatgcttggaattcatttcatttacatatatagtccaggtcccctcctccatttaaggcactgttgtttttcctaacgttatttctcaagcgatggatgtttggagtcttccaaagttggtgaagacagcaccatctaaaccattggtcatcagaatcaacttggtctgtcttgccatctttgatgttaagtagtatcaggctatattttgtatctttaatccttatatcattctgttctttatctttcgaaggtagacatcttcctatgaatgactcctccagatgctccaacatttgggaaggtatttggtggacagagagttggacaggtatg

SEQ ID NO: 7412 - DNA, 1080 bp, Glycine max
  Gm_smallRNAprecursor_245
actatgtgtgatggttaataaccttgagatattattatctacttgtcaaacaaagttaactatcattagaaggctaactgtttcagttatcagatcaccttcatttgcatgcaatccatgcatgttttacatttttccctgttttggcttattgttatatttaggccctctttctaaaaattgctgctgcattacctggaatggaaacactatcctccacaaaacaagaagatatctttgacgtgaacctaagatcttctggtggctatcaatctcaacctcagtccggcggatgtgcttgcagaatctgccttatcttgaagttctgcacctttttgctttgtgatatttgtttttaaatgtacgtttctcagatctgtaaaggttcattgtcttttagacttttaacggcattttatgataaaacacttaatcaagatctatgaagcacggacacttcagccctttgccgtgtccggtgtccgacacgcgtccgtgtcagtgtccgacaccgacacgacacccgtattacgttttatattttggacattacaggtgtccacgtgtccgtatccgtgtcgtgtccggtgtccgtgtcggtgtcggtgtcggtgcttcatagatcaagattcaagaactaagaactaatattgatacagtcggttgcctgtttagttgactgttcattataattttattatgcctgtaatgtgaaatataaacctggagaaattcactttcttcttttattatgcttggaattcatttcatttacatatatagtccaggtcccctcctccatttaaggcactgttgtttttcctaacgttatttctcaagcgatggatgtttggagtcttccaaagttggtgaagacagcaccatctaaaccattggtcatcagaatcaacttggtctgtcttgccatctttgatgttaagtagtatcaggctatattttgtatctttaatccttatatcattctgttctttatctttcgaaggtagacatcttcctatgaatgactcctccagatgctccaacatttgggaaggtatttggtggacagagagttggaca

SEQ ID NO: 7413 - DNA, 1081 bp, Glycine max
  Gm_smallRNAprecursor_246
actatgtgtgatggttaataaccttgagatattattatctacttgtcaaacaaagttaactatcattagaaggctaactgtttcagttatcagatcaccttcatttgcatgcaatccatgcatgttttacatttttccctgttttggcttattgttatatttaggccctctttctaaaaattgctgctgcattacctggaatggaaacactatcctccacaaaacaagaagatatctttgacgtgaacctaagatcttctggtggctatcaatctcaacctcagtccggcggatgtgcttgcagaatctgccttatcttgaagttctgcacctttttgctttgtgatatttgtttttaaatgtacgtttctcagatctgtaaaggttcattgtcttttagacttttaacggcattttatgataaaacacttaatcaagatctatgaagcacggacacttcagccctttgccgtgtccggtgtccgacacgcgtccgtgtcagtgtccgacaccgacacgacacccgtattacgttttatattttggacattacaggtgtccacgtgtccgtatccgtgtcgtgtccggtgtccgtgtcggtgtcggtgtcggtgcttcatagatcaagattcaagaactaagaactaatattgatacagtcggttgcctgtttagttgactgttcattataattttattatgcctgtaatgtgaaatataaacctggagaaattcactttcttcttttattatgcttggaattcatttcatttacatatatagtccaggtcccctcctccatttaaggcactgttgtttttcctaacgttatttctcaagcgatggatgtttggagtcttccaaagttggtgaagacagcaccatctaaaccattggtcatcagaatcaacttggtctgtcttgccatctttgatgttaagtagtatcaggctatattttgtatctttaatccttatatcattctgttctttatctttcgaaggtagacatcttcctatgaatgactcctccagatgctccaacatttgggaaggtatttggtggacagagagttggacag

SEQ ID NO: 7414 - DNA, 1067 bp, Glycine max
  Gm_smallRNAprecursor_247
ctatgtgtgatggttaataaccttgagatattattatctacttgtcaaacaaagttaactatcattagaaggctaactgtttcagttatcagatcaccttcatttgcatgcaatccatgcatgttttacatttttccctgttttggcttattgttatatttaggccctctttctaaaaattgctgctgcattacctggaatggaaacactatcctccacaaaacaagaagatatctttgacgtgaacctaagatcttctggtggctatcaatctcaacctcagtccggcggatgtgcttgcagaatctgccttatcttgaagttctgcacctttttgctttgtgatatttgtttttaaatgtacgtttctcagatctgtaaaggttcattgtcttttagacttttaacggcattttatgataaaacacttaatcaagatctatgaagcacggacacttcagccctttgccgtgtccggtgtccgacacgcgtccgtgtcagtgtccgacaccgacacgacacccgtattacgttttatattttggacattacaggtgtccacgtgtccgtatccgtgtcgtgtccggtgtccgtgtcggtgtcggtgtcggtgcttcatagatcaagattcaagaactaagaactaatattgatacagtcggttgcctgtttagttgactgttcattataattttattatgcctgtaatgtgaaatataaacctggagaaattcactttcttcttttattatgcttggaattcatttcatttacatatatagtccaggtcccctcctccatttaaggcactgttgtttttcctaacgttatttctcaagcgatggatgtttggagtcttccaaagttggtgaagacagcaccatctaaaccattggtcatcagaatcaacttggtctgtcttgccatctttgatgttaagtagtatcaggctatattttgtatctttaatccttatatcattctgttctttatctttcgaaggtagacatcttcctatgaatgactcctccagatgctccaacatttgggaaggtatttggtggaca

SEQ ID NO: 7415 - DNA, 1078 bp, Glycine max
  Gm_smallRNAprecursor_248
ctatgtgtgatggttaataaccttgagatattattatctacttgtcaaacaaagttaactatcattagaaggctaactgtttcagttatcagatcaccttcatttgcatgcaatccatgcatgttttacatttttccctgttttggcttattgttatatttaggccctctttctaaaaattgctgctgcattacctggaatggaaacactatcctccacaaaacaagaagatatctttgacgtgaacctaagatcttctggtggctatcaatctcaacctcagtccggcggatgtgcttgcagaatctgccttatcttgaagttctgcacctttttgctttgtgatatttgtttttaaatgtacgtttctcagatctgtaaaggttcattgtcttttagacttttaacggcattttatgataaaacacttaatcaagatctatgaagcacggacacttcagccctttgccgtgtccggtgtccgacacgcgtccgtgtcagtgtccgacaccgacacgacacccgtattacgttttatattttggacattacaggtgtccacgtgtccgtatccgtgtcgtgtccggtgtccgtgtcggtgtcggtgtcggtgcttcatagatcaagattcaagaactaagaactaatattgatacagtcggttgcctgtttagttgactgttcattataattttattatgcctgtaatgtgaaatataaacctggagaaattcactttcttcttttattatgcttggaattcatttcatttacatatatagtccaggtcccctcctccatttaaggcactgttgtttttcctaacgttatttctcaagcgatggatgtttggagtcttccaaagttggtgaagacagcaccatctaaaccattggtcatcagaatcaacttggtctgtcttgccatctttgatgttaagtagtatcaggctatattttgtatctttaatccttatatcattctgttctttatctttcgaaggtagacatcttcctatgaatgactcctccagatgctccaacatttgggaaggtatttggtggacagagagttggac

SEQ ID NO: 7416 - DNA, 1078 bp, Glycine max; identical to SEQ ID NO: 7415
  Gm_smallRNAprecursor_249

SEQ ID NO: 7417 - DNA, 1079 bp, Glycine max
  Gm_smallRNAprecursor_250
ctatgtgtgatggttaataaccttgagatattattatctacttgtcaaacaaagttaactatcattagaaggctaactgtttcagttatcagatcaccttcatttgcatgcaatccatgcatgttttacatttttccctgttttggcttattgttatatttaggccctctttctaaaaattgctgctgcattacctggaatggaaacactatcctccacaaaacaagaagatatctttgacgtgaacctaagatcttctggtggctatcaatctcaacctcagtccggcggatgtgcttgcagaatctgccttatcttgaagttctgcacctttttgctttgtgatatttgtttttaaatgtacgtttctcagatctgtaaaggttcattgtcttttagacttttaacggcattttatgataaaacacttaatcaagatctatgaagcacggacacttcagccctttgccgtgtccggtgtccgacacgcgtccgtgtcagtgtccgacaccgacacgacacccgtattacgttttatattttggacattacaggtgtccacgtgtccgtatccgtgtcgtgtccggtgtccgtgtcggtgtcggtgtcggtgcttcatagatcaagattcaagaactaagaactaatattgatacagtcggttgcctgtttagttgactgttcattataattttattatgcctgtaatgtgaaatataaacctggagaaattcactttcttcttttattatgcttggaattcatttcatttacatatatagtccaggtcccctcctccatttaaggcactgttgtttttcctaacgttatttctcaagcgatggatgtttggagtcttccaaagttggtgaagacagcaccatctaaaccattggtcatcagaatcaacttggtctgtcttgccatctttgatgttaagtagtatcaggctatattttgtatctttaatccttatatcattctgttctttatctttcgaaggtagacatcttcctatgaatgactcctccagatgctccaacatttgggaaggtatttggtggacagagagttggaca

SEQ ID NO: 7418 - DNA, 1085 bp, Glycine max
  Gm_smallRNAprecursor_251
ctatgtgtgatggttaataaccttgagatattattatctacttgtcaaacaaagttaactatcattagaaggctaactgtttcagttatcagatcaccttcatttgcatgcaatccatgcatgttttacatttttccctgttttggcttattgttatatttaggccctctttctaaaaattgctgctgcattacctggaatggaaacactatcctccacaaaacaagaagatatctttgacgtgaacctaagatcttctggtggctatcaatctcaacctcagtccggcggatgtgcttgcagaatctgccttatcttgaagttctgcacctttttgctttgtgatatttgtttttaaatgtacgtttctcagatctgtaaaggttcattgtcttttagacttttaacggcattttatgataaaacacttaatcaagatctatgaagcacggacacttcagccctttgccgtgtccggtgtccgacacgcgtccgtgtcagtgtccgacaccgacacgacacccgtattacgttttatattttggacattacaggtgtccacgtgtccgtatccgtgtcgtgtccggtgtccgtgtcggtgtcggtgtcggtgcttcatagatcaagattcaagaactaagaactaatattgatacagtcggttgcctgtttagttgactgttcattataattttattatgcctgtaatgtgaaatataaacctggagaaattcactttcttcttttattatgcttggaattcatttcatttacatatatagtccaggtcccctcctccatttaaggcactgttgtttttcctaacgttatttctcaagcgatggatgtttggagtcttccaaagttggtgaagacagcaccatctaaaccattggtcatcagaatcaacttggtctgtcttgccatctttgatgttaagtagtatcaggctatattttgtatctttaatccttatatcattctgttctttatctttcgaaggtagacatcttcctatgaatgactcctccagatgctccaacatttgggaaggtatttggtggacagagagttggacaggtatg

SEQ ID NO: 7419 - DNA, 1066 bp, Glycine max
  Gm_smallRNAprecursor_252
tatgtgtgatggttaataaccttgagatattattatctacttgtcaaacaaagttaactatcattagaaggctaactgtttcagttatcagatcaccttcatttgcatgcaatccatgcatgttttacatttttccctgttttggcttattgttatatttaggccctctttctaaaaattgctgctgcattacctggaatggaaacactatcctccacaaaacaagaagatatctttgacgtgaacctaagatcttctggtggctatcaatctcaacctcagtccggcggatgtgcttgcagaatctgccttatcttgaagttctgcacctttttgctttgtgatatttgtttttaaatgtacgtttctcagatctgtaaaggttcattgtcttttagacttttaacggcattttatgataaaacacttaatcaagatctatgaagcacggacacttcagccctttgccgtgtccggtgtccgacacgcgtccgtgtcagtgtccgacaccgacacgacacccgtattacgttttatattttggacattacaggtgtccacgtgtccgtatccgtgtcgtgtccggtgtccgtgtcggtgtcggtgtcggtgcttcatagatcaagattcaagaactaagaactaatattgatacagtcggttgcctgtttagttgactgttcattataattttattatgcctgtaatgtgaaatataaacctggagaaattcactttcttcttttattatgcttggaattcatttcatttacatatatagtccaggtcccctcctccatttaaggcactgttgtttttcctaacgttatttctcaagcgatggatgtttggagtcttccaaagttggtgaagacagcaccatctaaaccattggtcatcagaatcaacttggtctgtcttgccatctttgatgttaagtagtatcaggctatattttgtatctttaatccttatatcattctgttctttatctttcgaaggtagacatcttcctatgaatgactcctccagatgctccaacatttgggaaggtatttggtggaca

SEQ ID NO: 7420 - DNA, 1076 bp, Glycine max
  Gm_smallRNAprecursor_253
tatgtgtgatggttaataaccttgagatattattatctacttgtcaaacaaagttaactatcattagaaggctaactgtttcagttatcagatcaccttcatttgcatgcaatccatgcatgttttacatttttccctgttttggcttattgttatatttaggccctctttctaaaaattgctgctgcattacctggaatggaaacactatcctccacaaaacaagaagatatctttgacgtgaacctaagatcttctggtggctatcaatctcaacctcagtccggcggatgtgcttgcagaatctgccttatcttgaagttctgcacctttttgctttgtgatatttgtttttaaatgtacgtttctcagatctgtaaaggttcattgtcttttagacttttaacggcattttatgataaaacacttaatcaagatctatgaagcacggacacttcagccctttgccgtgtccggtgtccgacacgcgtccgtgtcagtgtccgacaccgacacgacacccgtattacgttttatattttggacattacaggtgtccacgtgtccgtatccgtgtcgtgtccggtgtccgtgtcggtgtcggtgtcggtgcttcatagatcaagattcaagaactaagaactaatattgatacagtcggttgcctgtttagttgactgttcattataattttattatgcctgtaatgtgaaatataaacctggagaaattcactttcttcttttattatgcttggaattcatttcatttacatatatagtccaggtcccctcctccatttaaggcactgttgtttttcctaacgttatttctcaagcgatggatgtttggagtcttccaaagttggtgaagacagcaccatctaaaccattggtcatcagaatcaacttggtctgtcttgccatctttgatgttaagtagtatcaggctatattttgtatctttaatccttatatcattctgttctttatctttcgaaggtagacatcttcctatgaatgactcctccagatgctccaacatttgggaaggtatttggtggacagagagttgga

SEQ ID NO: 7421 - DNA, 1077 bp, Glycine max
  Gm_smallRNAprecursor_254
tatgtgtgatggttaataaccttgagatattattatctacttgtcaaacaaagttaactatcattagaaggctaactgtttcagttatcagatcaccttcatttgcatgcaatccatgcatgttttacatttttccctgttttggcttattgttatatttaggccctctttctaaaaattgctgctgcattacctggaatggaaacactatcctccacaaaacaagaagatatctttgacgtgaacctaagatcttctggtggctatcaatctcaacctcagtccggcggatgtgcttgcagaatctgccttatcttgaagttctgcacctttttgctttgtgatatttgtttttaaatgtacgtttctcagatctgtaaaggttcattgtcttttagacttttaacggcattttatgataaaacacttaatcaagatctatgaagcacggacacttcagccctttgccgtgtccggtgtccgacacgcgtccgtgtcagtgtccgacaccgacacgacacccgtattacgttttatattttggacattacaggtgtccacgtgtccgtatccgtgtcgtgtccggtgtccgtgtcggtgtcggtgtcggtgcttcatagatcaagattcaagaactaagaactaatattgatacagtcggttgcctgtttagttgactgttcattataattttattatgcctgtaatgtgaaatataaacctggagaaattcactttcttcttttattatgcttggaattcatttcatttacatatatagtccaggtcccctcctccatttaaggcactgttgtttttcctaacgttatttctcaagcgatggatgtttggagtcttccaaagttggtgaagacagcaccatctaaaccattggtcatcagaatcaacttggtctgtcttgccatctttgatgttaagtagtatcaggctatattttgtatctttaatccttatatcattctgttctttatctttcgaaggtagacatcttcctatgaatgactcctccagatgctccaacatttgggaaggtatttggtggacagagagttggac

SEQ ID NO: 7422 - DNA, 1077 bp, Glycine max; identical to SEQ ID NO: 7421
  Gm_smallRNAprecursor_255

SEQ ID NO: 7423 - DNA, 1083 bp, Glycine max
  Gm_smallRNAprecursor_256
tatgtgtgatggttaataaccttgagatattattatctacttgtcaaacaaagttaactatcattagaaggctaactgtttcagttatcagatcaccttcatttgcatgcaatccatgcatgttttacatttttccctgttttggcttattgttatatttaggccctctttctaaaaattgctgctgcattacctggaatggaaacactatcctccacaaaacaagaagatatctttgacgtgaacctaagatcttctggtggctatcaatctcaacctcagtccggcggatgtgcttgcagaatctgccttatcttgaagttctgcacctttttgctttgtgatatttgtttttaaatgtacgtttctcagatctgtaaaggttcattgtcttttagacttttaacggcattttatgataaaacacttaatcaagatctatgaagcacggacacttcagccctttgccgtgtccggtgtccgacacgcgtccgtgtcagtgtccgacaccgacacgacacccgtattacgttttatattttggacattacaggtgtccacgtgtccgtatccgtgtcgtgtccggtgtccgtgtcggtgtcggtgtcggtgcttcatagatcaagattcaagaactaagaactaatattgatacagtcggttgcctgtttagttgactgttcattataattttattatgcctgtaatgtgaaatataaacctggagaaattcactttcttcttttattatgcttggaattcatttcatttacatatatagtccaggtcccctcctccatttaaggcactgttgtttttcctaacgttatttctcaagcgatggatgtttggagtcttccaaagttggtgaagacagcaccatctaaaccattggtcatcagaatcaacttggtctgtcttgccatctttgatgttaagtagtatcaggctatattttgtatctttaatccttatatcattctgttctttatctttcgaaggtagacatcttcctatgaatgactcctccagatgctccaacatttgggaaggtatttggtggacagagagttggacaggtat

SEQ ID NO: 7424 - DNA, 1084 bp, Glycine max
  Gm_smallRNAprecursor_257
tatgtgtgatggttaataaccttgagatattattatctacttgtcaaacaaagttaactatcattagaaggctaactgtttcagttatcagatcaccttcatttgcatgcaatccatgcatgttttacatttttccctgttttggcttattgttatatttaggccctctttctaaaaattgctgctgcattacctggaatggaaacactatcctccacaaaacaagaagatatctttgacgtgaacctaagatcttctggtggctatcaatctcaacctcagtccggcggatgtgcttgcagaatctgccttatcttgaagttctgcacctttttgctttgtgatatttgtttttaaatgtacgtttctcagatctgtaaaggttcattgtcttttagacttttaacggcattttatgataaaacacttaatcaagatctatgaagcacggacacttcagccctttgccgtgtccggtgtccgacacgcgtccgtgtcagtgtccgacaccgacacgacacccgtattacgttttatattttggacattacaggtgtccacgtgtccgtatccgtgtcgtgtccggtgtccgtgtcggtgtcggtgtcggtgcttcatagatcaagattcaagaactaagaactaatattgatacagtcggttgcctgtttagttgactgttcattataattttattatgcctgtaatgtgaaatataaacctggagaaattcactttcttcttttattatgcttggaattcatttcatttacatatatagtccaggtcccctcctccatttaaggcactgttgtttttcctaacgttatttctcaagcgatggatgtttggagtcttccaaagttggtgaagacagcaccatctaaaccattggtcatcagaatcaacttggtctgtcttgccatctttgatgttaagtagtatcaggctatattttgtatctttaatccttatatcattctgttctttatctttcgaaggtagacatcttcctatgaatgactcctccagatgctccaacatttgggaaggtatttggtggacagagagttggacaggtatg

SEQ ID NO: 7425 - DNA, 1082 bp, Glycine max
  Gm_smallRNAprecursor_258
atgtgtgatggttaataaccttgagatattattatctacttgtcaaacaaagttaactatcattagaaggctaactgtttcagttatcagatcaccttcatttgcatgcaatccatgcatgttttacatttttccctgttttggcttattgttatatttaggccctctttctaaaaattgctgctgcattacctggaatggaaacactatcctccacaaaacaagaagatatctttgacgtgaacctaagatcttctggtggctatcaatctcaacctcagtccggcggatgtgcttgcagaatctgccttatcttgaagttctgcacctttttgctttgtgatatttgtttttaaatgtacgtttctcagatctgtaaaggttcattgtcttttagacttttaacggcattttatgataaaacacttaatcaagatctatgaagcacggacacttcagccctttgccgtgtccggtgtccgacacgcgtccgtgtcagtgtccgacaccgacacgacacccgtattacgttttatattttggacattacaggtgtccacgtgtccgtatccgtgtcgtgtccggtgtccgtgtcggtgtcggtgtcggtgcttcatagatcaagattcaagaactaagaactaatattgatacagtcggttgcctgtttagttgactgttcattataattttattatgcctgtaatgtgaaatataaacctggagaaattcactttcttcttttattatgcttggaattcatttcatttacatatatagtccaggtcccctcctccatttaaggcactgttgtttttcctaacgttatttctcaagcgatggatgtttggagtcttccaaagttggtgaagacagcaccatctaaaccattggtcatcagaatcaacttggtctgtcttgccatctttgatgttaagtagtatcaggctatattttgtatctttaatccttatatcattctgttctttatctttcgaaggtagacatcttcctatgaatgactcctccagatgctccaacatttgggaaggtatttggtggacagagagttggacaggtat

SEQ ID NO: 7426 - DNA, 1081 bp, Glycine max
  Gm_smallRNAprecursor_259
tgtgtgatggttaataaccttgagatattattatctacttgtcaaacaaagttaactatcattagaaggctaactgtttcagttatcagatcaccttcatttgcatgcaatccatgcatgttttacatttttccctgttttggcttattgttatatttaggccctctttctaaaaattgctgctgcattacctggaatggaaacactatcctccacaaaacaagaagatatctttgacgtgaacctaagatcttctggtggctatcaatctcaacctcagtccggcggatgtgcttgcagaatctgccttatcttgaagttctgcacctttttgctttgtgatatttgtttttaaatgtacgtttctcagatctgtaaaggttcattgtcttttagacttttaacggcattttatgataaaacacttaatcaagatctatgaagcacggacacttcagccctttgccgtgtccggtgtccgacacgcgtccgtgtcagtgtccgacaccgacacgacacccgtattacgttttatattttggacattacaggtgtccacgtgtccgtatccgtgtcgtgtccggtgtccgtgtcggtgtcggtgtcggtgcttcatagatcaagattcaagaactaagaactaatattgatacagtcggttgcctgtttagttgactgttcattataattttattatgcctgtaatgtgaaatataaacctggagaaattcactttcttcttttattatgcttggaattcatttcatttacatatatagtccaggtcccctcctccatttaaggcactgttgtttttcctaacgttatttctcaagcgatggatgtttggagtcttccaaagttggtgaagacagcaccatctaaaccattggtcatcagaatcaacttggtctgtcttgccatctttgatgttaagtagtatcaggctatattttgtatctttaatccttatatcattctgttctttatctttcgaaggtagacatcttcctatgaatgactcctccagatgctccaacatttgggaaggtatttggtggacagagagttggacaggtat

SEQ ID NO: 7427 - DNA, 1070 bp, Glycine max
  Gm_smallRNAprecursor_260
gcatcgcaatggaatgcatcacataaaacacttgcaaccgtggcatgcaattcaattcaaccaaggctcaaaaaccatcagaaaacctaaaaaatgtttttttttcccaatcgaatcgcaatcacctcaattagcttaacctataccgatacagtaaattcattattgtaataaatccaagattatttatttcagttctcaaatatcaaaaatttcagcttgattattaatcaatgaaaggaagcaggtcaagtaaaaatccaaacaaggaaaaagcacatcagaagctttttaactaaaactatttctcttagatgtagattctatgcatcgggatctaccgcataaatcacactttctgcatagagacgataaacttaaatctagaagcgtttcggatctgataagcagagattaaaataaatttaaaaaatactggtggtagaatctcggagatgagatctgagcggaaaacgaggcaaagcttcaccgcggcctccgattcagttgatgcaaggcgggatccaattcgccgccggcgaccgttcctccattccgcgcgaaaaccggttcccgacctgcaccaagcgaattagagaccgcacagtgagagagagagaatcaaaatccccaacgcaatcgcatcgcatcgaatcgaacttcaccaaaccaaaaccaccaaccaccgctctttctctcttactttctctctctccatccgcgaggacgagagagagagagagttaaagagagaaataagaatcgcgaagctaaccccaacccacactatatgtggtgaacgggtgaagattgggttagcgaggtgttatttataaagaccacagacgaaggagatacggacacgtggcggaacacgcgctcgctgatgcgatgaatactgtgcaagtgatttatatattttttttttttctggagaagaaagaaagcgcggcagggagagacgtgaaaatttggacatggatttggaaagatttactgaagtgatgccataaaaccatttgctgaagtacgtggctgcacgtgcgtgtgtttctgccactacaaagtgc

SEQ ID NO: 7428 - DNA, 1071 bp, Glycine max
  Gm_smallRNAprecursor_261
gcatcgcaatggaatgcatcacataaaacacttgcaaccgtggcatgcaattcaattcaaccaaggctcaaaaaccatcagaaaacctaaaaaatgtttttttttcccaatcgaatcgcaatcacctcaattagcttaacctataccgatacagtaaattcattattgtaataaatccaagattatttatttcagttctcaaatatcaaaaatttcagcttgattattaatcaatgaaaggaagcaggtcaagtaaaaatccaaacaaggaaaaagcacatcagaagctttttaactaaaactatttctcttagatgtagattctatgcatcgggatctaccgcataaatcacactttctgcatagagacgataaacttaaatctagaagcgtttcggatctgataagcagagattaaaataaatttaaaaaatactggtggtagaatctcggagatgagatctgagcggaaaacgaggcaaagcttcaccgcggcctccgattcagttgatgcaaggcgggatccaattcgccgccggcgaccgttcctccattccgcgcgaaaaccggttcccgacctgcaccaagcgaattagagaccgcacagtgagagagagagaatcaaaatccccaacgcaatcgcatcgcatcgaatcgaacttcaccaaaccaaaaccaccaaccaccgctctttctctcttactttctctctctccatccgcgaggacgagagagagagagagttaaagagagaaataagaatcgcgaagctaaccccaacccacactatatgtggtgaacgggtgaagattgggttagcgaggtgttatttataaagaccacagacgaaggagatacggacacgtggcggaacacgcgctcgctgatgcgatgaatactgtgcaagtgatttatatattttttttttttctggagaagaaagaaagcgcggcagggagagacgtgaaaatttggacatggatttggaaagatttactgaagtgatgccataaaaccatttgctgaagtacgtggctgcacgtgcgtgtgtttctgccactacaaagtgca

SEQ ID NO: 7429 - DNA, 1071 bp, Glycine max; identical to SEQ ID NO: 7428
  Gm_smallRNAprecursor_262

SEQ ID NO: 7430 - DNA, 1071 bp, Glycine max; identical to SEQ ID NO: 7428
  Gm_smallRNAprecursor_263

SEQ ID NO: 7431 - DNA, 1069 bp, Glycine max
  Gm_smallRNAprecursor_264
catcgcaatggaatgcatcacataaaacacttgcaaccgtggcatgcaattcaattcaaccaaggctcaaaaaccatcagaaaacctaaaaaatgtttttttttcccaatcgaatcgcaatcacctcaattagcttaacctataccgatacagtaaattcattattgtaataaatccaagattatttatttcagttctcaaatatcaaaaatttcagcttgattattaatcaatgaaaggaagcaggtcaagtaaaaatccaaacaaggaaaaagcacatcagaagctttttaactaaaactatttctcttagatgtagattctatgcatcgggatctaccgcataaatcacactttctgcatagagacgataaacttaaatctagaagcgtttcggatctgataagcagagattaaaataaatttaaaaaatactggtggtagaatctcggagatgagatctgagcggaaaacgaggcaaagcttcaccgcggcctccgattcagttgatgcaaggcgggatccaattcgccgccggcgaccgttcctccattccgcgcgaaaaccggttcccgacctgcaccaagcgaattagagaccgcacagtgagagagagagaatcaaaatccccaacgcaatcgcatcgcatcgaatcgaacttcaccaaaccaaaaccaccaaccaccgctctttctctcttactttctctctctccatccgcgaggacgagagagagagagagttaaagagagaaataagaatcgcgaagctaaccccaacccacactatatgtggtgaacgggtgaagattgggttagcgaggtgttatttataaagaccacagacgaaggagatacggacacgtggcggaacacgcgctcgctgatgcgatgaatactgtgcaagtgatttatatattttttttttttctggagaagaaagaaagcgcggcagggagagacgtgaaaatttggacatggatttggaaagatttactgaagtgatgccataaaaccatttgctgaagtacgtggctgcacgtgcgtgtgtttctgccactacaaagtgc

SEQ ID NO: 7432 - DNA, 1069 bp, Glycine max; identical to SEQ ID NO: 7431
  Gm_smallRNAprecursor_265

SEQ ID NO: 7433 - DNA, 1070 bp, Glycine max
  Gm_smallRNAprecursor_266
catcgcaatggaatgcatcacataaaacacttgcaaccgtggcatgcaattcaattcaaccaaggctcaaaaaccatcagaaaacctaaaaaatgtttttttttcccaatcgaatcgcaatcacctcaattagcttaacctataccgatacagtaaattcattattgtaataaatccaagattatttatttcagttctcaaatatcaaaaatttcagcttgattattaatcaatgaaaggaagcaggtcaagtaaaaatccaaacaaggaaaaagcacatcagaagctttttaactaaaactatttctcttagatgtagattctatgcatcgggatctaccgcataaatcacactttctgcatagagacgataaacttaaatctagaagcgtttcggatctgataagcagagattaaaataaatttaaaaaatactggtggtagaatctcggagatgagatctgagcggaaaacgaggcaaagcttcaccgcggcctccgattcagttgatgcaaggcgggatccaattcgccgccggcgaccgttcctccattccgcgcgaaaaccggttcccgacctgcaccaagcgaattagagaccgcacagtgagagagagagaatcaaaatccccaacgcaatcgcatcgcatcgaatcgaacttcaccaaaccaaaaccaccaaccaccgctctttctctcttactttctctctctccatccgcgaggacgagagagagagagagttaaagagagaaataagaatcgcgaagctaaccccaacccacactatatgtggtgaacgggtgaagattgggttagcgaggtgttatttataaagaccacagacgaaggagatacggacacgtggcggaacacgcgctcgctgatgcgatgaatactgtgcaagtgatttatatattttttttttttctggagaagaaagaaagcgcggcagggagagacgtgaaaatttggacatggatttggaaagatttactgaagtgatgccataaaaccatttgctgaagtacgtggctgcacgtgcgtgtgtttctgccactacaaagtgca

SEQ ID NO: 7434 - DNA, 1070 bp, Glycine max; identical to SEQ ID NO: 7433
  Gm_smallRNAprecursor_267

SEQ ID NO: 7435 - DNA, 1070 bp, Glycine max; identical to SEQ ID NO: 7433
  Gm_smallRNAprecursor_268

SEQ ID NO: 7436 - DNA, 1070 bp, Glycine max; identical to SEQ ID NO: 7433
  Gm_smallRNAprecursor_269

SEQ ID NO: 7437 - DNA, 1070 bp, Glycine max; identical to SEQ ID NO: 7433
  Gm_smallRNAprecursor_270

SEQ ID NO: 7438 - DNA, 1070 bp, Glycine max; identical to SEQ ID NO: 7433
  Gm_smallRNAprecursor_271

SEQ ID NO: 7439 - DNA, 1071 bp, Glycine max
  Gm_smallRNAprecursor_272
catcgcaatggaatgcatcacataaaacacttgcaaccgtggcatgcaattcaattcaaccaaggctcaaaaaccatcagaaaacctaaaaaatgtttttttttcccaatcgaatcgcaatcacctcaattagcttaacctataccgatacagtaaattcattattgtaataaatccaagattatttatttcagttctcaaatatcaaaaatttcagcttgattattaatcaatgaaaggaagcaggtcaagtaaaaatccaaacaaggaaaaagcacatcagaagctttttaactaaaactatttctcttagatgtagattctatgcatcgggatctaccgcataaatcacactttctgcatagagacgataaacttaaatctagaagcgtttcggatctgataagcagagattaaaataaatttaaaaaatactggtggtagaatctcggagatgagatctgagcggaaaacgaggcaaagcttcaccgcggcctccgattcagttgatgcaaggcgggatccaattcgccgccggcgaccgttcctccattccgcgcgaaaaccggttcccgacctgcaccaagcgaattagagaccgcacagtgagagagagagaatcaaaatccccaacgcaatcgcatcgcatcgaatcgaacttcaccaaaccaaaaccaccaaccaccgctctttctctcttactttctctctctccatccgcgaggacgagagagagagagagttaaagagagaaataagaatcgcgaagctaaccccaacccacactatatgtggtgaacgggtgaagattgggttagcgaggtgttatttataaagaccacagacgaaggagatacggacacgtggcggaacacgcgctcgctgatgcgatgaatactgtgcaagtgatttatatattttttttttttctggagaagaaagaaagcgcggcagggagagacgtgaaaatttggacatggatttggaaagatttactgaagtgatgccataaaaccatttgctgaagtacgtggctgcacgtgcgtgtgtttctgccactacaaagtgcaa

SEQ ID NO: 7440 - DNA, 1068 bp, Glycine max
  Gm_smallRNAprecursor_273
atcgcaatggaatgcatcacataaaacacttgcaaccgtggcatgcaattcaattcaaccaaggctcaaaaaccatcagaaaacctaaaaaatgtttttttttcccaatcgaatcgcaatcacctcaattagcttaacctataccgatacagtaaattcattattgtaataaatccaagattatttatttcagttctcaaatatcaaaaatttcagcttgattattaatcaatgaaaggaagcaggtcaagtaaaaatccaaacaaggaaaaagcacatcagaagctttttaactaaaactatttctcttagatgtagattctatgcatcgggatctaccgcataaatcacactttctgcatagagacgataaacttaaatctagaagcgtttcggatctgataagcagagattaaaataaatttaaaaaatactggtggtagaatctcggagatgagatctgagcggaaaacgaggcaaagcttcaccgcggcctccgattcagttgatgcaaggcgggatccaattcgccgccggcgaccgttcctccattccgcgcgaaaaccggttcccgacctgcaccaagcgaattagagaccgcacagtgagagagagagaatcaaaatccccaacgcaatcgcatcgcatcgaatcgaacttcaccaaaccaaaaccaccaaccaccgctctttctctcttactttctctctctccatccgcgaggacgagagagagagagagttaaagagagaaataagaatcgcgaagctaaccccaacccacactatatgtggtgaacgggtgaagattgggttagcgaggtgttatttataaagaccacagacgaaggagatacggacacgtggcggaacacgcgctcgctgatgcgatgaatactgtgcaagtgatttatatattttttttttttctggagaagaaagaaagcgcggcagggagagacgtgaaaatttggacatggatttggaaagatttactgaagtgatgccataaaaccatttgctgaagtacgtggctgcacgtgcgtgtgtttctgccactacaaagtgc

SEQ ID NO: 7441 - DNA, 1069 bp, Glycine max
  Gm_smallRNAprecursor_274
atcgcaatggaatgcatcacataaaacacttgcaaccgtggcatgcaattcaattcaaccaaggctcaaaaaccatcagaaaacctaaaaaatgtttttttttcccaatcgaatcgcaatcacctcaattagcttaacctataccgatacagtaaattcattattgtaataaatccaagattatttatttcagttctcaaatatcaaaaatttcagcttgattattaatcaatgaaaggaagcaggtcaagtaaaaatccaaacaaggaaaaagcacatcagaagctttttaactaaaactatttctcttagatgtagattctatgcatcgggatctaccgcataaatcacactttctgcatagagacgataaacttaaatctagaagcgtttcggatctgataagcagagattaaaataaatttaaaaaatactggtggtagaatctcggagatgagatctgagcggaaaacgaggcaaagcttcaccgcggcctccgattcagttgatgcaaggcgggatccaattcgccgccggcgaccgttcctccattccgcgcgaaaaccggttcccgacctgcaccaagcgaattagagaccgcacagtgagagagagagaatcaaaatccccaacgcaatcgcatcgcatcgaatcgaacttcaccaaaccaaaaccaccaaccaccgctctttctctcttactttctctctctccatccgcgaggacgagagagagagagagttaaagagagaaataagaatcgcgaagctaaccccaacccacactatatgtggtgaacgggtgaagattgggttagcgaggtgttatttataaagaccacagacgaaggagatacggacacgtggcggaacacgcgctcgctgatgcgatgaatactgtgcaagtgatttatatattttttttttttctggagaagaaagaaagcgcggcagggagagacgtgaaaatttggacatggatttggaaagatttactgaagtgatgccataaaaccatttgctgaagtacgtggctgcacgtgcgtgtgtttctgccactacaaagtgca

SEQ ID NO: 7442 - DNA, 1069 bp, Glycine max; identical to SEQ ID NO: 7441
  Gm_smallRNAprecursor_275

SEQ ID NO: 7443 - DNA, 1069 bp, Glycine max; identical to SEQ ID NO: 7441
  Gm_smallRNAprecursor_276

SEQ ID NO: 7444 - DNA, 1158 bp, Glycine max
  Gm_smallRNAprecursor_277
tagaagcaagcctaagaaggaacatataaagaaatgaaaactgataaaatgttatccaattaataatacatgaatcactctttattttaaaactccactaacatcttttttttaatcttttatttcctcatattataaatcttattatgataatattttctttctttcttttttttctctagttgtaagatagcatatggagtgcttatcaaacatttttacttacttgctaagaagtaagtaaaacagcaaaagaaagcatatgtaatttggctgtttagtagtttagtgcttagtctttagttgggtgttgctaggttctaacattattgctagtgcacccaacactcaacagtaaaagtcaaaaatgtccttgcgtaaaaggtttacggatcaagttgatcagtaaggattttacagattaagttgattcgtaaggattttacagatcaagttgatccatatgtttaaaatatcaacatatgaatcaacttgatttgtaaaagacttacggatcaagttgatccataattcttttacaaatcaagttgatccgtatgcttaaaatatcaacatatggatcaagttgatctgtatgtttaaaatatcaacatatgaatcaatttgatttgtatgcttaaaatatcaacatatggatcaacttgatccgtaagccttttacaaactactctaaaatgcacacccaatacaaatgaggggcatttttggcattttgaaaaaatgctgggtacacctagtaacaccctctttagttcagttacttaaacggtgtatgttagcgggttataaaaaagaaatagtgagcgttagttgttaaaatttccctatgtctctacacaatttttacatatttttaaaaaaggttctgctaacgcgtgtctttagtgtattaattaataaactaaaataaaaaaatatttattatataaatcatagaagagtgtaaaaaaaataatacgaataatgcaattttttgtctttgcataaaaatacttctaattttaagtttcttaactaatatccttaggacatttgttagatttttttaaaataaaaacaattcagtagcactcacttaaggataacggttccatgtaaacaggacaagcacataatatataaaaataaccccacaga

SEQ ID NO: 7445 - DNA, 1158 bp, Glycine max; identical to SEQ ID NO: 7444
  Gm_smallRNAprecursor_278

SEQ ID NO: 7446 - DNA, 1079 bp, Glycine max
  Gm_smallRNAprecursor_279
taaggaaattcctagaaccttctcttattctggaagtttctccataatttttctttcctccattttctttgttttggggctgaaatttaaactttgactggaaggcattttcaagtgtatcttctttatgcctatatagtctttgctcatatgcttcaagagagcccacgagttctgtctctgatagggtggacagatctttggtttcatcaatcgttgtcacaattgggtcaaatttttggagcatagtaattagaattttctcaacaattttcttgtcaagaatatcttctccaaaagctctcatttgattaactatttctttaactttagaatagtaatctttaactgtctcagactctttcatcttcaatagttcaacatctcttcttagagattcaagtttaacggcacgtaccttaacacttccttgaaactcctcctacaatgtgttccatgcttctttggcagtcttagctcccataattcttgggaaagttggatcagtcaccgcttgttgcaaggtgaacaatgcctttgaatttttctgtttatttttcttcaactctttttcttgagatgcattaagagctgaagtatctgcgggaacagtgaagccttcttctactatgtcccataaatcttgagatgaagaatatgtttccattttaacacgtcagaaatcataatttttaccattgaagatagggacagaaatagttgacgattgagtagtattattcatagcttagaaaaaataatattggagtgagttaatagtacaaaggaaatttttgaagtagtttggaggattttggaatggtaggtaggtaatataactacgcccaatgtatgatgaccgaacgtagctctgataccactgttggtagtttattagatgatagttgatagtttttgagaattgttttagaaagaagactatatcattgatttcttggatgatcaattacaacataccaattgcctatttataggctcaagtcaccaacctctcaatggtggtgaatgtttctacattactttaggtctttctatagagttttcatgatagattagta

SEQ ID NO: 7447 - DNA, 1221 bp, Glycine max
  Gm_smallRNAprecursor_280
attggaatctttgaagtttaaaatattctgagaggatttctttttcctttttacactcgtacagtaaaaaaaccaatacaatttgatgcaactggttcagaaattggatatagagtagaagaatctcattgttgaaccctaattttggaccctgtcctaatatgggtacagcaccagattagggtagatttcaaataatggtgaatactctggatattcggagatcccagaaactctaccaagtgctcactacaaaatttgttctggatattcaaaatttatatatttgcgaatattttgggagttggagagttcttcccctatgtatgtgtgctgtgggaaagaaatccctccacccacccacccacccatgcacagcaatttcctaaccatgtgacttttgttaaaatattttaagttaatttgtaggccctgttaagaatagtcccacatcgggtaattcatgaacatgataagtgcttatatagctgggtagaccacccccttatgaaccggtttttaaggggacctttcggatgcctttgctgcactataaaatttaatatggtatcagagccatattctgcttctgtccggtgggtgccgccagccctcgctttgtggtgacgagccctggctcgagggggcgtgttaagaatagtcccacattgggtaattcatgaacatgataagtgcttatatagctgggtagaccacccccttatgaaccggtttttaaggggacctttcggatgcctttgctgcactataaaatttaataggcccctttaattttttgggttgtttagatatgtccctatatttcaagttgttgtaactggatgcctaccgtatttaaaatttcttgttgggctctagtgttggagcatcataataattttctaatgataggttggatccggtgatccaatcagaaattttttaactatatggattttaaatgcttgtaatttggtttacagtttcaacaacttctaattggggccctgaagataacaatatgatacaagaatgaacggcctatgtacatggaaagagatttatttaagtgctattaaaattctcattaatccatgcataagggttcgctcgaagaaatgcaatgaaacacttaataggttgattcaagaaacttggagtcaaacaatatggtggttcgttgagggaattacgcatagacgatttgaatcaactatgtaa

SEQ ID NO: 7448 - DNA, 1213 bp, Glycine max
  Gm_smallRNAprecursor_281
gaatctttgaagtttaaaatattctgagaggatttctttttcctttttacactcgtacagtaaaaaaaccaatacaatttgatgcaactggttcagaaattggatatagagtagaagaatctcattgttgaaccctaattttggaccctgtcctaatatgggtacagcaccagattagggtagatttcaaataatggtgaatactctggatattcggagatcccagaaactctaccaagtgctcactacaaaatttgttctggatattcaaaatttatatatttgcgaatattttgggagttggagagttcttcccctatgtatgtgtgctgtgggaaagaaatccctccacccacccacccacccatgcacagcaatttcctaaccatgtgacttttgttaaaatattttaagttaatttgtaggccctgttaagaatagtcccacatcgggtaattcatgaacatgataagtgcttatatagctgggtagaccacccccttatgaaccggtttttaaggggacctttcggatgcctttgctgcactataaaatttaatatggtatcagagccatattctgcttctgtccggtgggtgccgccagccctcgctttgtggtgacgagccctggctcgagggggcgtgttaagaatagtcccacattgggtaattcatgaacatgataagtgcttatatagctgggtagaccacccccttatgaaccggtttttaaggggacctttcggatgcctttgctgcactataaaatttaataggcccctttaattttttgggttgtttagatatgtccctatatttcaagttgttgtaactggatgcctaccgtatttaaaatttcttgttgggctctagtgttggagcatcataataattttctaatgataggttggatccggtgatccaatcagaaattttttaactatatggattttaaatgcttgtaatttggtttacagtttcaacaacttctaattggggccctgaagataacaatatgatacaagaatgaacggcctatgtacatggaaagagatttatttaagtgctattaaaattctcattaatccatgcataagggttcgctcgaagaaatgcaatgaaacacttaataggttgattcaagaaacttggagtcaaacaatatggtggttcgttgagggaattacgcatagacgatttgaatcaactat

SEQ ID NO: 7449 - DNA, 1119 bp, Glycine max
  Gm_smallRNAprecursor_282
acgcttcccctcatcaaagcattgtacccatttttgtttgggtaattgatcaagccattcagctgcacttggcttattcgcacgaatatccccaagatgtcgccagtgcatcttctttgtgtatgcgtaccctgtaaatatttaatcaatgtattatgttataaaatttgattgaaagaaaattataacgaataaataaaatagattctcaccagccaacataagtggtttctttaaatgtttgcagtttgagttaccacgaagaaagttttgtgcaatgtggcgcaggcaaaagaaatgggatgtgtcctggacccataagttacttgggttgttgtaggcacttataattgaggggtgtcggtctgaaataagagaaatgttaatttgcggagtaacatgtcttctcaaattctttagaaaaaacccccaagctgaagttgtctccccttctacaatggcataggcaatcgggaagatatggttagctccatcttgtgcggtagctatcaacagtgtgccagtatactttccgtaaagccatgtaccgtctacttgtacaatgggtttgcaatatgcaaaaccattaatgcatggaccaaatgaccaaaagacacgtttaaacaatcttttgcccggtactatttctcccccctcatacaaggattctgtttgagcagcgaccacagtcccgggaacacaagattgcaaagctccgaaaagttttggcagtttggcatatgattcttcccagtttccatgaatcatctccaatgctttttgctttgctaaccatgtcttcttgtaggatggggtataattcatgaacgttttaatctctgcaatcaatgtcttgatggagacagttgggtttgttttgacaattggttggatgatctgtgctatgacgtgtttgtcgagttggcgatgatcttgtgtaagcatcggcacgagacaagtgtgatgacctctgatactcttgataatccatttgttatgcctctttgaattgcatgcgcccaagctccatgtacaaccattttcatgtaacttgcagacgaagtgtatccttctttggtcagagtaaattgttctgcaatcaaaatgatttctgatgtt

SEQ ID NO: 7450 - DNA, 1200 bp, Glycine max
  Gm_smallRNAprecursor_283
acgcttcccctcatcaaagcattgtacccatttttgtttgggtaattgatcaagccattcagctgcacttggcttattcgcacgaatatccccaagatgtcgccagtgcatcttctttgtgtatgcgtaccctgtaaatatttaatcaatgtattatgttataaaatttgattgaaagaaaattataacgaataaataaaatagattctcaccagccaacataagtggtttctttaaatgtttgcagtttgagttaccacgaagaaagttttgtgcaatgtggcgcaggcaaaagaaatgggatgtgtcctggacccataagttacttgggttgttgtaggcacttataattgaggggtgtcggtctgaaataagagaaatgttaatttgcggagtaacatgtcttctcaaattctttagaaaaaacccccaagctgaagttgtctccccttctacaatggcataggcaatcgggaagatatggttagctccatcttgtgcggtagctatcaacagtgtgccagtatactttccgtaaagccatgtaccgtctacttgtacaatgggtttgcaatatgcaaaaccattaatgcatggaccaaatgaccaaaagacacgtttaaacaatcttttgcccggtactatttctcccccctcatacaaggattctgtttgagcagcgaccacagtcccgggaacacaagattgcaaagctccgaaaagttttggcagtttggcatatgattcttcccagtttccatgaatcatctccaatgctttttgctttgctaaccatgtcttcttgtaggatggggtataattcatgaacgttttaatctctgcaatcaatgtcttgatggagacagttgggtttgttttgacaattggttggatgatctgtgctatgacgtgtttgtcgagttggcgatgatcttgtgtaagcatcggcacgagacaagtgtgatgacctctgatactcttgataatccatttgttatgcctctttgaattgcatgcgcccaagctccatgtacaaccattttcatgtaacttgcagacgaagtgtatccttctttggtcagagtaaattgttctgcaatcaaaatgatttctgatgttgtattctttgattgctcgaatacattgtgatttgtcatcgaaggtcatgccaacctcgagtacaccgactgatggttgtac

SEQ ID NO: 7451 - DNA, 1075 bp, Glycine max
  Gm_smallRNAprecursor_284
gtgtatgcgtaccctgtaaatatttaatcaatgtattatgttataaaatttgattgaaagaaaattataacgaataaataaaatagattctcaccagccaacataagtggtttctttaaatgtttgcagtttgagttaccacgaagaaagttttgtgcaatgtggcgcaggcaaaagaaatgggatgtgtcctggacccataagttacttgggttgttgtaggcacttataattgaggggtgtcggtctgaaataagagaaatgttaatttgcggagtaacatgtcttctcaaattctttagaaaaaacccccaagctgaagttgtctccccttctacaatggcataggcaatcgggaagatatggttagctccatcttgtgcggtagctatcaacagtgtgccagtatactttccgtaaagccatgtaccgtctacttgtacaatgggtttgcaatatgcaaaaccattaatgcatggaccaaatgaccaaaagacacgtttaaacaatcttttgcccggtactatttctcccccctcatacaaggattctgtttgagcagcgaccacagtcccgggaacacaagattgcaaagctccgaaaagttttggcagtttggcatatgattcttcccagtttccatgaatcatctccaatgctttttgctttgctaaccatgtcttcttgtaggatggggtataattcatgaacgttttaatctctgcaatcaatgtcttgatggagacagttgggtttgttttgacaattggttggatgatctgtgctatgacgtgtttgtcgagttggcgatgatcttgtgtaagcatcggcacgagacaagtgtgatgacctctgatactcttgataatccatttgttatgcctctttgaattgcatgcgcccaagctccatgtacaaccattttcatgtaacttgcagacgaagtgtatccttctttggtcagagtaaattgttctgcaatcaaaatgatttctgatgttgtattctttgattgctcgaatacattgtgatttgtcatcgaaggtcatgccaacctcgagtacaccgactgatg

SEQ ID NO: 7452 - DNA, 1077 bp, Glycine max
  Gm_smallRNAprecursor_285
gtgtatgcgtaccctgtaaatatttaatcaatgtattatgttataaaatttgattgaaagaaaattataacgaataaataaaatagattctcaccagccaacataagtggtttctttaaatgtttgcagtttgagttaccacgaagaaagttttgtgcaatgtggcgcaggcaaaagaaatgggatgtgtcctggacccataagttacttgggttgttgtaggcacttataattgaggggtgtcggtctgaaataagagaaatgttaatttgcggagtaacatgtcttctcaaattctttagaaaaaacccccaagctgaagttgtctccccttctacaatggcataggcaatcgggaagatatggttagctccatcttgtgcggtagctatcaacagtgtgccagtatactttccgtaaagccatgtaccgtctacttgtacaatgggtttgcaatatgcaaaaccattaatgcatggaccaaatgaccaaaagacacgtttaaacaatcttttgcccggtactatttctcccccctcatacaaggattctgtttgagcagcgaccacagtcccgggaacacaagattgcaaagctccgaaaagttttggcagtttggcatatgattcttcccagtttccatgaatcatctccaatgctttttgctttgctaaccatgtcttcttgtaggatggggtataattcatgaacgttttaatctctgcaatcaatgtcttgatggagacagttgggtttgttttgacaattggttggatgatctgtgctatgacgtgtttgtcgagttggcgatgatcttgtgtaagcatcggcacgagacaagtgtgatgacctctgatactcttgataatccatttgttatgcctctttgaattgcatgcgcccaagctccatgtacaaccattttcatgtaacttgcagacgaagtgtatccttctttggtcagagtaaattgttctgcaatcaaaatgatttctgatgttgtattctttgattgctcgaatacattgtgatttgtcatcgaaggtcatgccaacctcgagtacaccgactgatggt

SEQ ID NO: 7453 - DNA, 1078 bp, Glycine max
  Gm_smallRNAprecursor_286
gtgtatgcgtaccctgtaaatatttaatcaatgtattatgttataaaatttgattgaaagaaaattataacgaataaataaaatagattctcaccagccaacataagtggtttctttaaatgtttgcagtttgagttaccacgaagaaagttttgtgcaatgtggcgcaggcaaaagaaatgggatgtgtcctggacccataagttacttgggttgttgtaggcacttataattgaggggtgtcggtctgaaataagagaaatgttaatttgcggagtaacatgtcttctcaaattctttagaaaaaacccccaagctgaagttgtctccccttctacaatggcataggcaatcgggaagatatggttagctccatcttgtgcggtagctatcaacagtgtgccagtatactttccgtaaagccatgtaccgtctacttgtacaatgggtttgcaatatgcaaaaccattaatgcatggaccaaatgaccaaaagacacgtttaaacaatcttttgcccggtactatttctcccccctcatacaaggattctgtttgagcagcgaccacagtcccgggaacacaagattgcaaagctccgaaaagttttggcagtttggcatatgattcttcccagtttccatgaatcatctccaatgctttttgctttgctaaccatgtcttcttgtaggatggggtataattcatgaacgttttaatctctgcaatcaatgtcttgatggagacagttgggtttgttttgacaattggttggatgatctgtgctatgacgtgtttgtcgagttggcgatgatcttgtgtaagcatcggcacgagacaagtgtgatgacctctgatactcttgataatccatttgttatgcctctttgaattgcatgcgcccaagctccatgtacaaccattttcatgtaacttgcagacgaagtgtatccttctttggtcagagtaaattgttctgcaatcaaaatgatttctgatgttgtattctttgattgctcgaatacattgtgatttgtcatcgaaggtcatgccaacctcgagtacaccgactgatggtt

SEQ ID NO: 7454 - DNA, 1063 bp, Glycine max
  Gm_smallRNAprecursor_287
cgtaccctgtaaatatttaatcaatgtattatgttataaaatttgattgaaagaaaattataacgaataaataaaatagattctcaccagccaacataagtggtttctttaaatgtttgcagtttgagttaccacgaagaaagttttgtgcaatgtggcgcaggcaaaagaaatgggatgtgtcctggacccataagttacttgggttgttgtaggcacttataattgaggggtgtcggtctgaaataagagaaatgttaatttgcggagtaacatgtcttctcaaattctttagaaaaaacccccaagctgaagttgtctccccttctacaatggcataggcaatcgggaagatatggttagctccatcttgtgcggtagctatcaacagtgtgccagtatactttccgtaaagccatgtaccgtctacttgtacaatgggtttgcaatatgcaaaaccattaatgcatggaccaaatgaccaaaagacacgtttaaacaatcttttgcccggtactatttctcccccctcatacaaggattctgtttgagcagcgaccacagtcccgggaacacaagattgcaaagctccgaaaagttttggcagtttggcatatgattcttcccagtttccatgaatcatctccaatgctttttgctttgctaaccatgtcttcttgtaggatggggtataattcatgaacgttttaatctctgcaatcaatgtcttgatggagacagttgggtttgttttgacaattggttggatgatctgtgctatgacgtgtttgtcgagttggcgatgatcttgtgtaagcatcggcacgagacaagtgtgatgacctctgatactcttgataatccatttgttatgcctctttgaattgcatgcgcccaagctccatgtacaaccattttcatgtaacttgcagacgaagtgtatccttctttggtcagagtaaattgttctgcaatcaaaatgatttctgatgttgtattctttgattgctcgaatacattgtgatttgtcatcgaaggtcatgccaacctcgagtacaccgac

SEQ ID NO: 7455 - DNA, 1065 bp, Glycine max
  Gm_smallRNAprecursor_288
cgtaccctgtaaatatttaatcaatgtattatgttataaaatttgattgaaagaaaattataacgaataaataaaatagattctcaccagccaacataagtggtttctttaaatgtttgcagtttgagttaccacgaagaaagttttgtgcaatgtggcgcaggcaaaagaaatgggatgtgtcctggacccataagttacttgggttgttgtaggcacttataattgaggggtgtcggtctgaaataagagaaatgttaatttgcggagtaacatgtcttctcaaattctttagaaaaaacccccaagctgaagttgtctccccttctacaatggcataggcaatcgggaagatatggttagctccatcttgtgcggtagctatcaacagtgtgccagtatactttccgtaaagccatgtaccgtctacttgtacaatgggtttgcaatatgcaaaaccattaatgcatggaccaaatgaccaaaagacacgtttaaacaatcttttgcccggtactatttctcccccctcatacaaggattctgtttgagcagcgaccacagtcccgggaacacaagattgcaaagctccgaaaagttttggcagtttggcatatgattcttcccagtttccatgaatcatctccaatgctttttgctttgctaaccatgtcttcttgtaggatggggtataattcatgaacgttttaatctctgcaatcaatgtcttgatggagacagttgggtttgttttgacaattggttggatgatctgtgctatgacgtgtttgtcgagttggcgatgatcttgtgtaagcatcggcacgagacaagtgtgatgacctctgatactcttgataatccatttgttatgcctctttgaattgcatgcgcccaagctccatgtacaaccattttcatgtaacttgcagacgaagtgtatccttctttggtcagagtaaattgttctgcaatcaaaatgatttctgatgttgtattctttgattgctcgaatacattgtgatttgtcatcgaaggtcatgccaacctcgagtacaccgactg

SEQ ID NO: 7456 - DNA, 1087 bp, Glycine max
  Gm_smallRNAprecursor_289
tagtcaagctatactaagaatgacttatcaacgtttttggtttttatagtataacaacaaatttaaatgttgaactcttaactatttctcacgacttaagttagtttggaatgcaggatgtagagatgttgtgtgtgaatctgatttcaaaacatctttttatcttatgaagttcatcatcttcgaccttaagctcccttagtcaatctcattaggggaaagtttcatgtcttacccttagaacttgaattttcaccatacctcccataataagagaacatatatgtgaagatataatgtctgttagatgattaatggagaaggaaagacaaaaaagatcacgaatttgattttgtctttgattctatctgctaacaaaaattaacattctaacaaattaatatttatcaattaaaaaaaagaaatatacatgtaaattggttgtcataatacataacatcttctaattatctatgaagcaccgacactgatatggacaccggacacgacacggacacgaacacgtgaacacctgtcaaacacatcaaattcaacccggacacgggcgtcggtatcgtgtcagtgttgatgttagtgtcgtgtcggacaccggacacggcaagggactggggtgtccgtgcttcatagctaattatacgtttgttacatattattattaaaaaaatttaacggaaaagatatatattaatgaaagcaagatagaagtcacaagctatagcaactaccaagccaaagaaatattattaagttaaaagtaagcggaaccaagccgcttggctacataaaaagccatagacacagtcattttctcaataaacaaatcccaacacaagttacagtattcacattatttggcagatcccatatatccatgtgtgcaagatccctactactcgttccctgtgacaccaccatgcgctcgtgacagatctgtggttgtaaggtttccattttgtaatcttgccacttatgaatttaccccatctacagtaaacaattcatcaggtttaatttcgaaacataaagacaatagttgaatcccttcactttggccttacaccaacac

SEQ ID NO: 7457 - DNA, 1093 bp, Glycine max
  Gm_smallRNAprecursor_290
tagtcaagctatactaagaatgacttatcaacgtttttggtttttatagtataacaacaaatttaaatgttgaactcttaactatttctcacgacttaagttagtttggaatgcaggatgtagagatgttgtgtgtgaatctgatttcaaaacatctttttatcttatgaagttcatcatcttcgaccttaagctcccttagtcaatctcattaggggaaagtttcatgtcttacccttagaacttgaattttcaccatacctcccataataagagaacatatatgtgaagatataatgtctgttagatgattaatggagaaggaaagacaaaaaagatcacgaatttgattttgtctttgattctatctgctaacaaaaattaacattctaacaaattaatatttatcaattaaaaaaaagaaatatacatgtaaattggttgtcataatacataacatcttctaattatctatgaagcaccgacactgatatggacaccggacacgacacggacacgaacacgtgaacacctgtcaaacacatcaaattcaacccggacacgggcgtcggtatcgtgtcagtgttgatgttagtgtcgtgtcggacaccggacacggcaagggactggggtgtccgtgcttcatagctaattatacgtttgttacatattattattaaaaaaatttaacggaaaagatatatattaatgaaagcaagatagaagtcacaagctatagcaactaccaagccaaagaaatattattaagttaaaagtaagcggaaccaagccgcttggctacataaaaagccatagacacagtcattttctcaataaacaaatcccaacacaagttacagtattcacattatttggcagatcccatatatccatgtgtgcaagatccctactactcgttccctgtgacaccaccatgcgctcgtgacagatctgtggttgtaaggtttccattttgtaatcttgccacttatgaatttaccccatctacagtaaacaattcatcaggtttaatttcgaaacataaagacaatagttgaatcccttcactttggccttacaccaacaccacaaa

SEQ ID NO: 7458 - DNA, 1099 bp, Glycine max
  Gm_smallRNAprecursor_291
tagtcaagctatactaagaatgacttatcaacgtttttggtttttatagtataacaacaaatttaaatgttgaactcttaactatttctcacgacttaagttagtttggaatgcaggatgtagagatgttgtgtgtgaatctgatttcaaaacatctttttatcttatgaagttcatcatcttcgaccttaagctcccttagtcaatctcattaggggaaagtttcatgtcttacccttagaacttgaattttcaccatacctcccataataagagaacatatatgtgaagatataatgtctgttagatgattaatggagaaggaaagacaaaaaagatcacgaatttgattttgtctttgattctatctgctaacaaaaattaacattctaacaaattaatatttatcaattaaaaaaaagaaatatacatgtaaattggttgtcataatacataacatcttctaattatctatgaagcaccgacactgatatggacaccggacacgacacggacacgaacacgtgaacacctgtcaaacacatcaaattcaacccggacacgggcgtcggtatcgtgtcagtgttgatgttagtgtcgtgtcggacaccggacacggcaagggactggggtgtccgtgcttcatagctaattatacgtttgttacatattattattaaaaaaatttaacggaaaagatatatattaatgaaagcaagatagaagtcacaagctatagcaactaccaagccaaagaaatattattaagttaaaagtaagcggaaccaagccgcttggctacataaaaagccatagacacagtcattttctcaataaacaaatcccaacacaagttacagtattcacattatttggcagatcccatatatccatgtgtgcaagatccctactactcgttccctgtgacaccaccatgcgctcgtgacagatctgtggttgtaaggtttccattttgtaatcttgccacttatgaatttaccccatctacagtaaacaattcatcaggtttaatttcgaaacataaagacaatagttgaatcccttcactttggccttacaccaacaccacaaaaaaata

SEQ ID NO: 7459 - DNA, 1100 bp, Glycine max
  Gm_smallRNAprecursor_292
tagtcaagctatactaagaatgacttatcaacgtttttggtttttatagtataacaacaaatttaaatgttgaactcttaactatttctcacgacttaagttagtttggaatgcaggatgtagagatgttgtgtgtgaatctgatttcaaaacatctttttatcttatgaagttcatcatcttcgaccttaagctcccttagtcaatctcattaggggaaagtttcatgtcttacccttagaacttgaattttcaccatacctcccataataagagaacatatatgtgaagatataatgtctgttagatgattaatggagaaggaaagacaaaaaagatcacgaatttgattttgtctttgattctatctgctaacaaaaattaacattctaacaaattaatatttatcaattaaaaaaaagaaatatacatgtaaattggttgtcataatacataacatcttctaattatctatgaagcaccgacactgatatggacaccggacacgacacggacacgaacacgtgaacacctgtcaaacacatcaaattcaacccggacacgggcgtcggtatcgtgtcagtgttgatgttagtgtcgtgtcggacaccggacacggcaagggactggggtgtccgtgcttcatagctaattatacgtttgttacatattattattaaaaaaatttaacggaaaagatatatattaatgaaagcaagatagaagtcacaagctatagcaactaccaagccaaagaaatattattaagttaaaagtaagcggaaccaagccgcttggctacataaaaagccatagacacagtcattttctcaataaacaaatcccaacacaagttacagtattcacattatttggcagatcccatatatccatgtgtgcaagatccctactactcgttccctgtgacaccaccatgcgctcgtgacagatctgtggttgtaaggtttccattttgtaatcttgccacttatgaatttaccccatctacagtaaacaattcatcaggtttaatttcgaaacataaagacaatagttgaatcccttcactttggccttacaccaacaccacaaaaaaatat

SEQ ID NO: 7460 - DNA, 1100 bp, Glycine max; identical to SEQ ID NO: 7459
  Gm_smallRNAprecursor_293

SEQ ID NO: 7461 - DNA, 1101 bp, Glycine max
  Gm_smallRNAprecursor_294
tagtcaagctatactaagaatgacttatcaacgtttttggtttttatagtataacaacaaatttaaatgttgaactcttaactatttctcacgacttaagttagtttggaatgcaggatgtagagatgttgtgtgtgaatctgatttcaaaacatctttttatcttatgaagttcatcatcttcgaccttaagctcccttagtcaatctcattaggggaaagtttcatgtcttacccttagaacttgaattttcaccatacctcccataataagagaacatatatgtgaagatataatgtctgttagatgattaatggagaaggaaagacaaaaaagatcacgaatttgattttgtctttgattctatctgctaacaaaaattaacattctaacaaattaatatttatcaattaaaaaaaagaaatatacatgtaaattggttgtcataatacataacatcttctaattatctatgaagcaccgacactgatatggacaccggacacgacacggacacgaacacgtgaacacctgtcaaacacatcaaattcaacccggacacgggcgtcggtatcgtgtcagtgttgatgttagtgtcgtgtcggacaccggacacggcaagggactggggtgtccgtgcttcatagctaattatacgtttgttacatattattattaaaaaaatttaacggaaaagatatatattaatgaaagcaagatagaagtcacaagctatagcaactaccaagccaaagaaatattattaagttaaaagtaagcggaaccaagccgcttggctacataaaaagccatagacacagtcattttctcaataaacaaatcccaacacaagttacagtattcacattatttggcagatcccatatatccatgtgtgcaagatccctactactcgttccctgtgacaccaccatgcgctcgtgacagatctgtggttgtaaggtttccattttgtaatcttgccacttatgaatttaccccatctacagtaaacaattcatcaggtttaatttcgaaacataaagacaatagttgaatcccttcactttggccttacaccaacaccacaaaaaaatatt

SEQ ID NO: 7462 - DNA, 1092 bp, Glycine max
  Gm_smallRNAprecursor_295
tcacagctactgtttctctcatacacacaagtgtttcaggtgatttcttcatataaacaaccaacacaattctcaactttttcatttcatctcattccatacacacaatgtgaatctgaaggactttgttcggcttgtagtgaggctggactagaaataaattcatggtttttcttggttgcaacactttaggttttagaagagcattctctatttgaatgcaaacttttcttatcctgccctcaacttcttactgcacttatccccatattagcatcattcaataatcccataggcaccattgcttcagaattatttgccatttactttcatttctcatttattttggaagcagcggagcatggtcatgccatttctgcatcatgctgatatattcattcttatgatttaatgaaccccccacccccacaatttgaaccaaacaatttccatcaaaacaatactcccctaaaacctagaacaaaatatgatataattgatttacttcactagggttcaggacaatattcaatcatgcttggctcactgcaggacaatgctagtcattctctcacatgattgaatattatcctgaaccctagcgaagtaaatcaattgtatcatatcttgttctaggttttaggaaagcattgtcttgatggaaattgcttggttcaaatttgggaggggggttattaaatcatgaaaatgaatatatcagcatcatgcagcttgtgaaaagctgcaggaaatgacatgaccatgctcctctgcttccaaaaaagaatgagaaatgaaagtaaatgacaaataattttgaagcattggtgccggtgggattattgaatgatgctaaatagggataagtgcagtaataagaaattgagggcaagataagaaaagtttgcatccaagaaaaaccatgaatttatttctagcccagcctcattacaagccaaacaaagtccttcaaatccacattgtgtgtatggaatgatatgaaagtcaaaagttgggaattgtgttggttgtttatatgaagaaaacacttgtatgtatgcatgagagaaacagtagtcatgaggataagag

SEQ ID NO: 7463 - DNA, 1091 bp, Glycine max
  Gm_smallRNAprecursor_296
cacagctactgtttctctcatacacacaagtgtttcaggtgatttcttcatataaacaaccaacacaattctcaactttttcatttcatctcattccatacacacaatgtgaatctgaaggactttgttcggcttgtagtgaggctggactagaaataaattcatggtttttcttggttgcaacactttaggttttagaagagcattctctatttgaatgcaaacttttcttatcctgccctcaacttcttactgcacttatccccatattagcatcattcaataatcccataggcaccattgcttcagaattatttgccatttactttcatttctcatttattttggaagcagcggagcatggtcatgccatttctgcatcatgctgatatattcattcttatgatttaatgaaccccccacccccacaatttgaaccaaacaatttccatcaaaacaatactcccctaaaacctagaacaaaatatgatataattgatttacttcactagggttcaggacaatattcaatcatgcttggctcactgcaggacaatgctagtcattctctcacatgattgaatattatcctgaaccctagcgaagtaaatcaattgtatcatatcttgttctaggttttaggaaagcattgtcttgatggaaattgcttggttcaaatttgggaggggggttattaaatcatgaaaatgaatatatcagcatcatgcagcttgtgaaaagctgcaggaaatgacatgaccatgctcctctgcttccaaaaaagaatgagaaatgaaagtaaatgacaaataattttgaagcattggtgccggtgggattattgaatgatgctaaatagggataagtgcagtaataagaaattgagggcaagataagaaaagtttgcatccaagaaaaaccatgaatttatttctagcccagcctcattacaagccaaacaaagtccttcaaatccacattgtgtgtatggaatgatatgaaagtcaaaagttgggaattgtgttggttgtttatatgaagaaaacacttgtatgtatgcatgagagaaacagtagtcatgaggataagag

SEQ ID NO: 7464 - DNA, 1091 bp, Glycine max; identical to SEQ ID NO: 7463
  Gm_smallRNAprecursor_297

SEQ ID NO: 7465 - DNA, 1088 bp, Glycine max
  Gm_smallRNAprecursor_298
acagctactgtttctctcatacacacaagtgtttcaggtgatttcttcatataaacaaccaacacaattctcaactttttcatttcatctcattccatacacacaatgtgaatctgaaggactttgttcggcttgtagtgaggctggactagaaataaattcatggtttttcttggttgcaacactttaggttttagaagagcattctctatttgaatgcaaacttttcttatcctgccctcaacttcttactgcacttatccccatattagcatcattcaataatcccataggcaccattgcttcagaattatttgccatttactttcatttctcatttattttggaagcagcggagcatggtcatgccatttctgcatcatgctgatatattcattcttatgatttaatgaaccccccacccccacaatttgaaccaaacaatttccatcaaaacaatactcccctaaaacctagaacaaaatatgatataattgatttacttcactagggttcaggacaatattcaatcatgcttggctcactgcaggacaatgctagtcattctctcacatgattgaatattatcctgaaccctagcgaagtaaatcaattgtatcatatcttgttctaggttttaggaaagcattgtcttgatggaaattgcttggttcaaatttgggaggggggttattaaatcatgaaaatgaatatatcagcatcatgcagcttgtgaaaagctgcaggaaatgacatgaccatgctcctctgcttccaaaaaagaatgagaaatgaaagtaaatgacaaataattttgaagcattggtgccggtgggattattgaatgatgctaaatagggataagtgcagtaataagaaattgagggcaagataagaaaagtttgcatccaagaaaaaccatgaatttatttctagcccagcctcattacaagccaaacaaagtccttcaaatccacattgtgtgtatggaatgatatgaaagtcaaaagttgggaattgtgttggttgtttatatgaagaaaacacttgtatgtatgcatgagagaaacagtagtcatgaggataag

SEQ ID NO: 7466 - DNA, 1090 bp, Glycine max
  Gm_smallRNAprecursor_299
acagctactgtttctctcatacacacaagtgtttcaggtgatttcttcatataaacaaccaacacaattctcaactttttcatttcatctcattccatacacacaatgtgaatctgaaggactttgttcggcttgtagtgaggctggactagaaataaattcatggtttttcttggttgcaacactttaggttttagaagagcattctctatttgaatgcaaacttttcttatcctgccctcaacttcttactgcacttatccccatattagcatcattcaataatcccataggcaccattgcttcagaattatttgccatttactttcatttctcatttattttggaagcagcggagcatggtcatgccatttctgcatcatgctgatatattcattcttatgatttaatgaaccccccacccccacaatttgaaccaaacaatttccatcaaaacaatactcccctaaaacctagaacaaaatatgatataattgatttacttcactagggttcaggacaatattcaatcatgcttggctcactgcaggacaatgctagtcattctctcacatgattgaatattatcctgaaccctagcgaagtaaatcaattgtatcatatcttgttctaggttttaggaaagcattgtcttgatggaaattgcttggttcaaatttgggaggggggttattaaatcatgaaaatgaatatatcagcatcatgcagcttgtgaaaagctgcaggaaatgacatgaccatgctcctctgcttccaaaaaagaatgagaaatgaaagtaaatgacaaataattttgaagcattggtgccggtgggattattgaatgatgctaaatagggataagtgcagtaataagaaattgagggcaagataagaaaagtttgcatccaagaaaaaccatgaatttatttctagcccagcctcattacaagccaaacaaagtccttcaaatccacattgtgtgtatggaatgatatgaaagtcaaaagttgggaattgtgttggttgtttatatgaagaaaacacttgtatgtatgcatgagagaaacagtagtcatgaggataagag

SEQ ID NO: 7467 - DNA, 1087 bp, Glycine max
  Gm_smallRNAprecursor_300
cagctactgtttctctcatacacacaagtgtttcaggtgatttcttcatataaacaaccaacacaattctcaactttttcatttcatctcattccatacacacaatgtgaatctgaaggactttgttcggcttgtagtgaggctggactagaaataaattcatggtttttcttggttgcaacactttaggttttagaagagcattctctatttgaatgcaaacttttcttatcctgccctcaacttcttactgcacttatccccatattagcatcattcaataatcccataggcaccattgcttcagaattatttgccatttactttcatttctcatttattttggaagcagcggagcatggtcatgccatttctgcatcatgctgatatattcattcttatgatttaatgaaccccccacccccacaatttgaaccaaacaatttccatcaaaacaatactcccctaaaacctagaacaaaatatgatataattgatttacttcactagggttcaggacaatattcaatcatgcttggctcactgcaggacaatgctagtcattctctcacatgattgaatattatcctgaaccctagcgaagtaaatcaattgtatcatatcttgttctaggttttaggaaagcattgtcttgatggaaattgcttggttcaaatttgggaggggggttattaaatcatgaaaatgaatatatcagcatcatgcagcttgtgaaaagctgcaggaaatgacatgaccatgctcctctgcttccaaaaaagaatgagaaatgaaagtaaatgacaaataattttgaagcattggtgccggtgggattattgaatgatgctaaatagggataagtgcagtaataagaaattgagggcaagataagaaaagtttgcatccaagaaaaaccatgaatttatttctagcccagcctcattacaagccaaacaaagtccttcaaatccacattgtgtgtatggaatgatatgaaagtcaaaagttgggaattgtgttggttgtttatatgaagaaaacacttgtatgtatgcatgagagaaacagtagtcatgaggataag

SEQ ID NO: 7468 - DNA, 1087 bp, Glycine max; identical to SEQ ID NO: 7467
  Gm_smallRNAprecursor_301

SEQ ID NO: 7469 - DNA, 1084 bp, Glycine max
  Gm_smallRNAprecursor_302
agctactgtttctctcatacacacaagtgtttcaggtgatttcttcatataaacaaccaacacaattctcaactttttcatttcatctcattccatacacacaatgtgaatctgaaggactttgttcggcttgtagtgaggctggactagaaataaattcatggtttttcttggttgcaacactttaggttttagaagagcattctctatttgaatgcaaacttttcttatcctgccctcaacttcttactgcacttatccccatattagcatcattcaataatcccataggcaccattgcttcagaattatttgccatttactttcatttctcatttattttggaagcagcggagcatggtcatgccatttctgcatcatgctgatatattcattcttatgatttaatgaaccccccacccccacaatttgaaccaaacaatttccatcaaaacaatactcccctaaaacctagaacaaaatatgatataattgatttacttcactagggttcaggacaatattcaatcatgcttggctcactgcaggacaatgctagtcattctctcacatgattgaatattatcctgaaccctagcgaagtaaatcaattgtatcatatcttgttctaggttttaggaaagcattgtcttgatggaaattgcttggttcaaatttgggaggggggttattaaatcatgaaaatgaatatatcagcatcatgcagcttgtgaaaagctgcaggaaatgacatgaccatgctcctctgcttccaaaaaagaatgagaaatgaaagtaaatgacaaataattttgaagcattggtgccggtgggattattgaatgatgctaaatagggataagtgcagtaataagaaattgagggcaagataagaaaagtttgcatccaagaaaaaccatgaatttatttctagcccagcctcattacaagccaaacaaagtccttcaaatccacattgtgtgtatggaatgatatgaaagtcaaaagttgggaattgtgttggttgtttatatgaagaaaacacttgtatgtatgcatgagagaaacagtagtcatgaggata

SEQ ID NO: 7470 - DNA, 1086 bp, Glycine max
  Gm_smallRNAprecursor_303
agctactgtttctctcatacacacaagtgtttcaggtgatttcttcatataaacaaccaacacaattctcaactttttcatttcatctcattccatacacacaatgtgaatctgaaggactttgttcggcttgtagtgaggctggactagaaataaattcatggtttttcttggttgcaacactttaggttttagaagagcattctctatttgaatgcaaacttttcttatcctgccctcaacttcttactgcacttatccccatattagcatcattcaataatcccataggcaccattgcttcagaattatttgccatttactttcatttctcatttattttggaagcagcggagcatggtcatgccatttctgcatcatgctgatatattcattcttatgatttaatgaaccccccacccccacaatttgaaccaaacaatttccatcaaaacaatactcccctaaaacctagaacaaaatatgatataattgatttacttcactagggttcaggacaatattcaatcatgcttggctcactgcaggacaatgctagtcattctctcacatgattgaatattatcctgaaccctagcgaagtaaatcaattgtatcatatcttgttctaggttttaggaaagcattgtcttgatggaaattgcttggttcaaatttgggaggggggttattaaatcatgaaaatgaatatatcagcatcatgcagcttgtgaaaagctgcaggaaatgacatgaccatgctcctctgcttccaaaaaagaatgagaaatgaaagtaaatgacaaataattttgaagcattggtgccggtgggattattgaatgatgctaaatagggataagtgcagtaataagaaattgagggcaagataagaaaagtttgcatccaagaaaaaccatgaatttatttctagcccagcctcattacaagccaaacaaagtccttcaaatccacattgtgtgtatggaatgatatgaaagtcaaaagttgggaattgtgttggttgtttatatgaagaaaacacttgtatgtatgcatgagagaaacagtagtcatgaggataag

SEQ ID NO: 7471 - DNA, 1082 bp, Glycine max
  Gm_smallRNAprecursor_304
gctactgtttctctcatacacacaagtgtttcaggtgatttcttcatataaacaaccaacacaattctcaactttttcatttcatctcattccatacacacaatgtgaatctgaaggactttgttcggcttgtagtgaggctggactagaaataaattcatggtttttcttggttgcaacactttaggttttagaagagcattctctatttgaatgcaaacttttcttatcctgccctcaacttcttactgcacttatccccatattagcatcattcaataatcccataggcaccattgcttcagaattatttgccatttactttcatttctcatttattttggaagcagcggagcatggtcatgccatttctgcatcatgctgatatattcattcttatgatttaatgaaccccccacccccacaatttgaaccaaacaatttccatcaaaacaatactcccctaaaacctagaacaaaatatgatataattgatttacttcactagggttcaggacaatattcaatcatgcttggctcactgcaggacaatgctagtcattctctcacatgattgaatattatcctgaaccctagcgaagtaaatcaattgtatcatatcttgttctaggttttaggaaagcattgtcttgatggaaattgcttggttcaaatttgggaggggggttattaaatcatgaaaatgaatatatcagcatcatgcagcttgtgaaaagctgcaggaaatgacatgaccatgctcctctgcttccaaaaaagaatgagaaatgaaagtaaatgacaaataattttgaagcattggtgccggtgggattattgaatgatgctaaatagggataagtgcagtaataagaaattgagggcaagataagaaaagtttgcatccaagaaaaaccatgaatttatttctagcccagcctcattacaagccaaacaaagtccttcaaatccacattgtgtgtatggaatgatatgaaagtcaaaagttgggaattgtgttggttgtttatatgaagaaaacacttgtatgtatgcatgagagaaacagtagtcatgaggat

SEQ ID NO: 7472 - DNA, 1083 bp, Glycine max
  Gm_smallRNAprecursor_305
gctactgtttctctcatacacacaagtgtttcaggtgatttcttcatataaacaaccaacacaattctcaactttttcatttcatctcattccatacacacaatgtgaatctgaaggactttgttcggcttgtagtgaggctggactagaaataaattcatggtttttcttggttgcaacactttaggttttagaagagcattctctatttgaatgcaaacttttcttatcctgccctcaacttcttactgcacttatccccatattagcatcattcaataatcccataggcaccattgcttcagaattatttgccatttactttcatttctcatttattttggaagcagcggagcatggtcatgccatttctgcatcatgctgatatattcattcttatgatttaatgaaccccccacccccacaatttgaaccaaacaatttccatcaaaacaatactcccctaaaacctagaacaaaatatgatataattgatttacttcactagggttcaggacaatattcaatcatgcttggctcactgcaggacaatgctagtcattctctcacatgattgaatattatcctgaaccctagcgaagtaaatcaattgtatcatatcttgttctaggttttaggaaagcattgtcttgatggaaattgcttggttcaaatttgggaggggggttattaaatcatgaaaatgaatatatcagcatcatgcagcttgtgaaaagctgcaggaaatgacatgaccatgctcctctgcttccaaaaaagaatgagaaatgaaagtaaatgacaaataattttgaagcattggtgccggtgggattattgaatgatgctaaatagggataagtgcagtaataagaaattgagggcaagataagaaaagtttgcatccaagaaaaaccatgaatttatttctagcccagcctcattacaagccaaacaaagtccttcaaatccacattgtgtgtatggaatgatatgaaagtcaaaagttgggaattgtgttggttgtttatatgaagaaaacacttgtatgtatgcatgagagaaacagtagtcatgaggata

SEQ ID NO: 7473 - DNA, 1067 bp, Glycine max
  Gm_smallRNAprecursor_306
atttggaagcaaatactcaagtcttcgcaggtgatgctgttgtgaaagagaaaatgtagatttagaagcaaattctcatgtctttgcacctggtgatactggtaatgaaagagagaatgtagatttagaagctaattctggtgtcttagaaggtgacactaatgatgaaagagaaagtttaatcaagaaggaatcagggaaatccaaaagagcagcagatagtatcagatcactcacaagtcaggttggtagttccaattttttccagtatcagggcaagaggaccttgcggcctcacgtgtgtggccttcaaagttcgcttagactcaccaaacatgagatattgcttgctgtaacattagactcaccacttccgagattttgtctgctttattgttcatgtgggcctataaaagatgtttcaatgggttaagagaggagagtgattataaacaattcttagccttgactctttagcagttgtagcctatgaagcatcaacaccgacacggacatcggacacagacacgtggacacctgtaatattcaaaatatagaacgtagtacgggtgtcgtgtcggtgtcggacaccgacacgacaaggagctgaagtgtccgtgcttcataggttgtagccaaggatggtttataaacaccttcctccattaactcacatgagcaccaaaatgagtaatacttcagatgtggtaattaaggctgcagatttggaatactaaaaagactttgcaacaaattaaagtgtttttttcctcaacaaatgatatccggttcaagattttcaatgtacataattgcctttgaacagaaaagagattcttctatgctcaagactaacgtctgcacaagaaagcacaatttttatcactaatacattcatttttttttgtagtggtatcttctgaagctatggatcacggtggtggccaaatcttccatgcagggccatctgtagaagcatcaaggataaccacctcttctagatatgagccttctatgagcaatgccagtttcatggagacagagtggacagagctagatgaacctgg

SEQ ID NO: 7474 - DNA, 1069 bp, Glycine max
  Gm_smallRNAprecursor_307
atttggaagcaaatactcaagtcttcgcaggtgatgctgttgtgaaagagaaaatgtagatttagaagcaaattctcatgtctttgcacctggtgatactggtaatgaaagagagaatgtagatttagaagctaattctggtgtcttagaaggtgacactaatgatgaaagagaaagtttaatcaagaaggaatcagggaaatccaaaagagcagcagatagtatcagatcactcacaagtcaggttggtagttccaattttttccagtatcagggcaagaggaccttgcggcctcacgtgtgtggccttcaaagttcgcttagactcaccaaacatgagatattgcttgctgtaacattagactcaccacttccgagattttgtctgctttattgttcatgtgggcctataaaagatgtttcaatgggttaagagaggagagtgattataaacaattcttagccttgactctttagcagttgtagcctatgaagcatcaacaccgacacggacatcggacacagacacgtggacacctgtaatattcaaaatatagaacgtagtacgggtgtcgtgtcggtgtcggacaccgacacgacaaggagctgaagtgtccgtgcttcataggttgtagccaaggatggtttataaacaccttcctccattaactcacatgagcaccaaaatgagtaatacttcagatgtggtaattaaggctgcagatttggaatactaaaaagactttgcaacaaattaaagtgtttttttcctcaacaaatgatatccggttcaagattttcaatgtacataattgcctttgaacagaaaagagattcttctatgctcaagactaacgtctgcacaagaaagcacaatttttatcactaatacattcatttttttttgtagtggtatcttctgaagctatggatcacggtggtggccaaatcttccatgcagggccatctgtagaagcatcaaggataaccacctcttctagatatgagccttctatgagcaatgccagtttcatggagacagagtggacagagctagatgaacctggag

SEQ ID NO: 7475 - DNA, 1059 bp, Glycine max
  Gm_smallRNAprecursor_308
tggaagcaaatactcaagtcttcgcaggtgatgctgttgtgaaagagaaaatgtagatttagaagcaaattctcatgtctttgcacctggtgatactggtaatgaaagagagaatgtagatttagaagctaattctggtgtcttagaaggtgacactaatgatgaaagagaaagtttaatcaagaaggaatcagggaaatccaaaagagcagcagatagtatcagatcactcacaagtcaggttggtagttccaattttttccagtatcagggcaagaggaccttgcggcctcacgtgtgtggccttcaaagttcgcttagactcaccaaacatgagatattgcttgctgtaacattagactcaccacttccgagattttgtctgctttattgttcatgtgggcctataaaagatgtttcaatgggttaagagaggagagtgattataaacaattcttagccttgactctttagcagttgtagcctatgaagcatcaacaccgacacggacatcggacacagacacgtggacacctgtaatattcaaaatatagaacgtagtacgggtgtcgtgtcggtgtcggacaccgacacgacaaggagctgaagtgtccgtgcttcataggttgtagccaaggatggtttataaacaccttcctccattaactcacatgagcaccaaaatgagtaatacttcagatgtggtaattaaggctgcagatttggaatactaaaaagactttgcaacaaattaaagtgtttttttcctcaacaaatgatatccggttcaagattttcaatgtacataattgcctttgaacagaaaagagattcttctatgctcaagactaacgtctgcacaagaaagcacaatttttatcactaatacattcatttttttttgtagtggtatcttctgaagctatggatcacggtggtggccaaatcttccatgcagggccatctgtagaagcatcaaggataaccacctcttctagatatgagccttctatgagcaatgccagtttcatggagacagagtggacagagctagatgaa

SEQ ID NO: 7476 - DNA, 1060 bp, Glycine max
  Gm_smallRNAprecursor_309
tggaagcaaatactcaagtcttcgcaggtgatgctgttgtgaaagagaaaatgtagatttagaagcaaattctcatgtctttgcacctggtgatactggtaatgaaagagagaatgtagatttagaagctaattctggtgtcttagaaggtgacactaatgatgaaagagaaagtttaatcaagaaggaatcagggaaatccaaaagagcagcagatagtatcagatcactcacaagtcaggttggtagttccaattttttccagtatcagggcaagaggaccttgcggcctcacgtgtgtggccttcaaagttcgcttagactcaccaaacatgagatattgcttgctgtaacattagactcaccacttccgagattttgtctgctttattgttcatgtgggcctataaaagatgtttcaatgggttaagagaggagagtgattataaacaattcttagccttgactctttagcagttgtagcctatgaagcatcaacaccgacacggacatcggacacagacacgtggacacctgtaatattcaaaatatagaacgtagtacgggtgtcgtgtcggtgtcggacaccgacacgacaaggagctgaagtgtccgtgcttcataggttgtagccaaggatggtttataaacaccttcctccattaactcacatgagcaccaaaatgagtaatacttcagatgtggtaattaaggctgcagatttggaatactaaaaagactttgcaacaaattaaagtgtttttttcctcaacaaatgatatccggttcaagattttcaatgtacataattgcctttgaacagaaaagagattcttctatgctcaagactaacgtctgcacaagaaagcacaatttttatcactaatacattcatttttttttgtagtggtatcttctgaagctatggatcacggtggtggccaaatcttccatgcagggccatctgtagaagcatcaaggataaccacctcttctagatatgagccttctatgagcaatgccagtttcatggagacagagtggacagagctagatgaac

SEQ ID NO: 7477 - DNA, 1061 bp, Glycine max
  Gm_smallRNAprecursor_310
tggaagcaaatactcaagtcttcgcaggtgatgctgttgtgaaagagaaaatgtagatttagaagcaaattctcatgtctttgcacctggtgatactggtaatgaaagagagaatgtagatttagaagctaattctggtgtcttagaaggtgacactaatgatgaaagagaaagtttaatcaagaaggaatcagggaaatccaaaagagcagcagatagtatcagatcactcacaagtcaggttggtagttccaattttttccagtatcagggcaagaggaccttgcggcctcacgtgtgtggccttcaaagttcgcttagactcaccaaacatgagatattgcttgctgtaacattagactcaccacttccgagattttgtctgctttattgttcatgtgggcctataaaagatgtttcaatgggttaagagaggagagtgattataaacaattcttagccttgactctttagcagttgtagcctatgaagcatcaacaccgacacggacatcggacacagacacgtggacacctgtaatattcaaaatatagaacgtagtacgggtgtcgtgtcggtgtcggacaccgacacgacaaggagctgaagtgtccgtgcttcataggttgtagccaaggatggtttataaacaccttcctccattaactcacatgagcaccaaaatgagtaatacttcagatgtggtaattaaggctgcagatttggaatactaaaaagactttgcaacaaattaaagtgtttttttcctcaacaaatgatatccggttcaagattttcaatgtacataattgcctttgaacagaaaagagattcttctatgctcaagactaacgtctgcacaagaaagcacaatttttatcactaatacattcatttttttttgtagtggtatcttctgaagctatggatcacggtggtggccaaatcttccatgcagggccatctgtagaagcatcaaggataaccacctcttctagatatgagccttctatgagcaatgccagtttcatggagacagagtggacagagctagatgaacc

SEQ ID NO: 7478 - DNA, 1066 bp, Glycine max
  Gm_smallRNAprecursor_311
tggaagcaaatactcaagtcttcgcaggtgatgctgttgtgaaagagaaaatgtagatttagaagcaaattctcatgtctttgcacctggtgatactggtaatgaaagagagaatgtagatttagaagctaattctggtgtcttagaaggtgacactaatgatgaaagagaaagtttaatcaagaaggaatcagggaaatccaaaagagcagcagatagtatcagatcactcacaagtcaggttggtagttccaattttttccagtatcagggcaagaggaccttgcggcctcacgtgtgtggccttcaaagttcgcttagactcaccaaacatgagatattgcttgctgtaacattagactcaccacttccgagattttgtctgctttattgttcatgtgggcctataaaagatgtttcaatgggttaagagaggagagtgattataaacaattcttagccttgactctttagcagttgtagcctatgaagcatcaacaccgacacggacatcggacacagacacgtggacacctgtaatattcaaaatatagaacgtagtacgggtgtcgtgtcggtgtcggacaccgacacgacaaggagctgaagtgtccgtgcttcataggttgtagccaaggatggtttataaacaccttcctccattaactcacatgagcaccaaaatgagtaatacttcagatgtggtaattaaggctgcagatttggaatactaaaaagactttgcaacaaattaaagtgtttttttcctcaacaaatgatatccggttcaagattttcaatgtacataattgcctttgaacagaaaagagattcttctatgctcaagactaacgtctgcacaagaaagcacaatttttatcactaatacattcatttttttttgtagtggtatcttctgaagctatggatcacggtggtggccaaatcttccatgcagggccatctgtagaagcatcaaggataaccacctcttctagatatgagccttctatgagcaatgccagtttcatggagacagagtggacagagctagatgaacctggag

SEQ ID NO: 7479 - DNA, 1067 bp, Glycine max
  Gm_smallRNAprecursor_312
tggaagcaaatactcaagtcttcgcaggtgatgctgttgtgaaagagaaaatgtagatttagaagcaaattctcatgtctttgcacctggtgatactggtaatgaaagagagaatgtagatttagaagctaattctggtgtcttagaaggtgacactaatgatgaaagagaaagtttaatcaagaaggaatcagggaaatccaaaagagcagcagatagtatcagatcactcacaagtcaggttggtagttccaattttttccagtatcagggcaagaggaccttgcggcctcacgtgtgtggccttcaaagttcgcttagactcaccaaacatgagatattgcttgctgtaacattagactcaccacttccgagattttgtctgctttattgttcatgtgggcctataaaagatgtttcaatgggttaagagaggagagtgattataaacaattcttagccttgactctttagcagttgtagcctatgaagcatcaacaccgacacggacatcggacacagacacgtggacacctgtaatattcaaaatatagaacgtagtacgggtgtcgtgtcggtgtcggacaccgacacgacaaggagctgaagtgtccgtgcttcataggttgtagccaaggatggtttataaacaccttcctccattaactcacatgagcaccaaaatgagtaatacttcagatgtggtaattaaggctgcagatttggaatactaaaaagactttgcaacaaattaaagtgtttttttcctcaacaaatgatatccggttcaagattttcaatgtacataattgcctttgaacagaaaagagattcttctatgctcaagactaacgtctgcacaagaaagcacaatttttatcactaatacattcatttttttttgtagtggtatcttctgaagctatggatcacggtggtggccaaatcttccatgcagggccatctgtagaagcatcaaggataaccacctcttctagatatgagccttctatgagcaatgccagtttcatggagacagagtggacagagctagatgaacctggagt

SEQ ID NO: 7480 - DNA, 1068 bp, Glycine max
  Gm_smallRNAprecursor_313
tggaagcaaatactcaagtcttcgcaggtgatgctgttgtgaaagagaaaatgtagatttagaagcaaattctcatgtctttgcacctggtgatactggtaatgaaagagagaatgtagatttagaagctaattctggtgtcttagaaggtgacactaatgatgaaagagaaagtttaatcaagaaggaatcagggaaatccaaaagagcagcagatagtatcagatcactcacaagtcaggttggtagttccaattttttccagtatcagggcaagaggaccttgcggcctcacgtgtgtggccttcaaagttcgcttagactcaccaaacatgagatattgcttgctgtaacattagactcaccacttccgagattttgtctgctttattgttcatgtgggcctataaaagatgtttcaatgggttaagagaggagagtgattataaacaattcttagccttgactctttagcagttgtagcctatgaagcatcaacaccgacacggacatcggacacagacacgtggacacctgtaatattcaaaatatagaacgtagtacgggtgtcgtgtcggtgtcggacaccgacacgacaaggagctgaagtgtccgtgcttcataggttgtagccaaggatggtttataaacaccttcctccattaactcacatgagcaccaaaatgagtaatacttcagatgtggtaattaaggctgcagatttggaatactaaaaagactttgcaacaaattaaagtgtttttttcctcaacaaatgatatccggttcaagattttcaatgtacataattgcctttgaacagaaaagagattcttctatgctcaagactaacgtctgcacaagaaagcacaatttttatcactaatacattcatttttttttgtagtggtatcttctgaagctatggatcacggtggtggccaaatcttccatgcagggccatctgtagaagcatcaaggataaccacctcttctagatatgagccttctatgagcaatgccagtttcatggagacagagtggacagagctagatgaacctggagtg

SEQ ID NO: 7481 - DNA, 1031 bp, Glycine max
  Gm_smallRNAprecursor_314
ttggagaagttatatttcaaatttcaaacaaaaatatcattgtcatacataggccacttaagtattcgtatacaaataatatcgcatgggggagcaaaaaaagaaaaaaaaagagggagttattacagaacctattaaagtaagagatctgaacattttagacccaggttgaaattcatgcaccactttcccaagttgaacaaccccgaaagtgggagagagacaaatagtgatttttttctgagttccaagtgagtgaaaaatttgtgatgaaaaagaagtgtgagatttattaagatttaccatgtgtctagcaccagtggctaaaccattcaaaagaccaattttgcaggaacaatttataaagggatttataaaactaggggaccaaatgtgtgaattaaactatagagggaccaaaatcgaaattggagtaaaactgatggaccaaaagtgcaattttacctaaaaaatgaagcctttacggggaaccactcagacgttgacatgtggcattgacacatgacagtcaacatctgaggttaacggtcaatgtccaaatcgggcttccaggaccaattttgcagggatttataaaactgggggaccaaatttgtgaattaaattatagggagaccaaatccgtaattagagataaagtgggagaccaattttacaattttgcctaaatgaaaaactaaagttattctcaatgtcaactttagtaatgctccgaccaattctaagtctaaatattatatctgtagtattgtgtcactttcctcacttttccttttctcctctctgttgtatttacatgtcactctcttttttaagtcattgtgacaatcacaactatcaccaccaaacatatgctcttaccctttactcaatagagttttttttttacttttattttaatgaaaaaaattatttttatattttgctctcttctataagcaaagaattcactaatgaaaaaaaattaagcacaagctttgcctagctcaaaattcctatacaatgttaac

SEQ ID NO: 7482 - DNA, 1085 bp, Glycine max
  Gm_smallRNAprecursor_315
ctaattttttgattttatgttctatgcatctaatacacaagtaataaaacaaattaaattatttatatcactgttgtaaaaagtaataaacaggtagtgaaaagaaaaagaaaagctgcccctttcactattgaaagcaacaaatgctagctgtctcaacgtggagagaaacttaagttgaaaaattggttcctaaaaggtcactagtactctagatcttttaactaatttatatctttttaaaaaataattaatttaattaattatattaaattttttggttatttatattattattttaaaactattatttttatctctttattcaattaattatttttttattaatatttggagagatatataaaaaataattaatatatttaaaaattagaaaaaaaaattaaatacaatcttataatcaacaataaagtagagagtaatgattcaaagacggtgttgacatcacgaacgtcttagaaagttaggtttctaagacggtgctgacatcacgaccgtcttagaaagtcatgcttcaaagatggtgctgacgtcgacaacgtcttagaaagccaaccttcaaagacggtcgtgatgtcagcaccgtctttgaagcctggttttctaagacgatcgtgatgtcagcaccgtctttgaaagttgagattttctaagacggtatcctttcgaccgtctttgaaagtgagacactttcaacgatattagattcaaagacggtcaaacaccgacgttgtttgtctctttccaccgtcgttgaaaccgctttttctactagataggaatcaactactccaatttgatcatagaatttgtagggaatgaagaggttataattgcatggtccctatagtttacttcaaagcaccaaccatttcataggttagtgcaataaattttgaaagaaacccaattttgaaacagatcatgcaaatagaagctacacaagtatgtgtaactctttattaccgtgtccaatttcaaggcactatgtgtgtgagtgagagtaataacaggtatatataagactttccttcgttacaacatgcatgaaattctaaaaaaca

SEQ ID NO: 7483 - DNA, 1135 bp, Glycine max
  Gm_smallRNAprecursor_316
cctacaagtatatttttttatacaaagtaaaaaatggaaacaatttttatgatgaatgcattgatgattgtttgagtgtggttttctggaaaaaaatatatttccaattttctactttgaagaaaatatatgaaaacgaagatgcatgagtgaatgcaggtagtgtaacggcttcagcggagactgacagggtggtgcctcccttgtaaataagaaagcaaggtgagaaagccagggtgacgtcagaaagcaagcctctaccaggcgccttttttagtgatcaaacacctaaagaggtgtcaagcctaagtctaacgtctcctacaaaaagataaagaatgaaagcaaagcgccactccttaattttagggaaaaaattaggcaaaattgtatttttagttctccagtttatatccagtctcggatttggtcatccagtaatttaaatcacgaattgggtcctcctattttgtaaaatcgtgcaatgttggtcccccaggtcacaattggacgttgactgttagcaagtgatgttgactgccacgtgccatgttcttattggatgatgactgccacgtgtcatgttttgattgatcaatgaaaacaataatgcatctcatctttcatggaattgacatccaatcagaacatgacacgtgacgatcatcatccaataagaacgtgacacgtgacgatcaacatcacttgctaacggtcaacgtctaatcgtggcctagaggaccaacattgcacgattttacaaaataagaggacctaattcgtgaattaaattactggggaccaaatccgaaattggaaataaattaggggaccaaaaatacaattttgtcaaaaaattacccctaataaataaataattttaaaaaacacctattttgataaattattttacgacaatacccgctttagtaaaaaaagaaaagaaaagaaaagaaaaagaaacacagacatatccgatggtagtgatggtaccgtgtagaactaacaagataacgtctgcatttgtatagagacgaagcatgtctctgagcctcatccaccatagaccactttcttcttcttcttgcatcttctaccttcactcttccacttcacactctttcgaaacccttct

SEQ ID NO: 7484 - DNA, 1136 bp, Glycine max
  Gm_smallRNAprecursor_317
cctacaagtatatttttttatacaaagtaaaaaatggaaacaatttttatgatgaatgcattgatgattgtttgagtgtggttttctggaaaaaaatatatttccaattttctactttgaagaaaatatatgaaaacgaagatgcatgagtgaatgcaggtagtgtaacggcttcagcggagactgacagggtggtgcctcccttgtaaataagaaagcaaggtgagaaagccagggtgacgtcagaaagcaagcctctaccaggcgccttttttagtgatcaaacacctaaagaggtgtcaagcctaagtctaacgtctcctacaaaaagataaagaatgaaagcaaagcgccactccttaattttagggaaaaaattaggcaaaattgtatttttagttctccagtttatatccagtctcggatttggtcatccagtaatttaaatcacgaattgggtcctcctattttgtaaaatcgtgcaatgttggtcccccaggtcacaattggacgttgactgttagcaagtgatgttgactgccacgtgccatgttcttattggatgatgactgccacgtgtcatgttttgattgatcaatgaaaacaataatgcatctcatctttcatggaattgacatccaatcagaacatgacacgtgacgatcatcatccaataagaacgtgacacgtgacgatcaacatcacttgctaacggtcaacgtctaatcgtggcctagaggaccaacattgcacgattttacaaaataagaggacctaattcgtgaattaaattactggggaccaaatccgaaattggaaataaattaggggaccaaaaatacaattttgtcaaaaaattacccctaataaataaataattttaaaaaacacctattttgataaattattttacgacaatacccgctttagtaaaaaaagaaaagaaaagaaaagaaaaagaaacacagacatatccgatggtagtgatggtaccgtgtagaactaacaagataacgtctgcatttgtatagagacgaagcatgtctctgagcctcatccaccatagaccactttcttcttcttcttgcatcttctaccttcactcttccacttcacactctttcgaaacccttctt

SEQ ID NO: 7485 - DNA, 1033 bp, Glycine max
  Gm_smallRNAprecursor_318
aacgaagatgcatgagtgaatgcaggtagtgtaacggcttcagcggagactgacagggtggtgcctcccttgtaaataagaaagcaaggtgagaaagccagggtgacgtcagaaagcaagcctctaccaggcgccttttttagtgatcaaacacctaaagaggtgtcaagcctaagtctaacgtctcctacaaaaagataaagaatgaaagcaaagcgccactccttaattttagggaaaaaattaggcaaaattgtatttttagttctccagtttatatccagtctcggatttggtcatccagtaatttaaatcacgaattgggtcctcctattttgtaaaatcgtgcaatgttggtcccccaggtcacaattggacgttgactgttagcaagtgatgttgactgccacgtgccatgttcttattggatgatgactgccacgtgtcatgttttgattgatcaatgaaaacaataatgcatctcatctttcatggaattgacatccaatcagaacatgacacgtgacgatcatcatccaataagaacgtgacacgtgacgatcaacatcacttgctaacggtcaacgtctaatcgtggcctagaggaccaacattgcacgattttacaaaataagaggacctaattcgtgaattaaattactggggaccaaatccgaaattggaaataaattaggggaccaaaaatacaattttgtcaaaaaattacccctaataaataaataattttaaaaaacacctattttgataaattattttacgacaatacccgctttagtaaaaaaagaaaagaaaagaaaagaaaaagaaacacagacatatccgatggtagtgatggtaccgtgtagaactaacaagataacgtctgcatttgtatagagacgaagcatgtctctgagcctcatccaccatagaccactttcttcttcttcttgcatcttctaccttcactcttccacttcacactctttcgaaacccttcttcctcttacacgccaaaaccccaacatcatca

SEQ ID NO: 7486 - DNA, 1036 bp, Glycine max
  Gm_smallRNAprecursor_319
ttttatttatattatgtagaaataatgtataaattattttgtgaagttattgtattatattttattttgcagtatcaatgacatcttcgtcgtcatgtctatcaaatattacaattaagtctggcccgatccatggtgacgtattatggatgcaagctaaacatgtttggaatggggaagaagactggaaattacacattaaacgagttgtccccacgtatcaaggggacttgccgtacttgtttttttatacagagagatgtgcagtgtcaccgattataaaactaaatcaatcggaggtatgtgcatcttaatacaaatgtgggcatgggaacgatgtataactttggctccaaagaggactcctcccctagtagaaaataaattaaaccactcgggcacaggttagtcatttttaaaagcgtctttcatttcaaaagaataaatggttttagggtatattaaattttaatctttgtaggtggctacgacgtggaaatcaacatatcggcaatgatgatgtgagagtttttcgtcgcaagttggatattatgaaacgtcatgaggtaagaacatggtattgtatttgtaaaataaaaaataatgtgttattttactaaaatgctgacaactatgttgttatatgcagtttgtgtggaagccttacacagcaactattatgtcattgttgtctcccatttgtgtagtcggaagtgtcgcgtggtgccactaatttgtttccaagttattgagtggcaccaaccggatagagtattgagacaatttggaatgtagcaaccaattccagagtctccttcgcaacccttgaacattcatggcataacatgaaaggcaaacatgacgaaaattggggtcaattgttcgccccaatgattaatcagtggaattaacaatcaccatgcttttagggtcgatgcttatccccgacaagagggcctattgagctttaactccgacatggtctggtataggcgaaagacaaagatgtttgttgacccacaaaatgcaagcacaa

SEQ ID NO: 7487 - DNA, 1042 bp, Glycine max
  Gm_smallRNAprecursor_320
tcaaccttaccacaaccatatccactgtgtagcctttgtctcttcgtccaaatatcttgaccaaacatgagccataagaatgtcatcctcgttaagtccaatcattgattccttgatacctaagtagatacctaatgacatatgggcccaatttctcatattagtccatttgcgtgtagccacaaatataacacgtcttaccctacctgatggaagcttgcttgagaaacttctatagaggctgaatctttgagcttcaataaggtccctcaatggtgattttcagtcatggagttgcagcggaagataaaggagaatagatgagaggaggcaccatccactaaagaataagccatggaaggagaagtttcaccaccaaaagagtgccttagataagaagcttagagaggaagcttcaatggaggaagagaatgagagagaggggggcatgggaattcaaggagattagggaaaaaagttgaactttgaagtatgtcgcacaagtaggggtgggaataggtcaggccaggctttgaaaggcctgagcctagcctacgatgaatctttgagatctgagcctggcctatagcctatcaaaggcttttattttggcttggcctggcctaatagtctttttaaaagccttcttcacaataaatatttaatattttatggagtaggaacgtaataggaaagttaaagaaaaaggaaagtcaatcaaaataatgaggaatataaaagggcacatgactcacacctaaattgtaactaaagtccttgattataggaatagaagttatggagtagtaatgtgtaatcaaagtctgatagtttcaaaacaaaattaattgtatccaaaaaaataatattatatattggtacccaaaaaattatatatatatatatatatatatatatatatatatatatatatatgccgacctatcaggcttataaggctttttaataagcctaagcctaatctatttaatttaataggcttttaaaaaaacctgagcctaccattttaattaaataggcc

SEQ ID NO: 7488 - DNA, 1143 bp, Glycine max
  Gm_smallRNAprecursor_321
ccatccaaatatctaatgaaggaataactacaagttatttaggaaggaaaattatatttaatttttctactaaaccaatctccagaaatataaattttatagaaaataagattaatcaaattaacttcttaaaagaataagtatcatttaataatatccaaatacaactaggaaaaccccaaataaaggagaaaatccaatctttattaagtcatatagaatcaactgtttgttctgaattgccacatgcattttggggcagaaagaaacatattgttgatcttccttatgagaaagattttagggaaaaacaaattcccacaaaagctagaccaatccaaatgaatgaagaactccttcaatattgccaaaaagaaattaaagatttacttgataaaggtttaattcggaaaagtaaaagtccatggtattgtgcggttttttacgtcaacaaacaatccgagattgagcgaggaacaccccgcttagtcataaattacaaaccgttaaatcaagcattacaatggatcaggtatcctattccaaataaaaaagacctacttaacagattaaattctgcaaaggtattttcaaaatttgacatgaaatccggattctggcaaatccaaatccaagaatcagataggtacaaaacggcgtttactgtacctttcgggcaatatgagtggaatgtaatgccatttggactgaagaatgccccttcagaattccaaaaaatcatgaatgatattttcaatccttattcaaaattcgtcattgtttacattgatgatgttttaatcttctcccaagatattgatcaacatttcaaacacctccagacttttatccatatcattaaacagaatggtttggcagtctccaaatcaaagatcaatcttttccagacacggatacgattccttgggcacaatatataccaaggcacaatcatcccaatagaaagatcaatagagtttgccagcaaattccctaaccaaatcttagacaagacccagttacaacgatttctggggtgcctaaattatgtaggagaatttgtcccctatctaaacaatattgtcaaaccattacatgataggctgaaaaagaatccgcctccttggtctgacctccatactc

SEQ ID NO: 7489 - DNA, 1037 bp, Glycine max
  Gm_smallRNAprecursor_322
agatattgatcaacatttcaaacacctccagacttttatccatatcattaaacagaatggtttggcagtctccaaatcaaagatcaatcttttccagacacggatacgattccttgggcacaatatataccaaggcacaatcatcccaatagaaagatcaatagagtttgccagcaaattccctaaccaaatcttagacaagacccagttacaacgatttctggggtgcctaaattatgtaggagaatttgtcccctatctaaacaatattgtcaaaccattacatgataggctgaaaaagaatccgcctccttggtctgacctccatactcaaacagtcaaagaaatcaaagtcaaagtccaatccataaaatgtctgtatattcccattccacaggcattcaaaattgtcgaaactgatgcatcagacatcggttacggtggtatcctcaaacaacaaatacatggtcaggaacatgtcattgcatatacttcaaaacattggaatcctgcacaattaaaatattcaactgttaaaaaggaagttttagcaattgttttgtgcatttccaaatttcaatctgatttattgaatcaaaatttttagtaaaggttgactgcaaatcagccaaagacattttataaaaggatgtaaaaaaccttgcctcaaaacaaatttttgcaggatggcaagaaattttaagcgtctttgattttaacatagaaaatatcaagggctcttcaaactctctacctgactacctcacccgtgaatttttacagaaaattcccgatgcctcctaaggtgtctagctcctctggcagaggaggaaaatccgatactaaaggaaaagatgttatattggctctaccagagccaataaccaagaaggcaactacatcatcatcttctgggtcacctactcagattgggtcatcaacccagaaaggaaagcttgaagggtcattgacccatataactaccgttaaacctgagtcatcaactcaggaatccccaaaaccaacaacaacaaaac

SEQ ID NO: 7490 - DNA, 1033 bp, Glycine max
  Gm_smallRNAprecursor_323
caaggcaaccgccaaagtattccccccgggattccattataggccaacagccacaaataaaaccagaaaattctaagaattcattctaatagatacaaactcagtatctattaaacactttaaagaccccaaagatccaaatctaaatacccattccacaatccaaatcctcaaagttatgcagccacgacattatggctcaaacttaaaccaacccaaaaaaatttctgcagcttttgatcttgcaggatataattattgggactacattgacgcctggaccaatgtgttctggcatcaaaatagtaaatttaagaattcatggctaatttacttcaagaataacactgtgtataattttccaaattggttcctccaatggtggaactacttcggaccaattccgcagatatttccagaagaagtccaacagggattccaacaattcagcaagctcttcaatagcaaggaatcaagaattctggcagatttaaagtacttttccagttttgccttgtcatggatcttttcatggcaatacagatatggaaaaaccgaaaacagcaaacagtatccaccattgcagagacatgcctttgtaaagtggtggtcacaattcgatacctcaaaggctgctccagaacaagtcaagaactggtttcagagcaaccctgagtttctcaagcctactgatccagagacatctttgtttctgaatcaaaagtcacaacttgcagcattcttagcaagctcaaaatctaaagagagtcttgctcagaatcttaaggaagttctccaactacttcaacaggaagaagaagaagaatcccccaagaaggaagccgaatcatccgagaataatgatgaccaagaagatgatccattctaccagaatgaggatgactcttttggtatatcgttagacgatgattagttagttgtaataatcatgaattattaactaatttttcggttcccgctaataatgtaatttgtaaaagcttttgtaacagttctgataaacattaccgac

SEQ ID NO: 7491 - DNA, 1031 bp, Glycine max
  Gm_smallRNAprecursor_324
aaggcaaccgccaaagtattccccccgggattccattataggccaacagccacaaataaaaccagaaaattctaagaattcattctaatagatacaaactcagtatctattaaacactttaaagaccccaaagatccaaatctaaatacccattccacaatccaaatcctcaaagttatgcagccacgacattatggctcaaacttaaaccaacccaaaaaaatttctgcagcttttgatcttgcaggatataattattgggactacattgacgcctggaccaatgtgttctggcatcaaaatagtaaatttaagaattcatggctaatttacttcaagaataacactgtgtataattttccaaattggttcctccaatggtggaactacttcggaccaattccgcagatatttccagaagaagtccaacagggattccaacaattcagcaagctcttcaatagcaaggaatcaagaattctggcagatttaaagtacttttccagttttgccttgtcatggatcttttcatggcaatacagatatggaaaaaccgaaaacagcaaacagtatccaccattgcagagacatgcctttgtaaagtggtggtcacaattcgatacctcaaaggctgctccagaacaagtcaagaactggtttcagagcaaccctgagtttctcaagcctactgatccagagacatctttgtttctgaatcaaaagtcacaacttgcagcattcttagcaagctcaaaatctaaagagagtcttgctcagaatcttaaggaagttctccaactacttcaacaggaagaagaagaagaatcccccaagaaggaagccgaatcatccgagaataatgatgaccaagaagatgatccattctaccagaatgaggatgactcttttggtatatcgttagacgatgattagttagttgtaataatcatgaattattaactaatttttcggttcccgctaataatgtaatttgtaaaagcttttgtaacagttctgataaacattaccga

SEQ ID NO: 7492 - DNA, 1032 bp, Glycine max
  Gm_smallRNAprecursor_325
aaggcaaccgccaaagtattccccccgggattccattataggccaacagccacaaataaaaccagaaaattctaagaattcattctaatagatacaaactcagtatctattaaacactttaaagaccccaaagatccaaatctaaatacccattccacaatccaaatcctcaaagttatgcagccacgacattatggctcaaacttaaaccaacccaaaaaaatttctgcagcttttgatcttgcaggatataattattgggactacattgacgcctggaccaatgtgttctggcatcaaaatagtaaatttaagaattcatggctaatttacttcaagaataacactgtgtataattttccaaattggttcctccaatggtggaactacttcggaccaattccgcagatatttccagaagaagtccaacagggattccaacaattcagcaagctcttcaatagcaaggaatcaagaattctggcagatttaaagtacttttccagttttgccttgtcatggatcttttcatggcaatacagatatggaaaaaccgaaaacagcaaacagtatccaccattgcagagacatgcctttgtaaagtggtggtcacaattcgatacctcaaaggctgctccagaacaagtcaagaactggtttcagagcaaccctgagtttctcaagcctactgatccagagacatctttgtttctgaatcaaaagtcacaacttgcagcattcttagcaagctcaaaatctaaagagagtcttgctcagaatcttaaggaagttctccaactacttcaacaggaagaagaagaagaatcccccaagaaggaagccgaatcatccgagaataatgatgaccaagaagatgatccattctaccagaatgaggatgactcttttggtatatcgttagacgatgattagttagttgtaataatcatgaattattaactaatttttcggttcccgctaataatgtaatttgtaaaagcttttgtaacagttctgataaacattaccgac

SEQ ID NO: 7493 - DNA, 1036 bp, Glycine max
  Gm_smallRNAprecursor_326
agaccacaagaagatgaaattagaggtagtgtggttaaattaagttggctgactcaccattttgcccaaataaataatgacgacgacgaagaacaagtacgaaagtttgcccgtgcatggatactgagattcattggaggtgtcttgttcgttgacaaaagcagtaacaaagtttcgctaaggtaccttcaatttttacgtgactttgaagaatgtggcagatatgcatggggagctgccgtacttggttttctatacagagagatgtgcaatgccaccgattataaaactaaatcaatcagaggtatgtgtatcttactacaaatgtgggcatgggaacgatgtccaaccttggctccaaagaggactccttcccaagtagaaaatacaccattggggcacaggttagtcatttttaacagcgtctttcatttcaatagaataaatggttttagcatatattaaattttaatctttgtaggtggctgcgacgtggaaaccaacatatcggcaatgatgatgtgagaatttttcgtcgcaagttggatattatgaaacgtcatgaggtaagaacatgctattgtatttgtaaaataaaaaattatatgtgttatttttctaaaatgttcacaactgatgaggacatgttcaagagcaagggcaaggatccacttgaaggacttggaggacctatgacaagggctagagcaaggaaagccaaggaagctcttcaacaagtgctgtccatactatttgaatacaagcccaagtttcaaggagaaaagtccaaggttgtgagttgtatcatggcccaaatggaggaggactaaatgacaccactttgtctcaattttagagtgtttagtttgtctaaataatggcccaatccttgtaaagttggctgaccaaaaatatgtttttggttaatcaactaaaagggctttagttaggtttagttcaagttgtaataagggcccaattggcaacctaggcatcagccttttgggagaccaaatggtggctgacttgttggctg

SEQ ID NO: 7494 - DNA, 1158 bp, Glycine max
  Gm_smallRNAprecursor_327
aataatgtataaattgatttgtgaatttattgtattatattttattttgcagtagaaatgacatcttcatcatcatcttcatcacatattaacattaagtctggccccatcgatgctgatgtattatggatgcaacctaagcatgtttggaatggggaagaagatcggaaattacatatcagacgagttgtccccacgcatcaaggggaagaacaaattccagagcaaaattttccttttcttcaacaatctggtttcggctggattatcaagatgggatacttaaaaataaatgcctcattaattagtgctctgatagaaagatggaggccggaaacacatacgtttcacatgagatgcggagagtgtactattactctccaagacatctttgtattgttaggtataagtgtggatggtttactattaatcggtccaacaaatcttgattgggctgatttatgtgaggaattattgggagtcagaccacaagaagctgaaattaaaggtagtgtggttaaattaagttggctggctcaccattttgcataaataaataacgacgacgacgaagaacaagtacgaaggtttgcccgtgcatggatactgagattcattggaggtgtcttgttcgttgacaaaagcagtaacaaagtttcgctaaggtaccttcaatttttacgtgactttgaagaatgtggcacatatgcatggggagctgccgtacttggttttctatacagagagatgtgcagtgccaccaattaaaaactaaatcaatcggaggtatgtgcatcttactacaaatgtgggcatgggaacgatgtgcaaccttggctccaaagaggactccttcccaagtagaaaatacaccactagggcacaagttagtaatttttaacagcgtctttcatttcaataaaataaatggttttagacatgtgttaaattttaatctttgtaggtggctgcgacgtggaaaccaacatatcggcaatgatgatgtaagagtttttcgtcgcaagttggatattatgaaacgtcatgaggtaagaacatgctattgtatttaaaataaaaaattatgtgttattttactaaaatgttcacaactatgttgttatatgcagtttgtgtgggagccttacacatcaaccg

SEQ ID NO: 7495 - DNA, 1155 bp, Glycine max
  Gm_smallRNAprecursor_328
taatgtataaattgatttgtgaatttattgtattatattttattttgcagtagaaatgacatcttcatcatcatcttcatcacatattaacattaagtctggccccatcgatgctgatgtattatggatgcaacctaagcatgtttggaatggggaagaagatcggaaattacatatcagacgagttgtccccacgcatcaaggggaagaacaaattccagagcaaaattttccttttcttcaacaatctggtttcggctggattatcaagatgggatacttaaaaataaatgcctcattaattagtgctctgatagaaagatggaggccggaaacacatacgtttcacatgagatgcggagagtgtactattactctccaagacatctttgtattgttaggtataagtgtggatggtttactattaatcggtccaacaaatcttgattgggctgatttatgtgaggaattattgggagtcagaccacaagaagctgaaattaaaggtagtgtggttaaattaagttggctggctcaccattttgcataaataaataacgacgacgacgaagaacaagtacgaaggtttgcccgtgcatggatactgagattcattggaggtgtcttgttcgttgacaaaagcagtaacaaagtttcgctaaggtaccttcaatttttacgtgactttgaagaatgtggcacatatgcatggggagctgccgtacttggttttctatacagagagatgtgcagtgccaccaattaaaaactaaatcaatcggaggtatgtgcatcttactacaaatgtgggcatgggaacgatgtgcaaccttggctccaaagaggactccttcccaagtagaaaatacaccactagggcacaagttagtaatttttaacagcgtctttcatttcaataaaataaatggttttagacatgtgttaaattttaatctttgtaggtggctgcgacgtggaaaccaacatatcggcaatgatgatgtaagagtttttcgtcgcaagttggatattatgaaacgtcatgaggtaagaacatgctattgtatttaaaataaaaaattatgtgttattttactaaaatgttcacaactatgttgttatatgcagtttgtgtgggagccttacacatcaacc

SEQ ID NO: 7496 - DNA, 1036 bp, Glycine max
  Gm_smallRNAprecursor_329
agaccacaagaagctgaaattaaaggtagtgtggttaaattaagttggctggctcaccattttgcataaataaataacgacgacgacgaagaacaagtacgaaggtttgcccgtgcatggatactgagattcattggaggtgtcttgttcgttgacaaaagcagtaacaaagtttcgctaaggtaccttcaatttttacgtgactttgaagaatgtggcacatatgcatggggagctgccgtacttggttttctatacagagagatgtgcagtgccaccaattaaaaactaaatcaatcggaggtatgtgcatcttactacaaatgtgggcatgggaacgatgtgcaaccttggctccaaagaggactccttcccaagtagaaaatacaccactagggcacaagttagtaatttttaacagcgtctttcatttcaataaaataaatggttttagacatgtgttaaattttaatctttgtaggtggctgcgacgtggaaaccaacatatcggcaatgatgatgtaagagtttttcgtcgcaagttggatattatgaaacgtcatgaggtaagaacatgctattgtatttaaaataaaaaattatgtgttattttactaaaatgttcacaactatgttgttatatgcagtttgtgtgggagccttacacatcaaccgttatatcattgttgcctcctgtttgtttagtcggaagtctcgcgtggtacacggtggtgccactaatttgtttccaagttattgagtggcaccaaccggacagagtattgagacaatttgggatgcagcaaccagttccagagtctcctccataacccttaaacattcatggcataacattaaaagggaagcatgaagaaaattgggggcaattgttcaccccaatgattcatcagtggaataattgccatgcatttagggtcgatggttatccccgacaagaagacctattgagctttaactcggactacatggtctggtataggcgaaagacaaagatgtttgttgacccacaaaatgc

SEQ ID NO: 7497 - DNA, 1133 bp, Glycine max
  Gm_smallRNAprecursor_330
aaaaaaaactggacctttttggatgctaaaatcctgcctcagtttgcatgccgcctctctggttccagttcctcgcatttctctgcacccgtcagggcccgttttcgaagataggcaatatatctgggtttgtaagccgtttcggtgtgcccttgatatctgctttacaagtttatattttcctttcttttatcatactgcattcttacttcctatctgtccgtttgatcttattccgctgatctctggtatcagagcctgatggggaagtaggaatactatccgtaaggacatatgttaacaaattttatgatcagaaacaaaagccttgtatagtacaagtaatattttactttgatttgtacagtaaatgtttgaacagtacttcctggaagtatagcagtataatattttagttgaatggtactgtagcagtaagacccgtgatggataaagggcggtaaggctaaggtgtactgtttaaccaaaatatcaagacataatatactggtggctataggattgccgttcaaactattttttttaaaaaaaagagtttttcttaaaaataattcagatccagaaaaattttgtgacatatttacttacggagatatttctatggaaccaaatgagggcaaagatattagagaatgttataatcatgtctagactattgcaatctttttcccgtatctcttttcgatcaaattcctcctcatcatcttcttcaagaaactccaatttattaaacgatcaagataaccagacccaagaggtcgcccctaaacacaatctcttcgatgaggaagtccgattcgaagatattaaccaaaacatggatgactggaacatcctagaaatccctcaggatcaactatacgttcctgagacaattaaagataaacacaactttgactacataatcaaaatagtagaaaacaatattcctctagggcaagatataggggaagaattccatctactttcaaaaaattcaattcatgaacatagtcgaaagtataaatatttacacatcggttgtgtagaagtagccatcaagcccttaatagacataggcatcgatgcaacagtattgatgtgtctaagagatattaggcataataaatttg

SEQ ID NO: 7498 - DNA, 1150 bp, Glycine max
  Gm_smallRNAprecursor_331
aaaccttcctcaaaacaaatttttgcaagatggcaagcaattttaagcgtctttgattttaatatagaatatatcaagggctcttccaactttctacctgactacctcacccgtgaatttttacagaaaattcccaatgcctcctaaggtgtctagttcctccggcagaggagggagatccagtacaaaaggaaaagaggttctattggctctaccagagccaataacaaaaaaggcaactacatcatcttctgggtcacctacctagactaggtcatcaacccagaaaggaaagcttgaagggtcattgacccagataactaccgtcaaacctgagtcatcaactcaggaatccccaaaaccaacaacaaccaaacagaccgtggctgactgtgcctggtcaatacaaactttctcggccttagaagatataggcctcaccaaagtaccaaaattggccaaaaagacctgggcagaaatggcctcagaatcaaacgatgattctgaaacagatctgcaaaaacaaatccaaaaggccaaacagaccaaaactgtctgtaaccaaaaaccaagccaatcgttgactcaacaagaatcaacaccacaacccaacaacagttatatttcaaaaaacaaatttttcaatgttttacaaatggaaccagaatactgggacaagaatcctttcaaagcaaccgccaaagtattccccccgggattccattacaggccaacagccacaaacaaaacccgcaaattctacgaattcattctaatagatacaaactcagtatctattaaacacttcaaagaccccaaagatccaaatctaaatacccattccacaatccaaatcctaaaggttatgcagccacgacattatggttcaaacttaaaccaacccaaaaaattttctgcaccatttgaccctgcaggatataattattgggattacattgacgcctggaccaatgtgttctggcatcaaaatagtaaattcaagcattcatggctaatttacttcaaaaataacactgtgtataattttccaaattggttcctccaatggtggaactacttcggaccaattccacagatattcccagaagaagtccaacagggattccaacaattcaacaagctctacaat

SEQ ID NO: 7499 - DNA, 1148 bp, Glycine max
  Gm_smallRNAprecursor_332
aaccttcctcaaaacaaatttttgcaagatggcaagcaattttaagcgtctttgattttaatatagaatatatcaagggctcttccaactttctacctgactacctcacccgtgaatttttacagaaaattcccaatgcctcctaaggtgtctagttcctccggcagaggagggagatccagtacaaaaggaaaagaggttctattggctctaccagagccaataacaaaaaaggcaactacatcatcttctgggtcacctacctagactaggtcatcaacccagaaaggaaagcttgaagggtcattgacccagataactaccgtcaaacctgagtcatcaactcaggaatccccaaaaccaacaacaaccaaacagaccgtggctgactgtgcctggtcaatacaaactttctcggccttagaagatataggcctcaccaaagtaccaaaattggccaaaaagacctgggcagaaatggcctcagaatcaaacgatgattctgaaacagatctgcaaaaacaaatccaaaaggccaaacagaccaaaactgtctgtaaccaaaaaccaagccaatcgttgactcaacaagaatcaacaccacaacccaacaacagttatatttcaaaaaacaaatttttcaatgttttacaaatggaaccagaatactgggacaagaatcctttcaaagcaaccgccaaagtattccccccgggattccattacaggccaacagccacaaacaaaacccgcaaattctacgaattcattctaatagatacaaactcagtatctattaaacacttcaaagaccccaaagatccaaatctaaatacccattccacaatccaaatcctaaaggttatgcagccacgacattatggttcaaacttaaaccaacccaaaaaattttctgcaccatttgaccctgcaggatataattattgggattacattgacgcctggaccaatgtgttctggcatcaaaatagtaaattcaagcattcatggctaatttacttcaaaaataacactgtgtataattttccaaattggttcctccaatggtggaactacttcggaccaattccacagatattcccagaagaagtccaacagggattccaacaattcaacaagctctacaa

SEQ ID NO: 7500 - DNA, 1149 bp, Glycine max
  Gm_smallRNAprecursor_333
aaccttcctcaaaacaaatttttgcaagatggcaagcaattttaagcgtctttgattttaatatagaatatatcaagggctcttccaactttctacctgactacctcacccgtgaatttttacagaaaattcccaatgcctcctaaggtgtctagttcctccggcagaggagggagatccagtacaaaaggaaaagaggttctattggctctaccagagccaataacaaaaaaggcaactacatcatcttctgggtcacctacctagactaggtcatcaacccagaaaggaaagcttgaagggtcattgacccagataactaccgtcaaacctgagtcatcaactcaggaatccccaaaaccaacaacaaccaaacagaccgtggctgactgtgcctggtcaatacaaactttctcggccttagaagatataggcctcaccaaagtaccaaaattggccaaaaagacctgggcagaaatggcctcagaatcaaacgatgattctgaaacagatctgcaaaaacaaatccaaaaggccaaacagaccaaaactgtctgtaaccaaaaaccaagccaatcgttgactcaacaagaatcaacaccacaacccaacaacagttatatttcaaaaaacaaatttttcaatgttttacaaatggaaccagaatactgggacaagaatcctttcaaagcaaccgccaaagtattccccccgggattccattacaggccaacagccacaaacaaaacccgcaaattctacgaattcattctaatagatacaaactcagtatctattaaacacttcaaagaccccaaagatccaaatctaaatacccattccacaatccaaatcctaaaggttatgcagccacgacattatggttcaaacttaaaccaacccaaaaaattttctgcaccatttgaccctgcaggatataattattgggattacattgacgcctggaccaatgtgttctggcatcaaaatagtaaattcaagcattcatggctaatttacttcaaaaataacactgtgtataattttccaaattggttcctccaatggtggaactacttcggaccaattccacagatattcccagaagaagtccaacagggattccaacaattcaacaagctctacaat

SEQ ID NO: 7501 - DNA, 1073 bp, Glycine max
  Gm_smallRNAprecursor_334
tgtctagttcctccggcagaggagggagatccagtacaaaaggaaaagaggttctattggctctaccagagccaataacaaaaaaggcaactacatcatcttctgggtcacctacctagactaggtcatcaacccagaaaggaaagcttgaagggtcattgacccagataactaccgtcaaacctgagtcatcaactcaggaatccccaaaaccaacaacaaccaaacagaccgtggctgactgtgcctggtcaatacaaactttctcggccttagaagatataggcctcaccaaagtaccaaaattggccaaaaagacctgggcagaaatggcctcagaatcaaacgatgattctgaaacagatctgcaaaaacaaatccaaaaggccaaacagaccaaaactgtctgtaaccaaaaaccaagccaatcgttgactcaacaagaatcaacaccacaacccaacaacagttatatttcaaaaaacaaatttttcaatgttttacaaatggaaccagaatactgggacaagaatcctttcaaagcaaccgccaaagtattccccccgggattccattacaggccaacagccacaaacaaaacccgcaaattctacgaattcattctaatagatacaaactcagtatctattaaacacttcaaagaccccaaagatccaaatctaaatacccattccacaatccaaatcctaaaggttatgcagccacgacattatggttcaaacttaaaccaacccaaaaaattttctgcaccatttgaccctgcaggatataattattgggattacattgacgcctggaccaatgtgttctggcatcaaaatagtaaattcaagcattcatggctaatttacttcaaaaataacactgtgtataattttccaaattggttcctccaatggtggaactacttcggaccaattccacagatattcccagaagaagtccaacagggattccaacaattcaacaagctctacaatagcaaggaatcacgaattccggcagatttaaagtacttttccagtttttctttgtcatggattttttcatgg

SEQ ID NO: 7502 - DNA, 1182 bp, Glycine max
  Gm_smallRNAprecursor_335
aagatataggcctcaccaaagtaccaaaattggccaaaaagacctgggcagaaatggcctcagaatcaaacgatgattctgaaacagatctgcaaaaacaaatccaaaaggccaaacagaccaaaactgtctgtaaccaaaaaccaagccaatcgttgactcaacaagaatcaacaccacaacccaacaacagttatatttcaaaaaacaaatttttcaatgttttacaaatggaaccagaatactgggacaagaatcctttcaaagcaaccgccaaagtattccccccgggattccattacaggccaacagccacaaacaaaacccgcaaattctacgaattcattctaatagatacaaactcagtatctattaaacacttcaaagaccccaaagatccaaatctaaatacccattccacaatccaaatcctaaaggttatgcagccacgacattatggttcaaacttaaaccaacccaaaaaattttctgcaccatttgaccctgcaggatataattattgggattacattgacgcctggaccaatgtgttctggcatcaaaatagtaaattcaagcattcatggctaatttacttcaaaaataacactgtgtataattttccaaattggttcctccaatggtggaactacttcggaccaattccacagatattcccagaagaagtccaacagggattccaacaattcaacaagctctacaatagcaaggaatcacgaattccggcagatttaaagtacttttccagtttttctttgtcatggattttttcatggcaatacagatacgaaaaaaccgaaaacagcaaacagtatccaccattgcagagacacgcctttgtaaaatggtggtcacaattcgatacctcaaaggctgctccagaacaagtcaagaactggttccagagcaatcctgagttcctcaaacctgctgatccggagacatctttgtttctgaatcaaaagtcgcaacttgcagcattcttagcaagctcaaaatctaaagagagtcttgcttagaatcttaaagaagttctccaactacttcaacaggaagtggaagaagaacctcccaagaaggaagtcgaatcatctgagactaatgatgactaagaagatgatccattctaccagaatgaggatgactgttttggtatatcgt

SEQ ID NO: 7503 - DNA, 1223 bp, Glycine max
  Gm_smallRNAprecursor_336
acccaacaacagttatatttcaaaaaacaaatttttcaatgttttacaaatggaaccagaatactgggacaagaatcctttcaaagcaaccgccaaagtattccccccgggattccattacaggccaacagccacaaacaaaacccgcaaattctacgaattcattctaatagatacaaactcagtatctattaaacacttcaaagaccccaaagatccaaatctaaatacccattccacaatccaaatcctaaaggttatgcagccacgacattatggttcaaacttaaaccaacccaaaaaattttctgcaccatttgaccctgcaggatataattattgggattacattgacgcctggaccaatgtgttctggcatcaaaatagtaaattcaagcattcatggctaatttacttcaaaaataacactgtgtataattttccaaattggttcctccaatggtggaactacttcggaccaattccacagatattcccagaagaagtccaacagggattccaacaattcaacaagctctacaatagcaaggaatcacgaattccggcagatttaaagtacttttccagtttttctttgtcatggattttttcatggcaatacagatacgaaaaaaccgaaaacagcaaacagtatccaccattgcagagacacgcctttgtaaaatggtggtcacaattcgatacctcaaaggctgctccagaacaagtcaagaactggttccagagcaatcctgagttcctcaaacctgctgatccggagacatctttgtttctgaatcaaaagtcgcaacttgcagcattcttagcaagctcaaaatctaaagagagtcttgcttagaatcttaaagaagttctccaactacttcaacaggaagtggaagaagaacctcccaagaaggaagtcgaatcatctgagactaatgatgactaagaagatgatccattctaccagaatgaggatgactgttttggtatatcgttagacgacgattaattagttgtagtaatcatgaattattgtaactaatttgtcggtacctcttaataatgtaatttgtaaaagttttgtaacagttccggtaaatattatcgacactgtagaaacagtgaaaattgagtctatttaaaggagtcctcgttccctttgtgaggcaccctttcagatagtctcaaaaccaggatttagagagagaagctctgcc

SEQ ID NO: 7504 - DNA, 1145 bp, Glycine max
  Gm_smallRNAprecursor_337
tctaaatacccattccacaatccaaatcctaaaggttatgcagccacgacattatggttcaaacttaaaccaacccaaaaaattttctgcaccatttgaccctgcaggatataattattgggattacattgacgcctggaccaatgtgttctggcatcaaaatagtaaattcaagcattcatggctaatttacttcaaaaataacactgtgtataattttccaaattggttcctccaatggtggaactacttcggaccaattccacagatattcccagaagaagtccaacagggattccaacaattcaacaagctctacaatagcaaggaatcacgaattccggcagatttaaagtacttttccagtttttctttgtcatggattttttcatggcaatacagatacgaaaaaaccgaaaacagcaaacagtatccaccattgcagagacacgcctttgtaaaatggtggtcacaattcgatacctcaaaggctgctccagaacaagtcaagaactggttccagagcaatcctgagttcctcaaacctgctgatccggagacatctttgtttctgaatcaaaagtcgcaacttgcagcattcttagcaagctcaaaatctaaagagagtcttgcttagaatcttaaagaagttctccaactacttcaacaggaagtggaagaagaacctcccaagaaggaagtcgaatcatctgagactaatgatgactaagaagatgatccattctaccagaatgaggatgactgttttggtatatcgttagacgacgattaattagttgtagtaatcatgaattattgtaactaatttgtcggtacctcttaataatgtaatttgtaaaagttttgtaacagttccggtaaatattatcgacactgtagaaacagtgaaaattgagtctatttaaaggagtcctcgttccctttgtgaggcaccctttcagatagtctcaaaaccaggatttagagagagaagctctgcctagggaaaaactctttgtaagcttttctttcggtttcaataaatttcaagttctatttttcatatctcccttctccactcaccgatcctgtgcggctctgccgccgctttggtttctttgttttcaaaaacctgggtttgtcag

SEQ ID NO: 7505 - DNA, 1231 bp, Glycine max
  Gm_smallRNAprecursor_338
taaatacccattccacaatccaaatcctaaaggttatgcagccacgacattatggttcaaacttaaaccaacccaaaaaattttctgcaccatttgaccctgcaggatataattattgggattacattgacgcctggaccaatgtgttctggcatcaaaatagtaaattcaagcattcatggctaatttacttcaaaaataacactgtgtataattttccaaattggttcctccaatggtggaactacttcggaccaattccacagatattcccagaagaagtccaacagggattccaacaattcaacaagctctacaatagcaaggaatcacgaattccggcagatttaaagtacttttccagtttttctttgtcatggattttttcatggcaatacagatacgaaaaaaccgaaaacagcaaacagtatccaccattgcagagacacgcctttgtaaaatggtggtcacaattcgatacctcaaaggctgctccagaacaagtcaagaactggttccagagcaatcctgagttcctcaaacctgctgatccggagacatctttgtttctgaatcaaaagtcgcaacttgcagcattcttagcaagctcaaaatctaaagagagtcttgcttagaatcttaaagaagttctccaactacttcaacaggaagtggaagaagaacctcccaagaaggaagtcgaatcatctgagactaatgatgactaagaagatgatccattctaccagaatgaggatgactgttttggtatatcgttagacgacgattaattagttgtagtaatcatgaattattgtaactaatttgtcggtacctcttaataatgtaatttgtaaaagttttgtaacagttccggtaaatattatcgacactgtagaaacagtgaaaattgagtctatttaaaggagtcctcgttccctttgtgaggcaccctttcagatagtctcaaaaccaggatttagagagagaagctctgcctagggaaaaactctttgtaagcttttctttcggtttcaataaatttcaagttctatttttcatatctcccttctccactcaccgatcctgtgcggctctgccgccgctttggtttctttgttttcaaaaacctgggtttgtcagccattccggtgtgcccttgatatctgctttacaagtttataatttcctttcgtttatcatactgcattcttacttcctatctgtccgt

SEQ ID NO: 7506 - DNA, 1168 bp, Glycine max
  Gm_smallRNAprecursor_339
tgtgttctggcatcaaaatagtaaattcaagcattcatggctaatttacttcaaaaataacactgtgtataattttccaaattggttcctccaatggtggaactacttcggaccaattccacagatattcccagaagaagtccaacagggattccaacaattcaacaagctctacaatagcaaggaatcacgaattccggcagatttaaagtacttttccagtttttctttgtcatggattttttcatggcaatacagatacgaaaaaaccgaaaacagcaaacagtatccaccattgcagagacacgcctttgtaaaatggtggtcacaattcgatacctcaaaggctgctccagaacaagtcaagaactggttccagagcaatcctgagttcctcaaacctgctgatccggagacatctttgtttctgaatcaaaagtcgcaacttgcagcattcttagcaagctcaaaatctaaagagagtcttgcttagaatcttaaagaagttctccaactacttcaacaggaagtggaagaagaacctcccaagaaggaagtcgaatcatctgagactaatgatgactaagaagatgatccattctaccagaatgaggatgactgttttggtatatcgttagacgacgattaattagttgtagtaatcatgaattattgtaactaatttgtcggtacctcttaataatgtaatttgtaaaagttttgtaacagttccggtaaatattatcgacactgtagaaacagtgaaaattgagtctatttaaaggagtcctcgttccctttgtgaggcaccctttcagatagtctcaaaaccaggatttagagagagaagctctgcctagggaaaaactctttgtaagcttttctttcggtttcaataaatttcaagttctatttttcatatctcccttctccactcaccgatcctgtgcggctctgccgccgctttggtttctttgttttcaaaaacctgggtttgtcagccattccggtgtgcccttgatatctgctttacaagtttataatttcctttcgtttatcatactgcattcttacttcctatctgtccgtttgatcttattccgctgatctcttatatatatatatatatatatatatatatatatatatatatatatatatatatata

SEQ ID NO: 7507 - DNA, 1080 bp, Glycine max
  Gm_smallRNAprecursor_340
agtaaattcaagcattcatggctaatttacttcaaaaataacactgtgtataattttccaaattggttcctccaatggtggaactacttcggaccaattccacagatattcccagaagaagtccaacagggattccaacaattcaacaagctctacaatagcaaggaatcacgaattccggcagatttaaagtacttttccagtttttctttgtcatggattttttcatggcaatacagatacgaaaaaaccgaaaacagcaaacagtatccaccattgcagagacacgcctttgtaaaatggtggtcacaattcgatacctcaaaggctgctccagaacaagtcaagaactggttccagagcaatcctgagttcctcaaacctgctgatccggagacatctttgtttctgaatcaaaagtcgcaacttgcagcattcttagcaagctcaaaatctaaagagagtcttgcttagaatcttaaagaagttctccaactacttcaacaggaagtggaagaagaacctcccaagaaggaagtcgaatcatctgagactaatgatgactaagaagatgatccattctaccagaatgaggatgactgttttggtatatcgttagacgacgattaattagttgtagtaatcatgaattattgtaactaatttgtcggtacctcttaataatgtaatttgtaaaagttttgtaacagttccggtaaatattatcgacactgtagaaacagtgaaaattgagtctatttaaaggagtcctcgttccctttgtgaggcaccctttcagatagtctcaaaaccaggatttagagagagaagctctgcctagggaaaaactctttgtaagcttttctttcggtttcaataaatttcaagttctatttttcatatctcccttctccactcaccgatcctgtgcggctctgccgccgctttggtttctttgttttcaaaaacctgggtttgtcagccattccggtgtgcccttgatatctgctttacaagtttataatttcctttcgtttatcatactgcattcttacttcctatctgtccgtttgatcttat

SEQ ID NO: 7508 - DNA, 1165 bp, Glycine max
  Gm_smallRNAprecursor_341
accaattccacagatattcccagaagaagtccaacagggattccaacaattcaacaagctctacaatagcaaggaatcacgaattccggcagatttaaagtacttttccagtttttctttgtcatggattttttcatggcaatacagatacgaaaaaaccgaaaacagcaaacagtatccaccattgcagagacacgcctttgtaaaatggtggtcacaattcgatacctcaaaggctgctccagaacaagtcaagaactggttccagagcaatcctgagttcctcaaacctgctgatccggagacatctttgtttctgaatcaaaagtcgcaacttgcagcattcttagcaagctcaaaatctaaagagagtcttgcttagaatcttaaagaagttctccaactacttcaacaggaagtggaagaagaacctcccaagaaggaagtcgaatcatctgagactaatgatgactaagaagatgatccattctaccagaatgaggatgactgttttggtatatcgttagacgacgattaattagttgtagtaatcatgaattattgtaactaatttgtcggtacctcttaataatgtaatttgtaaaagttttgtaacagttccggtaaatattatcgacactgtagaaacagtgaaaattgagtctatttaaaggagtcctcgttccctttgtgaggcaccctttcagatagtctcaaaaccaggatttagagagagaagctctgcctagggaaaaactctttgtaagcttttctttcggtttcaataaatttcaagttctatttttcatatctcccttctccactcaccgatcctgtgcggctctgccgccgctttggtttctttgttttcaaaaacctgggtttgtcagccattccggtgtgcccttgatatctgctttacaagtttataatttcctttcgtttatcatactgcattcttacttcctatctgtccgtttgatcttattccgctgatctcttatatatatatatatatatatatatatatatatatatatatatatatatatatatatatatatatatatatatatatatatatatcaaaacgctcagaatgagaccctgagcgtggtttagaggttggttttgttaaattttaagttgcacgcaaaatgataat

SEQ ID NO: 7509 - DNA, 1036 bp, Glycine max
  Gm_smallRNAprecursor_342
agtccacaagaaggtgaaattaaaggtagtgtggttaaattaagttggctggctcaccattttgcacaaataaataacgacgacgacgaagaataagtacgaaggtttgcccgtgcatggatactgagattcattggagatgtcttgttcgttgacaaaagcagtaaaaaagtttcgctaaggtaccttcaatttttacgtgactttgaagaatatgacacatatgcatggagagctgccgtacttggttttctatacagagagatgtgcagtgccaccgattataaaactaaatcaattggaggtatgtgcaacttactacaaatgtgggcatgggaacgatgtccaaccttggctccaaagaggactcctccccaagtagaaaataaaccactggggcacaggttagtcatttttaaaagcgtgtttcatttcaatagaataaatggttttagggtatattaaattttaatctttgtaggtggctgcaacgtggaaaccaacatatcggcaatgatgatgtgagagtttttcgtcgcaagttggatattatgaaacgtcatgaggtaagaacatggtattgtatttgtaaaataaaaaatgatatgtcttattttactaaaatgttcacaactatgttgttatatgcagtttgtgtgggagccttacacagcaaccgttatatcattgttgcctcccgtttgtttagtcgaaagtctcgcatggtacgtggtggtgccactaatttgttttcaagttattgagtggcaccaaccggacagagtattgagacaatttgggatgcaggaaccaattccagagtctccttcacaacccttaaacattcatggcataacattaaaagggaaacatgacgaaaattgggggcaattgttcgccccaatgattcatcaatggaataatcgccatgcatttagggttgacgcttatccctgacaagaaggcctattgagctttaactcggactacatggtctggtataggcgaaagacaaagatgtttgttgacccacaaa

SEQ ID NO: 7510 - DNA, 1157 bp, Glycine max
  Gm_smallRNAprecursor_343
taagggcatatgttaactgaacttatggatctgaagcatgtacagtaattttaatttaaacagtatgtgtttgaacagtattttctggaagcacagcagtctgatattttagttgaatgatactgtagcagtaagtcccgtggatgagaaagggcagtaaggctaaggtgtattgttcaaataaaatattgagacataatatactggtggctataggagtaatgttcaaactatattgtcggtaattcaaaaaaaaaaaaaaaaatcttctttttcatttattcagatccaagaagttctgtaacatatagccttatggagagattcctatggaaccaaatgaaggcaaagatattagagaatgttttaatcatgtctagattattgcgatccttttcccgtatttcttttcgctcgaattcctcctcttcatcttcttcaagaaacaccaatctcttaaatgatcaagataaccagacccaagaggtcgccccaaaacacaatctcttcgatgaggaagtccgattcgaagatattaatcaaaacatggatgactggaacattccagaaatccctcaggatcaactatacgttcctgaaacaattaaagacaaacacaactttgattacataatcaaaacagtagaaaacaatattcctctaggacaagatataggggaagaatttcatctactttcaaaaaattcaatttatgaacatagccgtaagtataaatatttacacatcggttgtgtacaagtagccatcaagcccttaattgatatgggcatagatgcagcagttttaatgtgtctaagagatattaggcataatcaatttgaagactccctaattggaacagtcgaaaccagcctaggacaaggtccaatatattttaattgttatccaaacaaaatagtgagtctgatggacagaaacattcttgactctctgttcttaaacatccactttcatggccttgacatgaaagaaggatcaatcccagcagccttaatttataggatccagtacaaggtcatgaatacttgtgcatctagagtcctgttaaaacctcaaagaggagaaacaaccttgtttatcactgatatgacaaaggctaacgtgtctctcccaagaaaaataaaatgggatgaagt

SEQ ID NO: 7511 - DNA, 1047 bp, Glycine max
  Gm_smallRNAprecursor_344
ctggtggctataggagtaatgttcaaactatattgtcggtaattcaaaaaaaaaaaaaaaaatcttctttttcatttattcagatccaagaagttctgtaacatatagccttatggagagattcctatggaaccaaatgaaggcaaagatattagagaatgttttaatcatgtctagattattgcgatccttttcccgtatttcttttcgctcgaattcctcctcttcatcttcttcaagaaacaccaatctcttaaatgatcaagataaccagacccaagaggtcgccccaaaacacaatctcttcgatgaggaagtccgattcgaagatattaatcaaaacatggatgactggaacattccagaaatccctcaggatcaactatacgttcctgaaacaattaaagacaaacacaactttgattacataatcaaaacagtagaaaacaatattcctctaggacaagatataggggaagaatttcatctactttcaaaaaattcaatttatgaacatagccgtaagtataaatatttacacatcggttgtgtacaagtagccatcaagcccttaattgatatgggcatagatgcagcagttttaatgtgtctaagagatattaggcataatcaatttgaagactccctaattggaacagtcgaaaccagcctaggacaaggtccaatatattttaattgttatccaaacaaaatagtgagtctgatggacagaaacattcttgactctctgttcttaaacatccactttcatggccttgacatgaaagaaggatcaatcccagcagccttaatttataggatccagtacaaggtcatgaatacttgtgcatctagagtcctgttaaaacctcaaagaggagaaacaaccttgtttatcactgatatgacaaaggctaacgtgtctctcccaagaaaaataaaatgggatgaagtaactcttcccgaaagatgggttatggataaggccacaccgtctattccccgacccgctccaaccatagagcatattaagcaagataactccgg

SEQ ID NO: 7512 - DNA, 1177 bp, Glycine max
  Gm_smallRNAprecursor_345
tagggaacttagaaaaaataaatccttaattgaaggcgtaggtgacaaccatagtgaattactaaacaagattggtagtttacttaaagtcattccagataccccccaagcctcggaaaatacttccaaaatggtaacaagaagtacctccaaattaatcaatgttattaatgaagatagtgaccaaaactcagataacacaactgagataggatcagtgtcagaaaagaatataaatccaattaattccaaacactggaaaacaccctccaaattatattatcaacgtccaactgcccctgaccttctattagaagaaagaggtgaaaacaattttaagagttttagtgcaaacaacatctatgaatggaacatagatgcacaaacggagtataacatcatgaatacactccaacatatgaccatggtggctacggcttaccaaacctcccatgaatgttcagaagagaccattatagatatcttagtggcaggattttctggacaattaaaaggatggtgggataattatctcactaacgaagagaaatcaaaaatttacagcgcagttaagacggatctcaatggaaaagtcattactaatgacgatgataaagagattcctgacgctgttaacacattaatttttacaatagcccaacatttcattggagacccatccttgtggaaagataggtctgcagaattattgtcaaatcttaagtgtagaaccttagcggattttaggtggtatagagatactttcctaactagggtttacacaagagaagatagtcaacaacctttttggaaagaaaaatttctagctggtcttcccagatcattaggagacaaggttagagataaaatccgtagtcaatctgccaatggagatattccatatgaaagtttaagctatggtcaattaatttcttacgtccaaaaggtagccttaaaaatttgtcaggatgacaaaattcagaggcaattagccaaagaaaaggctcaaacaaagagagatttaggttctttctgcgaacaatttggtctaccggcctgtccaaaacaaaagaaaaaacaatcctctaaaaaagaaatccatgagaataaaccggtcaacacaaagagatttccaaggaggagatactcacacaaaccatcaaccagtatagaaatg

SEQ ID NO: 7513 - DNA, 1126 bp, Glycine max
  Gm_smallRNAprecursor_346
aagattaacacaaactttcttctggtaaaaaaccttaagaataaagtaatcttaggaacgcccttcattagagccctgtttcccatccaaatatctaatgaaggaataaccacaaatcatttaggaagaaaaattacatttaatttttctactaaaccaatttccagaaatataaatcttatagaaaataagattaatcaaattaacttcttaaaagaagaagtatcttttaataatattcagatacaactgggaaaaccccaagtaaaagaaagaattcaatctttattaaatcatattgaatcgaccgtttgttctgaattgccacatgcattttgggacagaaagaaacatattgtcgatctcccttatgagaaagactttagggaaaaacaaattcccacaaaagccagaccaatccaaatgaatgaagaacttcttcaatactgtcaaaaggaaatcaaggatttgcttgataaaggcctaatccggaaaagcaaaagcccatggtcttgtgcggctttttatgttaacaaacaatctgagattgagcgtggaacaccccgcttagtcataaattacaaaccattaaatcaagcattacaatggattagatatcctattccaaacaaaaaagatttgcttaacagattaaattctgcaaagatattttcaaaatttgatatgaaatctggattttggcaaatccaaatccaagaatcagataggtacaaaatagcgtttactgtacctttcgggcaatatgaatggaacgtgatgccattcggactgaagaatgccccttcagaatttcaaaaaattatgaatgatatttttaatccctattcaaaatttgtcattgtctacatagatgacgttttaatcttttctcaaaacattgaccaacatttcaaacatctccaaaccttcatacatatcatcaaacaaaatggtttggcagtctccaaatcaaaaatcaatcttttccaaactcgaattcgtttccttggtcacaatatatatcaaggtacaatcattccaatcgaaaggtcaatagagtttgctagcaaattccccaaccaaatcttagacaaaacccagttacaaagatttctaggttgtctaa

SEQ ID NO: 7514 - DNA, 1063 bp, Glycine max
  Gm_smallRNAprecursor_347
gtttcccatccaaatatctaatgaaggaataaccacaaatcatttaggaagaaaaattacatttaatttttctactaaaccaatttccagaaatataaatcttatagaaaataagattaatcaaattaacttcttaaaagaagaagtatcttttaataatattcagatacaactgggaaaaccccaagtaaaagaaagaattcaatctttattaaatcatattgaatcgaccgtttgttctgaattgccacatgcattttgggacagaaagaaacatattgtcgatctcccttatgagaaagactttagggaaaaacaaattcccacaaaagccagaccaatccaaatgaatgaagaacttcttcaatactgtcaaaaggaaatcaaggatttgcttgataaaggcctaatccggaaaagcaaaagcccatggtcttgtgcggctttttatgttaacaaacaatctgagattgagcgtggaacaccccgcttagtcataaattacaaaccattaaatcaagcattacaatggattagatatcctattccaaacaaaaaagatttgcttaacagattaaattctgcaaagatattttcaaaatttgatatgaaatctggattttggcaaatccaaatccaagaatcagataggtacaaaatagcgtttactgtacctttcgggcaatatgaatggaacgtgatgccattcggactgaagaatgccccttcagaatttcaaaaaattatgaatgatatttttaatccctattcaaaatttgtcattgtctacatagatgacgttttaatcttttctcaaaacattgaccaacatttcaaacatctccaaaccttcatacatatcatcaaacaaaatggtttggcagtctccaaatcaaaaatcaatcttttccaaactcgaattcgtttccttggtcacaatatatatcaaggtacaatcattccaatcgaaaggtcaatagagtttgctagcaaattccccaaccaaatcttagacaaaacccagttacaaagatttctaggttgtctaaattacgtaggagaa

SEQ ID NO: 7515 - DNA, 1095 bp, Glycine max
  Gm_smallRNAprecursor_348
tgaatggaacgtgatgccattcggactgaagaatgccccttcagaatttcaaaaaattatgaatgatatttttaatccctattcaaaatttgtcattgtctacatagatgacgttttaatcttttctcaaaacattgaccaacatttcaaacatctccaaaccttcatacatatcatcaaacaaaatggtttggcagtctccaaatcaaaaatcaatcttttccaaactcgaattcgtttccttggtcacaatatatatcaaggtacaatcattccaatcgaaaggtcaatagagtttgctagcaaattccccaaccaaatcttagacaaaacccagttacaaagatttctaggttgtctaaattacgtaggagaatttgtcccctatttaaataatattgtcaagccattacatgataggctgaagaaaaatccgcctccttggtctgacctccatacacaaacggttaaagaagtcaaagtcaaagtccaatccattaaatgtctgtatcttcctattccacaggcatttgaaattgttgaaactgatgcttcagacataggttatggtggcatcctcaaacaaagagtccatggccaagatcatgtcattgcatatacatcaaaacattggaatcctgcacaattaaaatattcaactgttaaaaaagaagttttagcaattgttttgtgcatttccaaatttcaatcggatttattaaaccaaaaatttttaatcagggttgattgtaaatcagccaaagatattttacaaaaagatgttaaaaaccttgcctcaaaacaaatttttgcacgatggcaagcaattttaagtgtctttgattttgacatagaatacatcaagggcacctcaaattcactacctgactaccttacccgtgaattcttacagaaaagtggtaatgcctcctaaggcatcgggaatctccctacggggaggaaggagtacaggcaaaggagccaggctggctcttccagaaccaaccatgaagaaatcatctacctcttctgggtcaccaacccaggctgggtcatctacccagaaaaccaatttagaagggtcatcaacccaga

SEQ ID NO: 7516 - DNA, 1095 bp, Glycine max; identical to SEQ ID NO: 7515
  Gm_smallRNAprecursor_349

SEQ ID NO: 7517 - DNA, 1095 bp, Glycine max; identical to SEQ ID NO: 7515
  Gm_smallRNAprecursor_350

SEQ ID NO: 7518 - DNA, 1095 bp, Glycine max; identical to SEQ ID NO: 7515
  Gm_smallRNAprecursor_351

SEQ ID NO: 7519 - DNA, 1035 bp, Glycine max
  Gm_smallRNAprecursor_352
attgtctacatagatgacgttttaatcttttctcaaaacattgaccaacatttcaaacatctccaaaccttcatacatatcatcaaacaaaatggtttggcagtctccaaatcaaaaatcaatcttttccaaactcgaattcgtttccttggtcacaatatatatcaaggtacaatcattccaatcgaaaggtcaatagagtttgctagcaaattccccaaccaaatcttagacaaaacccagttacaaagatttctaggttgtctaaattacgtaggagaatttgtcccctatttaaataatattgtcaagccattacatgataggctgaagaaaaatccgcctccttggtctgacctccatacacaaacggttaaagaagtcaaagtcaaagtccaatccattaaatgtctgtatcttcctattccacaggcatttgaaattgttgaaactgatgcttcagacataggttatggtggcatcctcaaacaaagagtccatggccaagatcatgtcattgcatatacatcaaaacattggaatcctgcacaattaaaatattcaactgttaaaaaagaagttttagcaattgttttgtgcatttccaaatttcaatcggatttattaaaccaaaaatttttaatcagggttgattgtaaatcagccaaagatattttacaaaaagatgttaaaaaccttgcctcaaaacaaatttttgcacgatggcaagcaattttaagtgtctttgattttgacatagaatacatcaagggcacctcaaattcactacctgactaccttacccgtgaattcttacagaaaagtggtaatgcctcctaaggcatcgggaatctccctacggggaggaaggagtacaggcaaaggagccaggctggctcttccagaaccaaccatgaagaaatcatctacctcttctgggtcaccaacccaggctgggtcatctacccagaaaaccaatttagaagggtcatcaacccagattgcctcaatcaaacctgagccatccactcagga

SEQ ID NO: 7520 - DNA, 1035 bp, Glycine max; identical to SEQ ID NO: 7519
  Gm_smallRNAprecursor_353

SEQ ID NO: 7521 - DNA, 1113 bp, Glycine max
  Gm_smallRNAprecursor_354
attgtctacatagatgacgttttaatcttttctcaaaacattgaccaacatttcaaacatctccaaaccttcatacatatcatcaaacaaaatggtttggcagtctccaaatcaaaaatcaatcttttccaaactcgaattcgtttccttggtcacaatatatatcaaggtacaatcattccaatcgaaaggtcaatagagtttgctagcaaattccccaaccaaatcttagacaaaacccagttacaaagatttctaggttgtctaaattacgtaggagaatttgtcccctatttaaataatattgtcaagccattacatgataggctgaagaaaaatccgcctccttggtctgacctccatacacaaacggttaaagaagtcaaagtcaaagtccaatccattaaatgtctgtatcttcctattccacaggcatttgaaattgttgaaactgatgcttcagacataggttatggtggcatcctcaaacaaagagtccatggccaagatcatgtcattgcatatacatcaaaacattggaatcctgcacaattaaaatattcaactgttaaaaaagaagttttagcaattgttttgtgcatttccaaatttcaatcggatttattaaaccaaaaatttttaatcagggttgattgtaaatcagccaaagatattttacaaaaagatgttaaaaaccttgcctcaaaacaaatttttgcacgatggcaagcaattttaagtgtctttgattttgacatagaatacatcaagggcacctcaaattcactacctgactaccttacccgtgaattcttacagaaaagtggtaatgcctcctaaggcatcgggaatctccctacggggaggaaggagtacaggcaaaggagccaggctggctcttccagaaccaaccatgaagaaatcatctacctcttctgggtcaccaacccaggctgggtcatctacccagaaaaccaatttagaagggtcatcaacccagattgcctcaatcaaacctgagccatccactcaggaatctcccaaaccggcaaccgccaaacaaacatcggccgactatgcttggccaattgaaacccttcaggcccttcaaga

SEQ ID NO: 7522 - DNA, 1113 bp, Glycine max; identical to SEQ ID NO: 7521
  Gm_smallRNAprecursor_355

SEQ ID NO: 7523 - DNA, 1114 bp, Glycine max
  Gm_smallRNAprecursor_356
attgtctacatagatgacgttttaatcttttctcaaaacattgaccaacatttcaaacatctccaaaccttcatacatatcatcaaacaaaatggtttggcagtctccaaatcaaaaatcaatcttttccaaactcgaattcgtttccttggtcacaatatatatcaaggtacaatcattccaatcgaaaggtcaatagagtttgctagcaaattccccaaccaaatcttagacaaaacccagttacaaagatttctaggttgtctaaattacgtaggagaatttgtcccctatttaaataatattgtcaagccattacatgataggctgaagaaaaatccgcctccttggtctgacctccatacacaaacggttaaagaagtcaaagtcaaagtccaatccattaaatgtctgtatcttcctattccacaggcatttgaaattgttgaaactgatgcttcagacataggttatggtggcatcctcaaacaaagagtccatggccaagatcatgtcattgcatatacatcaaaacattggaatcctgcacaattaaaatattcaactgttaaaaaagaagttttagcaattgttttgtgcatttccaaatttcaatcggatttattaaaccaaaaatttttaatcagggttgattgtaaatcagccaaagatattttacaaaaagatgttaaaaaccttgcctcaaaacaaatttttgcacgatggcaagcaattttaagtgtctttgattttgacatagaatacatcaagggcacctcaaattcactacctgactaccttacccgtgaattcttacagaaaagtggtaatgcctcctaaggcatcgggaatctccctacggggaggaaggagtacaggcaaaggagccaggctggctcttccagaaccaaccatgaagaaatcatctacctcttctgggtcaccaacccaggctgggtcatctacccagaaaaccaatttagaagggtcatcaacccagattgcctcaatcaaacctgagccatccactcaggaatctcccaaaccggcaaccgccaaacaaacatcggccgactatgcttggccaattgaaacccttcaggcccttcaagac

SEQ ID NO: 7524 - DNA, 1114 bp, Glycine max; identical to SEQ ID NO: 7523
  Gm_smallRNAprecursor_357

SEQ ID NO: 7525 - DNA, 1091 bp, Glycine max
  Gm_smallRNAprecursor_358
caattttaagtgtctttgattttgacatagaatacatcaagggcacctcaaattcactacctgactaccttacccgtgaattcttacagaaaagtggtaatgcctcctaaggcatcgggaatctccctacggggaggaaggagtacaggcaaaggagccaggctggctcttccagaaccaaccatgaagaaatcatctacctcttctgggtcaccaacccaggctgggtcatctacccagaaaaccaatttagaagggtcatcaacccagattgcctcaatcaaacctgagccatccactcaggaatctcccaaaccggcaaccgccaaacaaacatcggccgactatgcttggccaattgaaacccttcaggcccttcaagacatgggtctgaccaaatttccaaaaataatcaaaaaatcttgggcagacattgcctcagaatctgatgatgaatctgaatcaaatttacaaacaatgatccaaaatgcgtcaatgaccaaaacagccaccaatactaaaggaaaactaccttcagccaaagaccaaacaccacctaccaaacaaactaacaattatatttataaaaataaattgttaactgttttgcagatggaacctgaattttgggacaaaaatcccttcaaggcgacggccaaggctttcccaccaggctttcactataaaccaaccaccatcctgaagacaagaactttttatgaattgattttggtagattcaaactcagtatctatcaaacatttcaaagatccaaaagaccaaaccttaaacacccactcaaccatccaaatactaaaagttcttcaaccaagacactttggttcggacttgaacaaaggaaagagattttcagttccatttgatccggtaggttatacctattgggattacgttgatgcttggaccaaggtgttttggcaccaaaatacccgcttcaagcattcatggctgatatatttcaagaccaacacaatttacaattttcccaattggttttgcaatggtgggacttctttggaccaatcccagagatattcccagaaacggtccaacaaggattttcccaattt

SEQ ID NO: 7526 - DNA, 1192 bp, Glycine max
  Gm_smallRNAprecursor_359
aaagtggtaatgcctcctaaggcatcgggaatctccctacggggaggaaggagtacaggcaaaggagccaggctggctcttccagaaccaaccatgaagaaatcatctacctcttctgggtcaccaacccaggctgggtcatctacccagaaaaccaatttagaagggtcatcaacccagattgcctcaatcaaacctgagccatccactcaggaatctcccaaaccggcaaccgccaaacaaacatcggccgactatgcttggccaattgaaacccttcaggcccttcaagacatgggtctgaccaaatttccaaaaataatcaaaaaatcttgggcagacattgcctcagaatctgatgatgaatctgaatcaaatttacaaacaatgatccaaaatgcgtcaatgaccaaaacagccaccaatactaaaggaaaactaccttcagccaaagaccaaacaccacctaccaaacaaactaacaattatatttataaaaataaattgttaactgttttgcagatggaacctgaattttgggacaaaaatcccttcaaggcgacggccaaggctttcccaccaggctttcactataaaccaaccaccatcctgaagacaagaactttttatgaattgattttggtagattcaaactcagtatctatcaaacatttcaaagatccaaaagaccaaaccttaaacacccactcaaccatccaaatactaaaagttcttcaaccaagacactttggttcggacttgaacaaaggaaagagattttcagttccatttgatccggtaggttatacctattgggattacgttgatgcttggaccaaggtgttttggcaccaaaatacccgcttcaagcattcatggctgatatatttcaagaccaacacaatttacaattttcccaattggttttgcaatggtgggacttctttggaccaatcccagagatattcccagaaacggtccaacaaggattttcccaatttaagaaacaatacaattcgcaggaatcacgaattccagcagatcttaaatacttttcaagctttgcactgtcatggatattctcatggcaatatcgttacagcaagactgaaaagacaaaccaatatccatcactacaaagacacgcatttgtaaaatggtggacacaatttgactcatccaaagcggatcc

SEQ ID NO: 7527 - DNA, 1099 bp, Glycine max
  Gm_smallRNAprecursor_360
gtaatgcctcctaaggcatcgggaatctccctacggggaggaaggagtacaggcaaaggagccaggctggctcttccagaaccaaccatgaagaaatcatctacctcttctgggtcaccaacccaggctgggtcatctacccagaaaaccaatttagaagggtcatcaacccagattgcctcaatcaaacctgagccatccactcaggaatctcccaaaccggcaaccgccaaacaaacatcggccgactatgcttggccaattgaaacccttcaggcccttcaagacatgggtctgaccaaatttccaaaaataatcaaaaaatcttgggcagacattgcctcagaatctgatgatgaatctgaatcaaatttacaaacaatgatccaaaatgcgtcaatgaccaaaacagccaccaatactaaaggaaaactaccttcagccaaagaccaaacaccacctaccaaacaaactaacaattatatttataaaaataaattgttaactgttttgcagatggaacctgaattttgggacaaaaatcccttcaaggcgacggccaaggctttcccaccaggctttcactataaaccaaccaccatcctgaagacaagaactttttatgaattgattttggtagattcaaactcagtatctatcaaacatttcaaagatccaaaagaccaaaccttaaacacccactcaaccatccaaatactaaaagttcttcaaccaagacactttggttcggacttgaacaaaggaaagagattttcagttccatttgatccggtaggttatacctattgggattacgttgatgcttggaccaaggtgttttggcaccaaaatacccgcttcaagcattcatggctgatatatttcaagaccaacacaatttacaattttcccaattggttttgcaatggtgggacttctttggaccaatcccagagatattcccagaaacggtccaacaaggattttcccaatttaagaaacaatacaattcgcaggaatcacgaattccagcagatcttaaatacttttcaagctttgcactgtcatggatattctcatggcaatatcgttacagcaa

SEQ ID NO: 7528 - DNA, 1158 bp, Glycine max
  Gm_smallRNAprecursor_361
ctaaggcatcgggaatctccctacggggaggaaggagtacaggcaaaggagccaggctggctcttccagaaccaaccatgaagaaatcatctacctcttctgggtcaccaacccaggctgggtcatctacccagaaaaccaatttagaagggtcatcaacccagattgcctcaatcaaacctgagccatccactcaggaatctcccaaaccggcaaccgccaaacaaacatcggccgactatgcttggccaattgaaacccttcaggcccttcaagacatgggtctgaccaaatttccaaaaataatcaaaaaatcttgggcagacattgcctcagaatctgatgatgaatctgaatcaaatttacaaacaatgatccaaaatgcgtcaatgaccaaaacagccaccaatactaaaggaaaactaccttcagccaaagaccaaacaccacctaccaaacaaactaacaattatatttataaaaataaattgttaactgttttgcagatggaacctgaattttgggacaaaaatcccttcaaggcgacggccaaggctttcccaccaggctttcactataaaccaaccaccatcctgaagacaagaactttttatgaattgattttggtagattcaaactcagtatctatcaaacatttcaaagatccaaaagaccaaaccttaaacacccactcaaccatccaaatactaaaagttcttcaaccaagacactttggttcggacttgaacaaaggaaagagattttcagttccatttgatccggtaggttatacctattgggattacgttgatgcttggaccaaggtgttttggcaccaaaatacccgcttcaagcattcatggctgatatatttcaagaccaacacaatttacaattttcccaattggttttgcaatggtgggacttctttggaccaatcccagagatattcccagaaacggtccaacaaggattttcccaatttaagaaacaatacaattcgcaggaatcacgaattccagcagatcttaaatacttttcaagctttgcactgtcatggatattctcatggcaatatcgttacagcaagactgaaaagacaaaccaatatccatcactacaaagacacgcatttgtaaaatggtggacacaatttga

SEQ ID NO: 7529 - DNA, 1167 bp, Glycine max
  Gm_smallRNAprecursor_362
ctaaggcatcgggaatctccctacggggaggaaggagtacaggcaaaggagccaggctggctcttccagaaccaaccatgaagaaatcatctacctcttctgggtcaccaacccaggctgggtcatctacccagaaaaccaatttagaagggtcatcaacccagattgcctcaatcaaacctgagccatccactcaggaatctcccaaaccggcaaccgccaaacaaacatcggccgactatgcttggccaattgaaacccttcaggcccttcaagacatgggtctgaccaaatttccaaaaataatcaaaaaatcttgggcagacattgcctcagaatctgatgatgaatctgaatcaaatttacaaacaatgatccaaaatgcgtcaatgaccaaaacagccaccaatactaaaggaaaactaccttcagccaaagaccaaacaccacctaccaaacaaactaacaattatatttataaaaataaattgttaactgttttgcagatggaacctgaattttgggacaaaaatcccttcaaggcgacggccaaggctttcccaccaggctttcactataaaccaaccaccatcctgaagacaagaactttttatgaattgattttggtagattcaaactcagtatctatcaaacatttcaaagatccaaaagaccaaaccttaaacacccactcaaccatccaaatactaaaagttcttcaaccaagacactttggttcggacttgaacaaaggaaagagattttcagttccatttgatccggtaggttatacctattgggattacgttgatgcttggaccaaggtgttttggcaccaaaatacccgcttcaagcattcatggctgatatatttcaagaccaacacaatttacaattttcccaattggttttgcaatggtgggacttctttggaccaatcccagagatattcccagaaacggtccaacaaggattttcccaatttaagaaacaatacaattcgcaggaatcacgaattccagcagatcttaaatacttttcaagctttgcactgtcatggatattctcatggcaatatcgttacagcaagactgaaaagacaaaccaatatccatcactacaaagacacgcatttgtaaaatggtggacacaatttgactcatccaa

SEQ ID NO: 7530 - DNA, 1208 bp, Glycine max
  Gm_smallRNAprecursor_363
ctaaggcatcgggaatctccctacggggaggaaggagtacaggcaaaggagccaggctggctcttccagaaccaaccatgaagaaatcatctacctcttctgggtcaccaacccaggctgggtcatctacccagaaaaccaatttagaagggtcatcaacccagattgcctcaatcaaacctgagccatccactcaggaatctcccaaaccggcaaccgccaaacaaacatcggccgactatgcttggccaattgaaacccttcaggcccttcaagacatgggtctgaccaaatttccaaaaataatcaaaaaatcttgggcagacattgcctcagaatctgatgatgaatctgaatcaaatttacaaacaatgatccaaaatgcgtcaatgaccaaaacagccaccaatactaaaggaaaactaccttcagccaaagaccaaacaccacctaccaaacaaactaacaattatatttataaaaataaattgttaactgttttgcagatggaacctgaattttgggacaaaaatcccttcaaggcgacggccaaggctttcccaccaggctttcactataaaccaaccaccatcctgaagacaagaactttttatgaattgattttggtagattcaaactcagtatctatcaaacatttcaaagatccaaaagaccaaaccttaaacacccactcaaccatccaaatactaaaagttcttcaaccaagacactttggttcggacttgaacaaaggaaagagattttcagttccatttgatccggtaggttatacctattgggattacgttgatgcttggaccaaggtgttttggcaccaaaatacccgcttcaagcattcatggctgatatatttcaagaccaacacaatttacaattttcccaattggttttgcaatggtgggacttctttggaccaatcccagagatattcccagaaacggtccaacaaggattttcccaatttaagaaacaatacaattcgcaggaatcacgaattccagcagatcttaaatacttttcaagctttgcactgtcatggatattctcatggcaatatcgttacagcaagactgaaaagacaaaccaatatccatcactacaaagacacgcatttgtaaaatggtggacacaatttgactcatccaaagcggatccagaacaagtaaaactatggttcaaatcccatc

SEQ ID NO: 7531 - DNA, 1208 bp, Glycine max; identical to SEQ ID NO: 7530
  Gm_smallRNAprecursor_364

SEQ ID NO: 7532 - DNA, 1211 bp, Glycine max
  Gm_smallRNAprecursor_365
ctaaggcatcgggaatctccctacggggaggaaggagtacaggcaaaggagccaggctggctcttccagaaccaaccatgaagaaatcatctacctcttctgggtcaccaacccaggctgggtcatctacccagaaaaccaatttagaagggtcatcaacccagattgcctcaatcaaacctgagccatccactcaggaatctcccaaaccggcaaccgccaaacaaacatcggccgactatgcttggccaattgaaacccttcaggcccttcaagacatgggtctgaccaaatttccaaaaataatcaaaaaatcttgggcagacattgcctcagaatctgatgatgaatctgaatcaaatttacaaacaatgatccaaaatgcgtcaatgaccaaaacagccaccaatactaaaggaaaactaccttcagccaaagaccaaacaccacctaccaaacaaactaacaattatatttataaaaataaattgttaactgttttgcagatggaacctgaattttgggacaaaaatcccttcaaggcgacggccaaggctttcccaccaggctttcactataaaccaaccaccatcctgaagacaagaactttttatgaattgattttggtagattcaaactcagtatctatcaaacatttcaaagatccaaaagaccaaaccttaaacacccactcaaccatccaaatactaaaagttcttcaaccaagacactttggttcggacttgaacaaaggaaagagattttcagttccatttgatccggtaggttatacctattgggattacgttgatgcttggaccaaggtgttttggcaccaaaatacccgcttcaagcattcatggctgatatatttcaagaccaacacaatttacaattttcccaattggttttgcaatggtgggacttctttggaccaatcccagagatattcccagaaacggtccaacaaggattttcccaatttaagaaacaatacaattcgcaggaatcacgaattccagcagatcttaaatacttttcaagctttgcactgtcatggatattctcatggcaatatcgttacagcaagactgaaaagacaaaccaatatccatcactacaaagacacgcatttgtaaaatggtggacacaatttgactcatccaaagcggatccagaacaagtaaaactatggttcaaatcccatccag

SEQ ID NO: 7533 - DNA, 1098 bp, Glycine max
  Gm_smallRNAprecursor_366
ggaatctccctacggggaggaaggagtacaggcaaaggagccaggctggctcttccagaaccaaccatgaagaaatcatctacctcttctgggtcaccaacccaggctgggtcatctacccagaaaaccaatttagaagggtcatcaacccagattgcctcaatcaaacctgagccatccactcaggaatctcccaaaccggcaaccgccaaacaaacatcggccgactatgcttggccaattgaaacccttcaggcccttcaagacatgggtctgaccaaatttccaaaaataatcaaaaaatcttgggcagacattgcctcagaatctgatgatgaatctgaatcaaatttacaaacaatgatccaaaatgcgtcaatgaccaaaacagccaccaatactaaaggaaaactaccttcagccaaagaccaaacaccacctaccaaacaaactaacaattatatttataaaaataaattgttaactgttttgcagatggaacctgaattttgggacaaaaatcccttcaaggcgacggccaaggctttcccaccaggctttcactataaaccaaccaccatcctgaagacaagaactttttatgaattgattttggtagattcaaactcagtatctatcaaacatttcaaagatccaaaagaccaaaccttaaacacccactcaaccatccaaatactaaaagttcttcaaccaagacactttggttcggacttgaacaaaggaaagagattttcagttccatttgatccggtaggttatacctattgggattacgttgatgcttggaccaaggtgttttggcaccaaaatacccgcttcaagcattcatggctgatatatttcaagaccaacacaatttacaattttcccaattggttttgcaatggtgggacttctttggaccaatcccagagatattcccagaaacggtccaacaaggattttcccaatttaagaaacaatacaattcgcaggaatcacgaattccagcagatcttaaatacttttcaagctttgcactgtcatggatattctcatggcaatatcgttacagcaagactgaaaagacaaaccaat

SEQ ID NO: 7534 - DNA, 1190 bp, Glycine max
  Gm_smallRNAprecursor_367
acaggcaaaggagccaggctggctcttccagaaccaaccatgaagaaatcatctacctcttctgggtcaccaacccaggctgggtcatctacccagaaaaccaatttagaagggtcatcaacccagattgcctcaatcaaacctgagccatccactcaggaatctcccaaaccggcaaccgccaaacaaacatcggccgactatgcttggccaattgaaacccttcaggcccttcaagacatgggtctgaccaaatttccaaaaataatcaaaaaatcttgggcagacattgcctcagaatctgatgatgaatctgaatcaaatttacaaacaatgatccaaaatgcgtcaatgaccaaaacagccaccaatactaaaggaaaactaccttcagccaaagaccaaacaccacctaccaaacaaactaacaattatatttataaaaataaattgttaactgttttgcagatggaacctgaattttgggacaaaaatcccttcaaggcgacggccaaggctttcccaccaggctttcactataaaccaaccaccatcctgaagacaagaactttttatgaattgattttggtagattcaaactcagtatctatcaaacatttcaaagatccaaaagaccaaaccttaaacacccactcaaccatccaaatactaaaagttcttcaaccaagacactttggttcggacttgaacaaaggaaagagattttcagttccatttgatccggtaggttatacctattgggattacgttgatgcttggaccaaggtgttttggcaccaaaatacccgcttcaagcattcatggctgatatatttcaagaccaacacaatttacaattttcccaattggttttgcaatggtgggacttctttggaccaatcccagagatattcccagaaacggtccaacaaggattttcccaatttaagaaacaatacaattcgcaggaatcacgaattccagcagatcttaaatacttttcaagctttgcactgtcatggatattctcatggcaatatcgttacagcaagactgaaaagacaaaccaatatccatcactacaaagacacgcatttgtaaaatggtggacacaatttgactcatccaaagcggatccagaacaagtaaaactatggttcaaatcccatccagaattcctcaaagcggct

SEQ ID NO: 7535 - DNA, 1248 bp, Glycine max
  Gm_smallRNAprecursor_368
tgcctcaatcaaacctgagccatccactcaggaatctcccaaaccggcaaccgccaaacaaacatcggccgactatgcttggccaattgaaacccttcaggcccttcaagacatgggtctgaccaaatttccaaaaataatcaaaaaatcttgggcagacattgcctcagaatctgatgatgaatctgaatcaaatttacaaacaatgatccaaaatgcgtcaatgaccaaaacagccaccaatactaaaggaaaactaccttcagccaaagaccaaacaccacctaccaaacaaactaacaattatatttataaaaataaattgttaactgttttgcagatggaacctgaattttgggacaaaaatcccttcaaggcgacggccaaggctttcccaccaggctttcactataaaccaaccaccatcctgaagacaagaactttttatgaattgattttggtagattcaaactcagtatctatcaaacatttcaaagatccaaaagaccaaaccttaaacacccactcaaccatccaaatactaaaagttcttcaaccaagacactttggttcggacttgaacaaaggaaagagattttcagttccatttgatccggtaggttatacctattgggattacgttgatgcttggaccaaggtgttttggcaccaaaatacccgcttcaagcattcatggctgatatatttcaagaccaacacaatttacaattttcccaattggttttgcaatggtgggacttctttggaccaatcccagagatattcccagaaacggtccaacaaggattttcccaatttaagaaacaatacaattcgcaggaatcacgaattccagcagatcttaaatacttttcaagctttgcactgtcatggatattctcatggcaatatcgttacagcaagactgaaaagacaaaccaatatccatcactacaaagacacgcatttgtaaaatggtggacacaatttgactcatccaaagcggatccagaacaagtaaaactatggttcaaatcccatccagaattcctcaaagcggctgatccagagacttctgtgtttttgaaccaaaagtctcatctggcagcatttttagcaagatcgacatcaaaggaggtcttagctaaaaatctgaaggaagttctacaaatgttacaacaggaagaagaagtttcatcctcaaagaaggaagaaacaagttctgccgaagaagaagaagaagatccc

SEQ ID NO: 7536 - DNA, 1087 bp, Glycine max
  Gm_smallRNAprecursor_369
agccatccactcaggaatctcccaaaccggcaaccgccaaacaaacatcggccgactatgcttggccaattgaaacccttcaggcccttcaagacatgggtctgaccaaatttccaaaaataatcaaaaaatcttgggcagacattgcctcagaatctgatgatgaatctgaatcaaatttacaaacaatgatccaaaatgcgtcaatgaccaaaacagccaccaatactaaaggaaaactaccttcagccaaagaccaaacaccacctaccaaacaaactaacaattatatttataaaaataaattgttaactgttttgcagatggaacctgaattttgggacaaaaatcccttcaaggcgacggccaaggctttcccaccaggctttcactataaaccaaccaccatcctgaagacaagaactttttatgaattgattttggtagattcaaactcagtatctatcaaacatttcaaagatccaaaagaccaaaccttaaacacccactcaaccatccaaatactaaaagttcttcaaccaagacactttggttcggacttgaacaaaggaaagagattttcagttccatttgatccggtaggttatacctattgggattacgttgatgcttggaccaaggtgttttggcaccaaaatacccgcttcaagcattcatggctgatatatttcaagaccaacacaatttacaattttcccaattggttttgcaatggtgggacttctttggaccaatcccagagatattcccagaaacggtccaacaaggattttcccaatttaagaaacaatacaattcgcaggaatcacgaattccagcagatcttaaatacttttcaagctttgcactgtcatggatattctcatggcaatatcgttacagcaagactgaaaagacaaaccaatatccatcactacaaagacacgcatttgtaaaatggtggacacaatttgactcatccaaagcggatccagaacaagtaaaactatggttcaaatcccatccagaattcctcaaagcggctgatccagagacttctgtgtttttgaaccaaaagtctcatctg

SEQ ID NO: 7537 - DNA, 1090 bp, Glycine max
  Gm_smallRNAprecursor_370
agccatccactcaggaatctcccaaaccggcaaccgccaaacaaacatcggccgactatgcttggccaattgaaacccttcaggcccttcaagacatgggtctgaccaaatttccaaaaataatcaaaaaatcttgggcagacattgcctcagaatctgatgatgaatctgaatcaaatttacaaacaatgatccaaaatgcgtcaatgaccaaaacagccaccaatactaaaggaaaactaccttcagccaaagaccaaacaccacctaccaaacaaactaacaattatatttataaaaataaattgttaactgttttgcagatggaacctgaattttgggacaaaaatcccttcaaggcgacggccaaggctttcccaccaggctttcactataaaccaaccaccatcctgaagacaagaactttttatgaattgattttggtagattcaaactcagtatctatcaaacatttcaaagatccaaaagaccaaaccttaaacacccactcaaccatccaaatactaaaagttcttcaaccaagacactttggttcggacttgaacaaaggaaagagattttcagttccatttgatccggtaggttatacctattgggattacgttgatgcttggaccaaggtgttttggcaccaaaatacccgcttcaagcattcatggctgatatatttcaagaccaacacaatttacaattttcccaattggttttgcaatggtgggacttctttggaccaatcccagagatattcccagaaacggtccaacaaggattttcccaatttaagaaacaatacaattcgcaggaatcacgaattccagcagatcttaaatacttttcaagctttgcactgtcatggatattctcatggcaatatcgttacagcaagactgaaaagacaaaccaatatccatcactacaaagacacgcatttgtaaaatggtggacacaatttgactcatccaaagcggatccagaacaagtaaaactatggttcaaatcccatccagaattcctcaaagcggctgatccagagacttctgtgtttttgaaccaaaagtctcatctggca

SEQ ID NO: 7538 - DNA, 1243 bp, Glycine max
  Gm_smallRNAprecursor_371
caagacatgggtctgaccaaatttccaaaaataatcaaaaaatcttgggcagacattgcctcagaatctgatgatgaatctgaatcaaatttacaaacaatgatccaaaatgcgtcaatgaccaaaacagccaccaatactaaaggaaaactaccttcagccaaagaccaaacaccacctaccaaacaaactaacaattatatttataaaaataaattgttaactgttttgcagatggaacctgaattttgggacaaaaatcccttcaaggcgacggccaaggctttcccaccaggctttcactataaaccaaccaccatcctgaagacaagaactttttatgaattgattttggtagattcaaactcagtatctatcaaacatttcaaagatccaaaagaccaaaccttaaacacccactcaaccatccaaatactaaaagttcttcaaccaagacactttggttcggacttgaacaaaggaaagagattttcagttccatttgatccggtaggttatacctattgggattacgttgatgcttggaccaaggtgttttggcaccaaaatacccgcttcaagcattcatggctgatatatttcaagaccaacacaatttacaattttcccaattggttttgcaatggtgggacttctttggaccaatcccagagatattcccagaaacggtccaacaaggattttcccaatttaagaaacaatacaattcgcaggaatcacgaattccagcagatcttaaatacttttcaagctttgcactgtcatggatattctcatggcaatatcgttacagcaagactgaaaagacaaaccaatatccatcactacaaagacacgcatttgtaaaatggtggacacaatttgactcatccaaagcggatccagaacaagtaaaactatggttcaaatcccatccagaattcctcaaagcggctgatccagagacttctgtgtttttgaaccaaaagtctcatctggcagcatttttagcaagatcgacatcaaaggaggtcttagctaaaaatctgaaggaagttctacaaatgttacaacaggaagaagaagtttcatcctcaaagaaggaagaaacaagttctgccgaagaagaagaagaagatcccttttaccaaaacgaagatgattgttttggtatctgtttagattaaatttaatttcggtcacaaaatcgtctgtttgtaattaatgtgtaattaatgatgga

SEQ ID NO: 7539 - DNA, 1080 bp, Glycine max
  Gm_smallRNAprecursor_372
ccaaaaataatcaaaaaatcttgggcagacattgcctcagaatctgatgatgaatctgaatcaaatttacaaacaatgatccaaaatgcgtcaatgaccaaaacagccaccaatactaaaggaaaactaccttcagccaaagaccaaacaccacctaccaaacaaactaacaattatatttataaaaataaattgttaactgttttgcagatggaacctgaattttgggacaaaaatcccttcaaggcgacggccaaggctttcccaccaggctttcactataaaccaaccaccatcctgaagacaagaactttttatgaattgattttggtagattcaaactcagtatctatcaaacatttcaaagatccaaaagaccaaaccttaaacacccactcaaccatccaaatactaaaagttcttcaaccaagacactttggttcggacttgaacaaaggaaagagattttcagttccatttgatccggtaggttatacctattgggattacgttgatgcttggaccaaggtgttttggcaccaaaatacccgcttcaagcattcatggctgatatatttcaagaccaacacaatttacaattttcccaattggttttgcaatggtgggacttctttggaccaatcccagagatattcccagaaacggtccaacaaggattttcccaatttaagaaacaatacaattcgcaggaatcacgaattccagcagatcttaaatacttttcaagctttgcactgtcatggatattctcatggcaatatcgttacagcaagactgaaaagacaaaccaatatccatcactacaaagacacgcatttgtaaaatggtggacacaatttgactcatccaaagcggatccagaacaagtaaaactatggttcaaatcccatccagaattcctcaaagcggctgatccagagacttctgtgtttttgaaccaaaagtctcatctggcagcatttttagcaagatcgacatcaaaggaggtcttagctaaaaatctgaaggaagttctacaaatgttacaacaggaagaagaagtttcatcctcaaagaagg

SEQ ID NO: 7540 - DNA, 1145 bp, Glycine max
  Gm_smallRNAprecursor_373
aatgatccaaaatgcgtcaatgaccaaaacagccaccaatactaaaggaaaactaccttcagccaaagaccaaacaccacctaccaaacaaactaacaattatatttataaaaataaattgttaactgttttgcagatggaacctgaattttgggacaaaaatcccttcaaggcgacggccaaggctttcccaccaggctttcactataaaccaaccaccatcctgaagacaagaactttttatgaattgattttggtagattcaaactcagtatctatcaaacatttcaaagatccaaaagaccaaaccttaaacacccactcaaccatccaaatactaaaagttcttcaaccaagacactttggttcggacttgaacaaaggaaagagattttcagttccatttgatccggtaggttatacctattgggattacgttgatgcttggaccaaggtgttttggcaccaaaatacccgcttcaagcattcatggctgatatatttcaagaccaacacaatttacaattttcccaattggttttgcaatggtgggacttctttggaccaatcccagagatattcccagaaacggtccaacaaggattttcccaatttaagaaacaatacaattcgcaggaatcacgaattccagcagatcttaaatacttttcaagctttgcactgtcatggatattctcatggcaatatcgttacagcaagactgaaaagacaaaccaatatccatcactacaaagacacgcatttgtaaaatggtggacacaatttgactcatccaaagcggatccagaacaagtaaaactatggttcaaatcccatccagaattcctcaaagcggctgatccagagacttctgtgtttttgaaccaaaagtctcatctggcagcatttttagcaagatcgacatcaaaggaggtcttagctaaaaatctgaaggaagttctacaaatgttacaacaggaagaagaagtttcatcctcaaagaaggaagaaacaagttctgccgaagaagaagaagaagatcccttttaccaaaacgaagatgattgttttggtatctgtttagattaaatttaatttcggtcacaaaatcgtctgtttgtaattaatgtgtaattaatgatgga

SEQ ID NO: 7541 - DNA, 1058 bp, Glycine max
  Gm_smallRNAprecursor_374
aaccttaaacacccactcaaccatccaaatactaaaagttcttcaaccaagacactttggttcggacttgaacaaaggaaagagattttcagttccatttgatccggtaggttatacctattgggattacgttgatgcttggaccaaggtgttttggcaccaaaatacccgcttcaagcattcatggctgatatatttcaagaccaacacaatttacaattttcccaattggttttgcaatggtgggacttctttggaccaatcccagagatattcccagaaacggtccaacaaggattttcccaatttaagaaacaatacaattcgcaggaatcacgaattccagcagatcttaaatacttttcaagctttgcactgtcatggatattctcatggcaatatcgttacagcaagactgaaaagacaaaccaatatccatcactacaaagacacgcatttgtaaaatggtggacacaatttgactcatccaaagcggatccagaacaagtaaaactatggttcaaatcccatccagaattcctcaaagcggctgatccagagacttctgtgtttttgaaccaaaagtctcatctggcagcatttttagcaagatcgacatcaaaggaggtcttagctaaaaatctgaaggaagttctacaaatgttacaacaggaagaagaagtttcatcctcaaagaaggaagaaacaagttctgccgaagaagaagaagaagatcccttttaccaaaacgaagatgattgttttggtatctgtttagattaaatttaatttcggtcacaaaatcgtctgtttgtaattaatgtgtaattaatgatggacaatactacctgtcctgtagccattaaagtctcggtcgaaactacttgtcttgtaacaaacagtcaaatagtcccggtcaaaactaccggcaactaccggtcttagatttttggctatataaggagtcctcaagtattttaaaagcgcgggaccaaatggttcccgcatgtcatcgggtccgccgcctctggatgacaaatggtgcagaagacgacttt

SEQ ID NO: 7542 - DNA, 1031 bp, Glycine max
  Gm_smallRNAprecursor_375
agacactttggttcggacttgaacaaaggaaagagattttcagttccatttgatccggtaggttatacctattgggattacgttgatgcttggaccaaggtgttttggcaccaaaatacccgcttcaagcattcatggctgatatatttcaagaccaacacaatttacaattttcccaattggttttgcaatggtgggacttctttggaccaatcccagagatattcccagaaacggtccaacaaggattttcccaatttaagaaacaatacaattcgcaggaatcacgaattccagcagatcttaaatacttttcaagctttgcactgtcatggatattctcatggcaatatcgttacagcaagactgaaaagacaaaccaatatccatcactacaaagacacgcatttgtaaaatggtggacacaatttgactcatccaaagcggatccagaacaagtaaaactatggttcaaatcccatccagaattcctcaaagcggctgatccagagacttctgtgtttttgaaccaaaagtctcatctggcagcatttttagcaagatcgacatcaaaggaggtcttagctaaaaatctgaaggaagttctacaaatgttacaacaggaagaagaagtttcatcctcaaagaaggaagaaacaagttctgccgaagaagaagaagaagatcccttttaccaaaacgaagatgattgttttggtatctgtttagattaaatttaatttcggtcacaaaatcgtctgtttgtaattaatgtgtaattaatgatggacaatactacctgtcctgtagccattaaagtctcggtcgaaactacttgtcttgtaacaaacagtcaaatagtcccggtcaaaactaccggcaactaccggtcttagatttttggctatataaggagtcctcaagtattttaaaagcgcgggaccaaatggttcccgcatgtcatcgggtccgccgcctctggatgacaaatggtgcagaagacgactttagtctctgcatgctattatgct

SEQ ID NO: 7543 - DNA, 1138 bp, Glycine max
  Gm_smallRNAprecursor_376
tggttcggacttgaacaaaggaaagagattttcagttccatttgatccggtaggttatacctattgggattacgttgatgcttggaccaaggtgttttggcaccaaaatacccgcttcaagcattcatggctgatatatttcaagaccaacacaatttacaattttcccaattggttttgcaatggtgggacttctttggaccaatcccagagatattcccagaaacggtccaacaaggattttcccaatttaagaaacaatacaattcgcaggaatcacgaattccagcagatcttaaatacttttcaagctttgcactgtcatggatattctcatggcaatatcgttacagcaagactgaaaagacaaaccaatatccatcactacaaagacacgcatttgtaaaatggtggacacaatttgactcatccaaagcggatccagaacaagtaaaactatggttcaaatcccatccagaattcctcaaagcggctgatccagagacttctgtgtttttgaaccaaaagtctcatctggcagcatttttagcaagatcgacatcaaaggaggtcttagctaaaaatctgaaggaagttctacaaatgttacaacaggaagaagaagtttcatcctcaaagaaggaagaaacaagttctgccgaagaagaagaagaagatcccttttaccaaaacgaagatgattgttttggtatctgtttagattaaatttaatttcggtcacaaaatcgtctgtttgtaattaatgtgtaattaatgatggacaatactacctgtcctgtagccattaaagtctcggtcgaaactacttgtcttgtaacaaacagtcaaatagtcccggtcaaaactaccggcaactaccggtcttagatttttggctatataaggagtcctcaagtattttaaaagcgcgggaccaaatggttcccgcatgtcatcgggtccgccgcctctggatgacaaatggtgcagaagacgactttagtctctgcatgctattatgctttgagtcctataggtagcaaaagaaagtgcgggaccaaatggttcccgcatgtcatcgggcccgccgcctctggatgacaaaaggcgcagaagacgatgttagtctctgcatgct

SEQ ID NO: 7544 - DNA, 1139 bp, Glycine max
  Gm_smallRNAprecursor_377
tggttcggacttgaacaaaggaaagagattttcagttccatttgatccggtaggttatacctattgggattacgttgatgcttggaccaaggtgttttggcaccaaaatacccgcttcaagcattcatggctgatatatttcaagaccaacacaatttacaattttcccaattggttttgcaatggtgggacttctttggaccaatcccagagatattcccagaaacggtccaacaaggattttcccaatttaagaaacaatacaattcgcaggaatcacgaattccagcagatcttaaatacttttcaagctttgcactgtcatggatattctcatggcaatatcgttacagcaagactgaaaagacaaaccaatatccatcactacaaagacacgcatttgtaaaatggtggacacaatttgactcatccaaagcggatccagaacaagtaaaactatggttcaaatcccatccagaattcctcaaagcggctgatccagagacttctgtgtttttgaaccaaaagtctcatctggcagcatttttagcaagatcgacatcaaaggaggtcttagctaaaaatctgaaggaagttctacaaatgttacaacaggaagaagaagtttcatcctcaaagaaggaagaaacaagttctgccgaagaagaagaagaagatcccttttaccaaaacgaagatgattgttttggtatctgtttagattaaatttaatttcggtcacaaaatcgtctgtttgtaattaatgtgtaattaatgatggacaatactacctgtcctgtagccattaaagtctcggtcgaaactacttgtcttgtaacaaacagtcaaatagtcccggtcaaaactaccggcaactaccggtcttagatttttggctatataaggagtcctcaagtattttaaaagcgcgggaccaaatggttcccgcatgtcatcgggtccgccgcctctggatgacaaatggtgcagaagacgactttagtctctgcatgctattatgctttgagtcctataggtagcaaaagaaagtgcgggaccaaatggttcccgcatgtcatcgggcccgccgcctctggatgacaaaaggcgcagaagacgatgttagtctctgcatgcta

SEQ ID NO: 7545 - DNA, 1187 bp, Glycine max
  Gm_smallRNAprecursor_378
tggttcggacttgaacaaaggaaagagattttcagttccatttgatccggtaggttatacctattgggattacgttgatgcttggaccaaggtgttttggcaccaaaatacccgcttcaagcattcatggctgatatatttcaagaccaacacaatttacaattttcccaattggttttgcaatggtgggacttctttggaccaatcccagagatattcccagaaacggtccaacaaggattttcccaatttaagaaacaatacaattcgcaggaatcacgaattccagcagatcttaaatacttttcaagctttgcactgtcatggatattctcatggcaatatcgttacagcaagactgaaaagacaaaccaatatccatcactacaaagacacgcatttgtaaaatggtggacacaatttgactcatccaaagcggatccagaacaagtaaaactatggttcaaatcccatccagaattcctcaaagcggctgatccagagacttctgtgtttttgaaccaaaagtctcatctggcagcatttttagcaagatcgacatcaaaggaggtcttagctaaaaatctgaaggaagttctacaaatgttacaacaggaagaagaagtttcatcctcaaagaaggaagaaacaagttctgccgaagaagaagaagaagatcccttttaccaaaacgaagatgattgttttggtatctgtttagattaaatttaatttcggtcacaaaatcgtctgtttgtaattaatgtgtaattaatgatggacaatactacctgtcctgtagccattaaagtctcggtcgaaactacttgtcttgtaacaaacagtcaaatagtcccggtcaaaactaccggcaactaccggtcttagatttttggctatataaggagtcctcaagtattttaaaagcgcgggaccaaatggttcccgcatgtcatcgggtccgccgcctctggatgacaaatggtgcagaagacgactttagtctctgcatgctattatgctttgagtcctataggtagcaaaagaaagtgcgggaccaaatggttcccgcatgtcatcgggcccgccgcctctggatgacaaaaggcgcagaagacgatgttagtctctgcatgctatcatgctttgagtcttatagatagcaaaaaggtgtgcggataaccgct

SEQ ID NO: 7546 - DNA, 1057 bp, Glycine max
  Gm_smallRNAprecursor_379
tatttcaagaccaacacaatttacaattttcccaattggttttgcaatggtgggacttctttggaccaatcccagagatattcccagaaacggtccaacaaggattttcccaatttaagaaacaatacaattcgcaggaatcacgaattccagcagatcttaaatacttttcaagctttgcactgtcatggatattctcatggcaatatcgttacagcaagactgaaaagacaaaccaatatccatcactacaaagacacgcatttgtaaaatggtggacacaatttgactcatccaaagcggatccagaacaagtaaaactatggttcaaatcccatccagaattcctcaaagcggctgatccagagacttctgtgtttttgaaccaaaagtctcatctggcagcatttttagcaagatcgacatcaaaggaggtcttagctaaaaatctgaaggaagttctacaaatgttacaacaggaagaagaagtttcatcctcaaagaaggaagaaacaagttctgccgaagaagaagaagaagatcccttttaccaaaacgaagatgattgttttggtatctgtttagattaaatttaatttcggtcacaaaatcgtctgtttgtaattaatgtgtaattaatgatggacaatactacctgtcctgtagccattaaagtctcggtcgaaactacttgtcttgtaacaaacagtcaaatagtcccggtcaaaactaccggcaactaccggtcttagatttttggctatataaggagtcctcaagtattttaaaagcgcgggaccaaatggttcccgcatgtcatcgggtccgccgcctctggatgacaaatggtgcagaagacgactttagtctctgcatgctattatgctttgagtcctataggtagcaaaagaaagtgcgggaccaaatggttcccgcatgtcatcgggcccgccgcctctggatgacaaaaggcgcagaagacgatgttagtctctgcatgctatcatgctttgagtcttatagatagcaaaaaggtgtgcggataaccgcttggggt

SEQ ID NO: 7547 - DNA, 1064 bp, Glycine max
  Gm_smallRNAprecursor_380
tatttcaagaccaacacaatttacaattttcccaattggttttgcaatggtgggacttctttggaccaatcccagagatattcccagaaacggtccaacaaggattttcccaatttaagaaacaatacaattcgcaggaatcacgaattccagcagatcttaaatacttttcaagctttgcactgtcatggatattctcatggcaatatcgttacagcaagactgaaaagacaaaccaatatccatcactacaaagacacgcatttgtaaaatggtggacacaatttgactcatccaaagcggatccagaacaagtaaaactatggttcaaatcccatccagaattcctcaaagcggctgatccagagacttctgtgtttttgaaccaaaagtctcatctggcagcatttttagcaagatcgacatcaaaggaggtcttagctaaaaatctgaaggaagttctacaaatgttacaacaggaagaagaagtttcatcctcaaagaaggaagaaacaagttctgccgaagaagaagaagaagatcccttttaccaaaacgaagatgattgttttggtatctgtttagattaaatttaatttcggtcacaaaatcgtctgtttgtaattaatgtgtaattaatgatggacaatactacctgtcctgtagccattaaagtctcggtcgaaactacttgtcttgtaacaaacagtcaaatagtcccggtcaaaactaccggcaactaccggtcttagatttttggctatataaggagtcctcaagtattttaaaagcgcgggaccaaatggttcccgcatgtcatcgggtccgccgcctctggatgacaaatggtgcagaagacgactttagtctctgcatgctattatgctttgagtcctataggtagcaaaagaaagtgcgggaccaaatggttcccgcatgtcatcgggcccgccgcctctggatgacaaaaggcgcagaagacgatgttagtctctgcatgctatcatgctttgagtcttatagatagcaaaaaggtgtgcggataaccgcttggggtatttctg

SEQ ID NO: 7548 - DNA, 1059 bp, Glycine max
  Gm_smallRNAprecursor_381
atttcaagaccaacacaatttacaattttcccaattggttttgcaatggtgggacttctttggaccaatcccagagatattcccagaaacggtccaacaaggattttcccaatttaagaaacaatacaattcgcaggaatcacgaattccagcagatcttaaatacttttcaagctttgcactgtcatggatattctcatggcaatatcgttacagcaagactgaaaagacaaaccaatatccatcactacaaagacacgcatttgtaaaatggtggacacaatttgactcatccaaagcggatccagaacaagtaaaactatggttcaaatcccatccagaattcctcaaagcggctgatccagagacttctgtgtttttgaaccaaaagtctcatctggcagcatttttagcaagatcgacatcaaaggaggtcttagctaaaaatctgaaggaagttctacaaatgttacaacaggaagaagaagtttcatcctcaaagaaggaagaaacaagttctgccgaagaagaagaagaagatcccttttaccaaaacgaagatgattgttttggtatctgtttagattaaatttaatttcggtcacaaaatcgtctgtttgtaattaatgtgtaattaatgatggacaatactacctgtcctgtagccattaaagtctcggtcgaaactacttgtcttgtaacaaacagtcaaatagtcccggtcaaaactaccggcaactaccggtcttagatttttggctatataaggagtcctcaagtattttaaaagcgcgggaccaaatggttcccgcatgtcatcgggtccgccgcctctggatgacaaatggtgcagaagacgactttagtctctgcatgctattatgctttgagtcctataggtagcaaaagaaagtgcgggaccaaatggttcccgcatgtcatcgggcccgccgcctctggatgacaaaaggcgcagaagacgatgttagtctctgcatgctatcatgctttgagtcttatagatagcaaaaaggtgtgcggataaccgcttggggtatt

SEQ ID NO: 7549 - DNA, 1060 bp, Glycine max
  Gm_smallRNAprecursor_382
atttcaagaccaacacaatttacaattttcccaattggttttgcaatggtgggacttctttggaccaatcccagagatattcccagaaacggtccaacaaggattttcccaatttaagaaacaatacaattcgcaggaatcacgaattccagcagatcttaaatacttttcaagctttgcactgtcatggatattctcatggcaatatcgttacagcaagactgaaaagacaaaccaatatccatcactacaaagacacgcatttgtaaaatggtggacacaatttgactcatccaaagcggatccagaacaagtaaaactatggttcaaatcccatccagaattcctcaaagcggctgatccagagacttctgtgtttttgaaccaaaagtctcatctggcagcatttttagcaagatcgacatcaaaggaggtcttagctaaaaatctgaaggaagttctacaaatgttacaacaggaagaagaagtttcatcctcaaagaaggaagaaacaagttctgccgaagaagaagaagaagatcccttttaccaaaacgaagatgattgttttggtatctgtttagattaaatttaatttcggtcacaaaatcgtctgtttgtaattaatgtgtaattaatgatggacaatactacctgtcctgtagccattaaagtctcggtcgaaactacttgtcttgtaacaaacagtcaaatagtcccggtcaaaactaccggcaactaccggtcttagatttttggctatataaggagtcctcaagtattttaaaagcgcgggaccaaatggttcccgcatgtcatcgggtccgccgcctctggatgacaaatggtgcagaagacgactttagtctctgcatgctattatgctttgagtcctataggtagcaaaagaaagtgcgggaccaaatggttcccgcatgtcatcgggcccgccgcctctggatgacaaaaggcgcagaagacgatgttagtctctgcatgctatcatgctttgagtcttatagatagcaaaaaggtgtgcggataaccgcttggggtattt

SEQ ID NO: 7550 - DNA, 1060 bp, Glycine max; identical to SEQ ID NO: 7549
  Gm_smallRNAprecursor_383

SEQ ID NO: 7551 - DNA, 1063 bp, Glycine max
  Gm_smallRNAprecursor_384
atttcaagaccaacacaatttacaattttcccaattggttttgcaatggtgggacttctttggaccaatcccagagatattcccagaaacggtccaacaaggattttcccaatttaagaaacaatacaattcgcaggaatcacgaattccagcagatcttaaatacttttcaagctttgcactgtcatggatattctcatggcaatatcgttacagcaagactgaaaagacaaaccaatatccatcactacaaagacacgcatttgtaaaatggtggacacaatttgactcatccaaagcggatccagaacaagtaaaactatggttcaaatcccatccagaattcctcaaagcggctgatccagagacttctgtgtttttgaaccaaaagtctcatctggcagcatttttagcaagatcgacatcaaaggaggtcttagctaaaaatctgaaggaagttctacaaatgttacaacaggaagaagaagtttcatcctcaaagaaggaagaaacaagttctgccgaagaagaagaagaagatcccttttaccaaaacgaagatgattgttttggtatctgtttagattaaatttaatttcggtcacaaaatcgtctgtttgtaattaatgtgtaattaatgatggacaatactacctgtcctgtagccattaaagtctcggtcgaaactacttgtcttgtaacaaacagtcaaatagtcccggtcaaaactaccggcaactaccggtcttagatttttggctatataaggagtcctcaagtattttaaaagcgcgggaccaaatggttcccgcatgtcatcgggtccgccgcctctggatgacaaatggtgcagaagacgactttagtctctgcatgctattatgctttgagtcctataggtagcaaaagaaagtgcgggaccaaatggttcccgcatgtcatcgggcccgccgcctctggatgacaaaaggcgcagaagacgatgttagtctctgcatgctatcatgctttgagtcttatagatagcaaaaaggtgtgcggataaccgcttggggtatttctg

SEQ ID NO: 7552 - DNA, 1155 bp, Glycine max
  Gm_smallRNAprecursor_385
tgggacttctttggaccaatcccagagatattcccagaaacggtccaacaaggattttcccaatttaagaaacaatacaattcgcaggaatcacgaattccagcagatcttaaatacttttcaagctttgcactgtcatggatattctcatggcaatatcgttacagcaagactgaaaagacaaaccaatatccatcactacaaagacacgcatttgtaaaatggtggacacaatttgactcatccaaagcggatccagaacaagtaaaactatggttcaaatcccatccagaattcctcaaagcggctgatccagagacttctgtgtttttgaaccaaaagtctcatctggcagcatttttagcaagatcgacatcaaaggaggtcttagctaaaaatctgaaggaagttctacaaatgttacaacaggaagaagaagtttcatcctcaaagaaggaagaaacaagttctgccgaagaagaagaagaagatcccttttaccaaaacgaagatgattgttttggtatctgtttagattaaatttaatttcggtcacaaaatcgtctgtttgtaattaatgtgtaattaatgatggacaatactacctgtcctgtagccattaaagtctcggtcgaaactacttgtcttgtaacaaacagtcaaatagtcccggtcaaaactaccggcaactaccggtcttagatttttggctatataaggagtcctcaagtattttaaaagcgcgggaccaaatggttcccgcatgtcatcgggtccgccgcctctggatgacaaatggtgcagaagacgactttagtctctgcatgctattatgctttgagtcctataggtagcaaaagaaagtgcgggaccaaatggttcccgcatgtcatcgggcccgccgcctctggatgacaaaaggcgcagaagacgatgttagtctctgcatgctatcatgctttgagtcttatagatagcaaaaaggtgtgcggataaccgcttggggtatttctgcttgtcacatgactccaaggtcagtatgacagagattgtggggcggtcgacaaaagcgaggctcttgctcctacgtatcctcaatgaggatctcagacctacgtagttctggataacttgtgagactaaaaatagtctcgg

SEQ ID NO: 7553 - DNA, 1142 bp, Glycine max
  Gm_smallRNAprecursor_386
gaccaatcccagagatattcccagaaacggtccaacaaggattttcccaatttaagaaacaatacaattcgcaggaatcacgaattccagcagatcttaaatacttttcaagctttgcactgtcatggatattctcatggcaatatcgttacagcaagactgaaaagacaaaccaatatccatcactacaaagacacgcatttgtaaaatggtggacacaatttgactcatccaaagcggatccagaacaagtaaaactatggttcaaatcccatccagaattcctcaaagcggctgatccagagacttctgtgtttttgaaccaaaagtctcatctggcagcatttttagcaagatcgacatcaaaggaggtcttagctaaaaatctgaaggaagttctacaaatgttacaacaggaagaagaagtttcatcctcaaagaaggaagaaacaagttctgccgaagaagaagaagaagatcccttttaccaaaacgaagatgattgttttggtatctgtttagattaaatttaatttcggtcacaaaatcgtctgtttgtaattaatgtgtaattaatgatggacaatactacctgtcctgtagccattaaagtctcggtcgaaactacttgtcttgtaacaaacagtcaaatagtcccggtcaaaactaccggcaactaccggtcttagatttttggctatataaggagtcctcaagtattttaaaagcgcgggaccaaatggttcccgcatgtcatcgggtccgccgcctctggatgacaaatggtgcagaagacgactttagtctctgcatgctattatgctttgagtcctataggtagcaaaagaaagtgcgggaccaaatggttcccgcatgtcatcgggcccgccgcctctggatgacaaaaggcgcagaagacgatgttagtctctgcatgctatcatgctttgagtcttatagatagcaaaaaggtgtgcggataaccgcttggggtatttctgcttgtcacatgactccaaggtcagtatgacagagattgtggggcggtcgacaaaagcgaggctcttgctcctacgtatcctcaatgaggatctcagacctacgtagttctggataacttgtgagactaaaaatagtctcgg

SEQ ID NO: 7554 - DNA, 1105 bp, Glycine max
  Gm_smallRNAprecursor_387
tcgattatgtttctatccatcagactcactgttttgtttggataacaattaaaatatactggaccttgtcctaggctggtttcgactgttccaattagggagtcttcaaatttattatgcctaatatctcttagacacatcagcactactgcatctatgcccatgtctattaagggcttgatggctacttgtacacagccgatgtgtaaatatttatattttcgactatgttcataaattgaaatttttgaaagtaaatggaattcttcccctatgtcttgccctagaggaatattgttttctaccgttttgattatataatcaaagttgtgcttatctttcattgtttcaggaacatatagttgatcctgagggatttctgggatgttccagtcatccatgttttgattgatatcttcgaatcagacttcttcatcgaagagattgtgtttaggggcgacctcttgggtctggttatcttgatcgtttaataagtttgaatttctggaagaagttgatgaagaggaattagaacgaaaggaaatacgcaaaaaagaacgcaataatcttgacatgattataaaatcctctaatatcttcgtcctcatttggttccatagaaatatttccataagtaaatatgtaacaaaattttttggatctgaattatttttaagaaaaactctttttttttttttgaaaaatagtttgaacaggaatcctatagccactagtatattatgtcttgatattttggttaaacaatacaccttagccactactatctttgatattcggggatttattgttgttacttccacattaatgtcttcaataattggagcgggtcggggatcagacgatgtggccttctccatgactcatttttcagggagagttacttcatcccattttattattctttttaaagagacgttggcttttgtcatatctataataaataaggttgtttctcccttttgtggttgtaacaggactctagaagcacaagtgttcatgaccttgtactggatcctatagattaaagctgttgggattgatccttctttcatgtcaaggccatgaaagtggatgtttgagaaca

SEQ ID NO: 7555 - DNA, 1105 bp, Glycine max
  Gm_smallRNAprecursor_388
tcgattatgtttctatccatcagactcactgttttgtttggataacaattaaaatatactggaccttgtcctaggctggtttcgactgttccaattagggagtcttcaaatttattatgcctaatatctcttagacacatcagcactactgcatctatgcccatgtctattaagggcttgatggctacttgtacacagccgatgtgtaaatatttatattttcgactatgttcataaattgaaatttttgaaagtaaatggaattcttcccctatgtcttgccctagaggaatattgttttctaccgttttgattatataatcaaagttgtgcttatctttcattgtttcaggaacatatagttgatcctgagggatttctgggatgttccagtcatccatgttttgattgatatcttcgaatcagacttcttcatcgaagagattgtgtttaggggcgacctcttgggtctggttatcttgatcgtttaataagtttgaatttctggaagaagttgatgaagaggaattagaacgaaaggaaatacgcaaaaaagaacgcaataatcttgacatgattataaaatcctctaatatcttcgtcctcatttggttccatagaaatatttccataagtaaatatgtaacaaaattttttggatctgaattatttttaagaaaaactcttttttttttttgaaaaatagtttgaacaggaatcctatagccactagtatattatgtcatgatattttggttaaacaatacaccttagccttactgccctttatccaccacgggtcttactgctacagtaccattcaactaaaatattagactgcagtacttccaggaagtactgtttaaacatctactgtacaaattaaaataaaatatgactcatactatacaaggtgtcagatccataaactttgctatcatacgcccttacggactgcattcctacttccccatcaggctctgataccagagatcagcagaaaggatacaaacgaacagataggaagtaagagtaatgcaatatgacaaatgcagaaatttaaaatttgtaaaacagttatcaagggcacaccgaaatccggctt

SEQ ID NO: 7556 - DNA, 1057 bp, Glycine max
  Gm_smallRNAprecursor_389
tacagtaccattcaactaaaatattagactgcagtacttccaggaagtactgtttaaacatctactgtacaaattaaaataaaatatgactcatactatacaaggtgtcagatccataaactttgctatcatacgcccttacggactgcattcctacttccccatcaggctctgataccagagatcagcagaaaggatacaaacgaacagataggaagtaagagtaatgcaatatgacaaatgcagaaatttaaaatttgtaaaacagttatcaagggcacaccgaaatccggcttacaaacccaggtttttgaaaacaaagaaaccgaagcggcggcagagccgcacaggatcggtgaagggagaagggagatgtgaaaaataaaactttgaatttattgaaatcgaaagaaaagcttacaaagaggttttccctaggcagagcttctctctctaagacctgattttgagactatctgaaagggtgcgtcacaaagggaacgaggactcctttaaatagacccaatattttactgtttcaacagtatcggtaatgtttaccggaactgttacaaaaactttttcaaattacattattatcgggaaccgaataattagttacaataattcatgattactacaactaactaatcattgtctaacgatataccaaaacagtcatcctcattctggtagaatggatcatcttcctagtcatcattattctcagatgattcggcctccttcttggggggttcttcttcttcttcctgttgaagtagttggagaacttccttaagattctgagcaagactctctttagattttgagcttgctaagaatgctgcaagttgagacttttgattcagaaacagagatgtctctagattagcaggctagagaaactcagggttgctctgaaaccagttcttgacttgttctggagcatcctttgaggtatcgaattgtgaccaccactttacaaaggcatgtctctgcaatggtggatattgtttgctgttttcggcttttccatatctatattgccatgaaaaaa

SEQ ID NO: 7557 - DNA, 1215 bp, Glycine max
  Gm_smallRNAprecursor_390
aacatctactgtacaaattaaaataaaatatgactcatactatacaaggtgtcagatccataaactttgctatcatacgcccttacggactgcattcctacttccccatcaggctctgataccagagatcagcagaaaggatacaaacgaacagataggaagtaagagtaatgcaatatgacaaatgcagaaatttaaaatttgtaaaacagttatcaagggcacaccgaaatccggcttacaaacccaggtttttgaaaacaaagaaaccgaagcggcggcagagccgcacaggatcggtgaagggagaagggagatgtgaaaaataaaactttgaatttattgaaatcgaaagaaaagcttacaaagaggttttccctaggcagagcttctctctctaagacctgattttgagactatctgaaagggtgcgtcacaaagggaacgaggactcctttaaatagacccaatattttactgtttcaacagtatcggtaatgtttaccggaactgttacaaaaactttttcaaattacattattatcgggaaccgaataattagttacaataattcatgattactacaactaactaatcattgtctaacgatataccaaaacagtcatcctcattctggtagaatggatcatcttcctagtcatcattattctcagatgattcggcctccttcttggggggttcttcttcttcttcctgttgaagtagttggagaacttccttaagattctgagcaagactctctttagattttgagcttgctaagaatgctgcaagttgagacttttgattcagaaacagagatgtctctagattagcaggctagagaaactcagggttgctctgaaaccagttcttgacttgttctggagcatcctttgaggtatcgaattgtgaccaccactttacaaaggcatgtctctgcaatggtggatattgtttgctgttttcggcttttccatatctatattgccatgaaaaaatccatgacaaggcacaactggaaaagtactttaaatctgccggaattcttgattccttgctattgaagagcttggtgaattgttggaatccttgttggacttcttctggaaatatctgcggagttggtccgaagtagttccaccattggaggaaccaatttggaaaattatacacagtgttattcttgaagtaaattagccatgaatgcttaaa

SEQ ID NO: 7558 - DNA, 1158 bp, Glycine max
  Gm_smallRNAprecursor_391
atcaagggcacaccgaaatccggcttacaaacccaggtttttgaaaacaaagaaaccgaagcggcggcagagccgcacaggatcggtgaagggagaagggagatgtgaaaaataaaactttgaatttattgaaatcgaaagaaaagcttacaaagaggttttccctaggcagagcttctctctctaagacctgattttgagactatctgaaagggtgcgtcacaaagggaacgaggactcctttaaatagacccaatattttactgtttcaacagtatcggtaatgtttaccggaactgttacaaaaactttttcaaattacattattatcgggaaccgaataattagttacaataattcatgattactacaactaactaatcattgtctaacgatataccaaaacagtcatcctcattctggtagaatggatcatcttcctagtcatcattattctcagatgattcggcctccttcttggggggttcttcttcttcttcctgttgaagtagttggagaacttccttaagattctgagcaagactctctttagattttgagcttgctaagaatgctgcaagttgagacttttgattcagaaacagagatgtctctagattagcaggctagagaaactcagggttgctctgaaaccagttcttgacttgttctggagcatcctttgaggtatcgaattgtgaccaccactttacaaaggcatgtctctgcaatggtggatattgtttgctgttttcggcttttccatatctatattgccatgaaaaaatccatgacaaggcacaactggaaaagtactttaaatctgccggaattcttgattccttgctattgaagagcttggtgaattgttggaatccttgttggacttcttctggaaatatctgcggagttggtccgaagtagttccaccattggaggaaccaatttggaaaattatacacagtgttattcttgaagtaaattagccatgaatgcttaaatttactattttgatgccagaacacattggtccaggcatcaatgtagtcccaataattatatcttgcaggatcaaaaggtgcagaaattttttgggttggtttaagtttgagccataatgtcgtggctacataacctttaggatttggattgtggaat

SEQ ID NO: 7559 - DNA, 1105 bp, Glycine max
  Gm_smallRNAprecursor_392
tcgagaatgtttctgtccatcagactcactgttttgtttggataacaattaaaatatactggaccttgtcctaggctggtttcgactgttccaattagcgagtcttcaaatttattatgcctaatatctcttagacacatcagcactgctgcatctatgcccatgtctattaagggcttgatggctacttgtacacagccgatgtgtaaatatttatattttcgactatgttcataaattgaattttttgaaagtaaatggaattcttcccctatgtcttaccctagaggaatattgttttctaccgttttgattatataatcaaagttgtgcttatctttcattgtttcgggaacatatagttgatcctgagggatttctgggatgttccaatcatccatgttttgattgatatcttcgaatcggacttccttatcgaagagattgtgtttaggggcaacctcttgggtctggttatcttgatcgtttaataagtttgaatttctggaagaagttgatgaagaggaattagaccgaaaggaaatacacaaaaaagaacgcaataatcttgacatgattataaaatcctctaatatcttcgccctcatttggttccatagaaatatttctgtaagtaaatatgtaacaaaattttttggatctgaattatttttgagaaaaactcttttttttttaagtaccaaatctaaatacccattccacaatccaaatcctaaaggttatgcagccacgacattatggctcaaacttaaaccaaccgaaaaaaatttctgcaccttttgatcctgcaagatataattattgggactacattaacgcctagaccaatgtgttctggcatcaaaatagtaaatttaagcattcatggctaatttacttcaagaataacactgtgtataatgttccaaattggttcctccaatggtggaactacttcggaccaattccgcagatatttccagaagaagtccaaaaaggattccaacaattcaccaagctctacaaattaaaataaaatatgactcatactatacaaggtgtcagatccataaactttgctatcatacgcccttacggactgtat

SEQ ID NO: 7560 - DNA, 1037 bp, Glycine max
  Gm_smallRNAprecursor_393
ttagtgggacagacacttaacactttccttgcttggccaacacatcttgtgaagcgtttatcagaacaagtattttactctgattatatatttatttttttcaattaatttgttcactgtaatcaaaactttctaattaactatgttttatcaataggcagctgtgtctccaacaaaacctccagagagcccggatgaagaggtcgatgatcccctgtacctgatgacattgaccatcccacaactgtttttgaagccgctccaggttatgtgggatgctaccatattcggggtgtttaatcaaaacttcccgttgtaaataaagcacgaagatctctctgaaattgcacatggtggtcaatgtctcagcatatctgttatacagttgtggattctgtaagtcattttagattactattaattaccaaagtaattgttttaaattcatacataattaactttgacttaacaacacagccatctgactgacacaagtgtgcgagcggggaattctgatgtgtatggattcctcgagccacagtccattcagagatctgggcaatcacaatttgaatccgaaagttacatcaagagttggatacagagttcaaaacgagatgtttaccttggagcctatctgaataggtaagttaaacacaataattgaatttaaataatctatactactacaataacccatattcgtctctactgcagtggacactggcaaatggtcgtcattctacctaaggaaaacctagttgtctggttttgttctttgcataacaggccagacaactaccttaagggaataattaacaggtccgtattgttttcaatacattttcattggcataactcaataacatcaatattttaatgttccttatattcaacactagtgctttgaaaggacttgatgatactccacaaccgaaatccaaggctgctgctaggtgaattgttgttaaggtacgtgatttaaataaaagttttacttatatatattttatgtgtgtgtacactaattgtagtta

SEQ ID NO: 7561 - DNA, 1159 bp, Glycine max
  Gm_smallRNAprecursor_394
ccatttttcgagaagagttacctcatcccattttatggttcttgggagagaaacattggcctttgtcatatcagtgataaacaaagttgtctctcctttttgaggttttaataggactctcgatgcacaagtattcatgacattgtattggatcctatagattaaagctgctcggattgatccttctttcacgtcaaggccatgaaagtggatgtttaggaatagagagtcaagaatgtttctgtccattagactcactattttttttggataacaattgaagtatatcggaccttgtcctaagcttgtttctatggttcctattaaggagtcttcaaattttttgtgcctaatgtctctaaggcacattaaaactgttgaatctatgcccatatcaattaagggcttgatggctacttgtacataacctatgtggagatatttgtatttacggttgtgttcatatattgaatttttggaaagtaaatgaaattcttcccctatatcttgtcctagaggaatattattttcaactattttgattatgtaatcaaaattatgtttgtctttaattgtctcaggaacatatagagtatcctgagggatttttggaatgttccagtcatccatattttggtttatatcaacgaatcggacttcctcatcgaagagattgtgttttggggcgacctcgtgggtctggttttcttgtttattgaaataattggtgttttggggagaattcattgtggatgaagaactagattagttagatctgaacgaaatacgggagaaagatcgaaaacggcgagacatatgtaaaacatcctctagcatcgaaaacggcgagacatatgaaattcttttagcctattagttgatttgagtcaaatcctgcatgttagttagtccataacatgttcatgcaaaattcttaaagagtctttgattgtgaaccttttcttgagcttttaagtttccttatgattgtgtctattgtgaatttgagttttggtgattgaattgctggctgaaattttgatcctaagtgaatattgaactcctaaaactgtggtaaacaagcctagtgagttcaacatacataggaaggttgaaagtaagcctaaggcaatcaatatacgatgcttaaagaatttga

SEQ ID NO: 7562 - DNA, 1044 bp, Glycine max
  Gm_smallRNAprecursor_395
ccattgtcatacataggccccttaagcagtcgtatacacataataccgcatggggaagcaaaaaaaagaaaataaaagagagggggttattacagaacctgttaaagtaagagatttgaaaatttcagacccagattgggattcatgcgccactttcccaagttgaacaaccccgaaagtgggagagaaacaaagagtgatttttttctgggttccaagtgagtggaaaacttgcaatgaaaaagaagtgtgagatttatcaagacctaccatgtctctagccccagtggctaaaccattcaaaagaccaattttgcaggaacaatttataaagggatttataaaactggaagaccaaatgtgtgaattaaattatagggggaccaaaatcgaaattggagtaaaactgggggaccaaaagtgcaattttacctacaaaaaatgaagcctttatatggaatcactcagacgttgacacgcgacattaacacatagcagtcaacgtctgaggttaacggtcaacgtccaaatcgggcttccaggaccaattttgcagggatttataaaactgggggaccaaatttgtgaattaaattatattgggaccaaatccgtaattggagataaaatgggggacgaattttgcaattttgcctatattataactagtgtaataactcatacttgtatgttaaaaacctttttatatcaaacctttttcattttattttattttggtcttaaccttttgttcatcaagggaaaggaatcttgattaatctggagtttggccagaaggtaagtaaagtctgataaaatattattggcaagcataccaatgtcttcataggttataaattttataaaagagatcatcttcatagggacttgagttactcagtttctccagataaaagtaaacagtttaatatatatatatatatatatatatatatatatatatatatatatatatatatatatatatatataaatttaatcaaaatttcatgggtttaacaaaagaacggtaaattgcttaaa

SEQ ID NO: 7563 - DNA, 1183 bp, Glycine max
  Gm_smallRNAprecursor_396
tgaatcattttgtgaagaacatggtattgaacacaatttttctgcacctagaaccccttaacaaaatgaagttgttgagaggaaaaataggtcattggaagaaattgctagaactttattaaatgaaacttttcttccaaaatatttttgggctgaagccgtcaatactgcatgttacatcatgaatagggcattaataagacccattttaaagaaaacctcatatgagttatataatggtagaaaactcaacatttcacatctacatgtttttggttgcaaatgttttgtgcttaataatggtaaagacaatctaggaaaatttgatgcaaaatctgatgaaggcatctttcttagatattcattacaaagcaaagcatataggatatataataaaagaactatgaatattgagaaatctattcatgttacttttgatgaatctaatgctatcttgtcaagaaagaatatgcaagatgatattgcagaatctttagaacaaatgcatattcatggacaagattctaaaggaaaaggtaaaggaagcaatgaagatcctccagaagaagtcaaatccaatgatgaacttccaaaagaatggaaagcttcaaaagatcatccccttgacaacattattggtgatatctcaaaaggggtaacaactagacattctcttaaagatttatgcaataatatgacttttgtatctatgattgaacctaaaaatataaaagaagccatagtagatgataactggattattgccatgcaagaagaactgaatcaatttgaaagaaacaatgtgtgggaacttgtagagagacctaaaaattatcccatcataggaacaaaatgggtatttagaaataagttagatgaacatggaataatcattagaaataaggctagattagttgcaaaaggatataatcaagaagaaggtatagattatgaggaaacgtatgctccagttgctagattagaagccattagaatgctcttagcatatgcatccataatgaattttaagctttattaaatggatgttaaaagtgcttttctaaatggcttaattcaagaagaagtatatgttgaacaaccaccaggttttgaaatattggataagccaaattatgtttataaattgaaaaaggctttatatggcttgaaagaagtccctagg

SEQ ID NO: 7564 - DNA, 1061 bp, Glycine max
  Gm_smallRNAprecursor_397
ttcttggcacagtaagaaacaaaatagtattgctttatccactgcagaagcggaatatattcctgccagccgttgttgtgctcaaatcttatggatgaagcaacaaccttctgattatggaatctttcttgaccttatacctattagatgtgataatacaagtgcaattaatctctccaagaatccagttcaacactctagaactaaacatatagaaattaggcaccattttcttagagatcatgttctaaagggagattgtgtattagagtttgttaatagtaagaatcaacttgctgatattttcacaaaacctctccccaaagaagcattcttctctattagaagggaattaggcctcttagatgttagtgatttagataaataaggattgattgattaatttacttatgattaattgtttatgttaagtatgttattttgattgattttgtttaaattcttgttattatgatagaatttatgaattcctgtgtgttttatatttgaatgcttgaattaagtgcattagtagtgataattaataatattagatgtatttagcatagacataggtaattttttttagaaactagcctagtttatgctctggtaatcgattaccatccagtgtaattgattacacaagaacaggaagcatgtaatcgattacaacatcctgtaatcgattaccagaaggcttattagtcctgtaatcgattaccaagccttgtaatcgattacaactcgtcctcgtctataaatacccacgaaacctgtgttgctgcacagccaagacctttcctcgtgcctcctccatccctaaatcttcaaactttcgtatcttactcaaatcttcaccaaaacacgtctcgtaaagcccaatcttcctctttttcactcctctttcacttccaccgattgaaatccactaaaacttcatcaaatggcagaaccatcgaagaagagaaagggatcatcctccaccgccgccgctcatcgccgccacggactatccgaagcacccacaacacctattcatccctctttgtcatctccaa

SEQ ID NO: 7565 - DNA, 1035 bp, Glycine max
  Gm_smallRNAprecursor_398
gagagattcattcttctcttctttctaattctctaagggattaagagaccgagggtctcttgttgtaaaagaattctgaacacaaaggaaggatagtccttgtgtgttcagaacttgtaaaaggattttacaagaaagtggaactctcaagcgggttgcttggggactaaacgtaggcacaagggtgtggccgaaccagtataaatccgagtttgcactttctcttcccttaaactcttttatttattattgttttatatttatattcagattgttctatttgaatcaatatttaagaagttcattgttaagggaatttgtaaattgaatagaaagtgaaatagaactttaattggggaaatagtttgtgatatcttaattcaacccccccttcttaagatatctaaggccacttgtctaacatagacttgttagacaagtggtatcagagcataaaagtctgaaatccaaatactacaagataaataaagtactgaacataataatctaagtagcataaccaaaatacacggcttataagagacatagaattagaaactaaattctaagaaggtagaggtggtggtggaagagcgaaactctgacgaatgtaacccacatcctcttcatgttgtgtgaggcgaatatccatgccggcaaaacgtgtatccaatgagtcgaaacgttcaccaacataagaacgaagatcccgtaattcggaaagaacttcagtcatgagtgctaaatcatctagctgagaaagaggtgaaggagtacgctcatcttgaggagggagtgcgtctttcttcagccattgaccattccgatccttacggtatccaaaggaagtcactgcaccagcaccaattgcaaaggaacgcttgacttgaacaaatggttcatcatcaagcggaatttaaaaatgccgcagaaacaaagttatcaattgagggtaagggagaggtgcattggtcggtaatgtcttaagcattcagtaccgaaccaagtgggcccagtcgatctgacgaccggtaa

SEQ ID NO: 7566 - DNA, 1126 bp, Glycine max
  Gm_smallRNAprecursor_399
aggattaacacaaactttcttctggtaaaaaaccttaagaatgaagtaatcttaggaacacccttcattagagccctgtttcccatccaaatatctaatgaaggaataaccacaaattatttaggaagaaaaattatatttaatttttctactaaaccaatttccagaaatataaattttatagaaaataagattaatcaaattaacttcttaaaagaagaagtatcttttaataatattcagatacaactaggaaaaccccaagtaaaagaaaaaattcaatctttattaaatcatattgaatcaactgtctgctctgaattgccacatgcattttgggacagaaagaaacatattgttgatctcccctacgagaaggactttagggaaaaacaaattcccacaaaagccagaccaatccaaatgaatgaagaactccttcaatactgtcaaaaggaaatcaaggatttacttgataaaggcctaatccggaaaagcaaaagcccatggtcttgtgcggctttttatgtcaacaaacaatctgagattgagcgtggaacaccccgcttagtcataaattacaaaccactaaatcaagcattacaatggattagatatcctattccaaacaaaaaagatttgcttaacagattaaattctgcaaagatattttcaaaatttgatatgaaatctggattttggcaaatccaaatccaagaatcagataggtacaaaacagcattcactgtacctttcgggcaatatgaatggaatgtaatgccattcggactgaagaatgccccttcagaatttcaaaaaattatgaatgatattttcaatccctattcaaaatttgttattgtctacatagatgatgttttaatcttttcccaaaacattgaccagcatttcaaacatctccaaaccttcatccatatcatcaaacaaaatggtttggcagtctccaaatcaaaaatcaatcttttccaaacacgaattcgattccttggtcacaatatttatcaaggaacaatcgttccaatcgaaaggtcaattgagtttgctagcaaattccctaatcaaatcttagacaaaacccagttacaaagatttctaggttgtctaa

SEQ ID NO: 7567 - DNA, 1189 bp, Glycine max
  Gm_smallRNAprecursor_400
cctttcaaagcaaccgccaaagcattccccccgggattccattacaagccaatagccacaaacaaaacccgcaaattctacgaattcatcctaatagatacaaactcagtatctattaaacacttcaaagaccccaaagatccaaatctaaatacccattccacaatccaaatcttgaaggtgatgcagccacggcattatggctcaaacttaaaccaacccaaaaaattctctgcaccatttgaccctacaggatataattattgggattacattgacgcctggaccaatgtgttctggcatcaaaatagtaaattcaagcattcatggctgatttacttcaaaaataatactgcatataattttccaaattggttcctccaatggtggaactacttcggaccaattccacaaatatttccagaagaagtccaacagggattcgaacaattcaacaagctctataatagcaaggaatcacgtattccggcagacttaaagtacttttccagttttgccttgtcatggatcttttcatggcaatacagatacggaaaaactgaaaacaacaagcaatatccaccattacagagacacgcctttgtaaaatggtggtcacaattcgatacctcaaaggctgctccagatcaagtcaagaactggttccagagcaatcctgagttccttaaacctgctgatccagagacatctttgtttctaaatcagaagtcgcaactggcagcattcttagcaagctcaaaatctaaagagagtcttgctcagaatctcaaagaagttctccaactacttcaacaggaagtggaagaagaaccttccaagaaggaagctgaatcatccgagactaatgatgaccaagaagatgatccattctaccagaatgaagatgactgttttggtatatcattggacgacgattaattagttgtagtaatcatgaattattgtgactaatttaaataatgtaatttgtaaaagttttgtaacagttccggtaaacattaccgttaaacattaccgttactgtagaaacagtaaaaattgggtctatttaaaggagtcctcgtcccctttgtgaggcaccctttcagatagtcccagaatcaggtttttagagagagaagctctgcctagggaaaaactctttgtatgcttttctttcagttttaat

SEQ ID NO: 7568 - DNA, 1231 bp, Glycine max
  Gm_smallRNAprecursor_401
taaatacccattccacaatccaaatcttgaaggtgatgcagccacggcattatggctcaaacttaaaccaacccaaaaaattctctgcaccatttgaccctacaggatataattattgggattacattgacgcctggaccaatgtgttctggcatcaaaatagtaaattcaagcattcatggctgatttacttcaaaaataatactgcatataattttccaaattggttcctccaatggtggaactacttcggaccaattccacaaatatttccagaagaagtccaacagggattcgaacaattcaacaagctctataatagcaaggaatcacgtattccggcagacttaaagtacttttccagttttgccttgtcatggatcttttcatggcaatacagatacggaaaaactgaaaacaacaagcaatatccaccattacagagacacgcctttgtaaaatggtggtcacaattcgatacctcaaaggctgctccagatcaagtcaagaactggttccagagcaatcctgagttccttaaacctgctgatccagagacatctttgtttctaaatcagaagtcgcaactggcagcattcttagcaagctcaaaatctaaagagagtcttgctcagaatctcaaagaagttctccaactacttcaacaggaagtggaagaagaaccttccaagaaggaagctgaatcatccgagactaatgatgaccaagaagatgatccattctaccagaatgaagatgactgttttggtatatcattggacgacgattaattagttgtagtaatcatgaattattgtgactaatttaaataatgtaatttgtaaaagttttgtaacagttccggtaaacattaccgttaaacattaccgttactgtagaaacagtaaaaattgggtctatttaaaggagtcctcgtcccctttgtgaggcaccctttcagatagtcccagaatcaggtttttagagagagaagctctgcctagggaaaaactctttgtatgcttttctttcagttttaataaatttctcccttctcccctcactgatcctgtgcggctctgccgccgcttcggtttctttgttttcaaaaacctgggtttgtaagccgtttcggtgtgcccttgatatctgctttacaattttataattcttatttttttattatcatactgcattcttacttcctatctgtccgtttgatcttattccg

SEQ ID NO: 7569 - DNA, 1124 bp, Glycine max
  Gm_smallRNAprecursor_402
attccacaatccaaatcttgaaggtgatgcagccacggcattatggctcaaacttaaaccaacccaaaaaattctctgcaccatttgaccctacaggatataattattgggattacattgacgcctggaccaatgtgttctggcatcaaaatagtaaattcaagcattcatggctgatttacttcaaaaataatactgcatataattttccaaattggttcctccaatggtggaactacttcggaccaattccacaaatatttccagaagaagtccaacagggattcgaacaattcaacaagctctataatagcaaggaatcacgtattccggcagacttaaagtacttttccagttttgccttgtcatggatcttttcatggcaatacagatacggaaaaactgaaaacaacaagcaatatccaccattacagagacacgcctttgtaaaatggtggtcacaattcgatacctcaaaggctgctccagatcaagtcaagaactggttccagagcaatcctgagttccttaaacctgctgatccagagacatctttgtttctaaatcagaagtcgcaactggcagcattcttagcaagctcaaaatctaaagagagtcttgctcagaatctcaaagaagttctccaactacttcaacaggaagtggaagaagaaccttccaagaaggaagctgaatcatccgagactaatgatgaccaagaagatgatccattctaccagaatgaagatgactgttttggtatatcattggacgacgattaattagttgtagtaatcatgaattattgtgactaatttaaataatgtaatttgtaaaagttttgtaacagttccggtaaacattaccgttaaacattaccgttactgtagaaacagtaaaaattgggtctatttaaaggagtcctcgtcccctttgtgaggcaccctttcagatagtcccagaatcaggtttttagagagagaagctctgcctagggaaaaactctttgtatgcttttctttcagttttaataaatttctcccttctcccctcactgatcctgtgcggctctgccgccgcttcggtttctttgttttcaaaaacctgggtttgtaagccgtttc

SEQ ID NO: 7570 - DNA, 1123 bp, Glycine max
  Gm_smallRNAprecursor_403
ttccacaatccaaatcttgaaggtgatgcagccacggcattatggctcaaacttaaaccaacccaaaaaattctctgcaccatttgaccctacaggatataattattgggattacattgacgcctggaccaatgtgttctggcatcaaaatagtaaattcaagcattcatggctgatttacttcaaaaataatactgcatataattttccaaattggttcctccaatggtggaactacttcggaccaattccacaaatatttccagaagaagtccaacagggattcgaacaattcaacaagctctataatagcaaggaatcacgtattccggcagacttaaagtacttttccagttttgccttgtcatggatcttttcatggcaatacagatacggaaaaactgaaaacaacaagcaatatccaccattacagagacacgcctttgtaaaatggtggtcacaattcgatacctcaaaggctgctccagatcaagtcaagaactggttccagagcaatcctgagttccttaaacctgctgatccagagacatctttgtttctaaatcagaagtcgcaactggcagcattcttagcaagctcaaaatctaaagagagtcttgctcagaatctcaaagaagttctccaactacttcaacaggaagtggaagaagaaccttccaagaaggaagctgaatcatccgagactaatgatgaccaagaagatgatccattctaccagaatgaagatgactgttttggtatatcattggacgacgattaattagttgtagtaatcatgaattattgtgactaatttaaataatgtaatttgtaaaagttttgtaacagttccggtaaacattaccgttaaacattaccgttactgtagaaacagtaaaaattgggtctatttaaaggagtcctcgtcccctttgtgaggcaccctttcagatagtcccagaatcaggtttttagagagagaagctctgcctagggaaaaactctttgtatgcttttctttcagttttaataaatttctcccttctcccctcactgatcctgtgcggctctgccgccgcttcggtttctttgttttcaaaaacctgggtttgtaagccgtttc

SEQ ID NO: 7571 - DNA, 1138 bp, Glycine max
  Gm_smallRNAprecursor_404
cacaccgaaacggcttacaaacccaggtttttgaaaacaaagaaaccgaagcggcggcaaagccacacaggatcggtgaggggagaagggagatatgaaaaacagaacttgaaatttattgaaactgaaagaaaagcttacaaagagtttttccctaggcagagcttctctctctaaaaacctgattctgagactatctgaaagggtgcctcacaaagggaacgaggactcctttaaatagactcaatttttactgtttctacagtatcggtaatgtttatcagatctgttacaaaacttttacaaattacattatttaaaagaaactgacaaattagttacaataattcatgattactacaactaattaatcgtcgtctaatgatataccaaaacagtattcttcattctggtagaatggatcatcttcttggtcatcattagtctcagatgattcagcttccttcttggaaggttcttcttccacttcctgttgaagtagttggagaacttctttgagattctgagcaagactctctttagattttgagcttgctaagaatgctgccagttgcgacttctgatttagaaacaaagatgtctccggatcagcaggtttaaggaactcaggattgctctggaaccagttcttgacttggtctggagcagcctttgaagtatcgaattgtgaccaccattttacaaaggcgtgtctctgtaacggtggatattgcttgctgttttcagtctttccgtatctgtattgccatgaaaagatccatgacaaggcaaaactggaaaagtactttaaatctgctggaatacgtgattccttgctattatagagcttgttgaattgttggaatctctgttggacttcttctgggaatatttgtggaattggtctgaagtagttccaccattggaggaaccaatttggaaaattatatgcagtattatttttgaagtaaatcagccatgaatgcttgaatttactattttgatgcctgaacacattggtccaggcgtcaatgtaatcccaataattatatcctgcagggtcaaatggtgcagaaatttttttgggttggtttaagtttgagccataatgtcgtggctgcataaccttcaaaatttg

SEQ ID NO: 7572 - DNA, 1071 bp, Glycine max
  Gm_smallRNAprecursor_405
cggcttacaaacccaggtttttgaaaacaaagaaaccgaagcggcggcaaagccacacaggatcggtgaggggagaagggagatatgaaaaacagaacttgaaatttattgaaactgaaagaaaagcttacaaagagtttttccctaggcagagcttctctctctaaaaacctgattctgagactatctgaaagggtgcctcacaaagggaacgaggactcctttaaatagactcaatttttactgtttctacagtatcggtaatgtttatcagatctgttacaaaacttttacaaattacattatttaaaagaaactgacaaattagttacaataattcatgattactacaactaattaatcgtcgtctaatgatataccaaaacagtattcttcattctggtagaatggatcatcttcttggtcatcattagtctcagatgattcagcttccttcttggaaggttcttcttccacttcctgttgaagtagttggagaacttctttgagattctgagcaagactctctttagattttgagcttgctaagaatgctgccagttgcgacttctgatttagaaacaaagatgtctccggatcagcaggtttaaggaactcaggattgctctggaaccagttcttgacttggtctggagcagcctttgaagtatcgaattgtgaccaccattttacaaaggcgtgtctctgtaacggtggatattgcttgctgttttcagtctttccgtatctgtattgccatgaaaagatccatgacaaggcaaaactggaaaagtactttaaatctgctggaatacgtgattccttgctattatagagcttgttgaattgttggaatctctgttggacttcttctgggaatatttgtggaattggtctgaagtagttccaccattggaggaaccaatttggaaaattatatgcagtattatttttgaagtaaatcagccatgaatgcttgaatttactattttgatgcctgaacacattggtccaggcgtcaatgtaatcccaataattatatcctgcagggtcaaatggtgcagaaatttt

SEQ ID NO: 7573 - DNA, 1072 bp, Glycine max
  Gm_smallRNAprecursor_406
cggcttacaaacccaggtttttgaaaacaaagaaaccgaagcggcggcaaagccacacaggatcggtgaggggagaagggagatatgaaaaacagaacttgaaatttattgaaactgaaagaaaagcttacaaagagtttttccctaggcagagcttctctctctaaaaacctgattctgagactatctgaaagggtgcctcacaaagggaacgaggactcctttaaatagactcaatttttactgtttctacagtatcggtaatgtttatcagatctgttacaaaacttttacaaattacattatttaaaagaaactgacaaattagttacaataattcatgattactacaactaattaatcgtcgtctaatgatataccaaaacagtattcttcattctggtagaatggatcatcttcttggtcatcattagtctcagatgattcagcttccttcttggaaggttcttcttccacttcctgttgaagtagttggagaacttctttgagattctgagcaagactctctttagattttgagcttgctaagaatgctgccagttgcgacttctgatttagaaacaaagatgtctccggatcagcaggtttaaggaactcaggattgctctggaaccagttcttgacttggtctggagcagcctttgaagtatcgaattgtgaccaccattttacaaaggcgtgtctctgtaacggtggatattgcttgctgttttcagtctttccgtatctgtattgccatgaaaagatccatgacaaggcaaaactggaaaagtactttaaatctgctggaatacgtgattccttgctattatagagcttgttgaattgttggaatctctgttggacttcttctgggaatatttgtggaattggtctgaagtagttccaccattggaggaaccaatttggaaaattatatgcagtattatttttgaagtaaatcagccatgaatgcttgaatttactattttgatgcctgaacacattggtccaggcgtcaatgtaatcccaataattatatcctgcagggtcaaatggtgcagaaattttt

SEQ ID NO: 7574 - DNA, 1040 bp, Glycine max
  Gm_smallRNAprecursor_407
cttacaaacccaggtttttgaaaacaaagaaaccgaagcggcggcaaagccacacaggatcggtgaggggagaagggagatatgaaaaacagaacttgaaatttattgaaactgaaagaaaagcttacaaagagtttttccctaggcagagcttctctctctaaaaacctgattctgagactatctgaaagggtgcctcacaaagggaacgaggactcctttaaatagactcaatttttactgtttctacagtatcggtaatgtttatcagatctgttacaaaacttttacaaattacattatttaaaagaaactgacaaattagttacaataattcatgattactacaactaattaatcgtcgtctaatgatataccaaaacagtattcttcattctggtagaatggatcatcttcttggtcatcattagtctcagatgattcagcttccttcttggaaggttcttcttccacttcctgttgaagtagttggagaacttctttgagattctgagcaagactctctttagattttgagcttgctaagaatgctgccagttgcgacttctgatttagaaacaaagatgtctccggatcagcaggtttaaggaactcaggattgctctggaaccagttcttgacttggtctggagcagcctttgaagtatcgaattgtgaccaccattttacaaaggcgtgtctctgtaacggtggatattgcttgctgttttcagtctttccgtatctgtattgccatgaaaagatccatgacaaggcaaaactggaaaagtactttaaatctgctggaatacgtgattccttgctattatagagcttgttgaattgttggaatctctgttggacttcttctgggaatatttgtggaattggtctgaagtagttccaccattggaggaaccaatttggaaaattatatgcagtattatttttgaagtaaatcagccatgaatgcttgaatttactattttgatgcctgaacacattggtccaggcgtcaatgtaatcccaataattatatc

SEQ ID NO: 7575 - DNA, 1068 bp, Glycine max
  Gm_smallRNAprecursor_408
cttacaaacccaggtttttgaaaacaaagaaaccgaagcggcggcaaagccacacaggatcggtgaggggagaagggagatatgaaaaacagaacttgaaatttattgaaactgaaagaaaagcttacaaagagtttttccctaggcagagcttctctctctaaaaacctgattctgagactatctgaaagggtgcctcacaaagggaacgaggactcctttaaatagactcaatttttactgtttctacagtatcggtaatgtttatcagatctgttacaaaacttttacaaattacattatttaaaagaaactgacaaattagttacaataattcatgattactacaactaattaatcgtcgtctaatgatataccaaaacagtattcttcattctggtagaatggatcatcttcttggtcatcattagtctcagatgattcagcttccttcttggaaggttcttcttccacttcctgttgaagtagttggagaacttctttgagattctgagcaagactctctttagattttgagcttgctaagaatgctgccagttgcgacttctgatttagaaacaaagatgtctccggatcagcaggtttaaggaactcaggattgctctggaaccagttcttgacttggtctggagcagcctttgaagtatcgaattgtgaccaccattttacaaaggcgtgtctctgtaacggtggatattgcttgctgttttcagtctttccgtatctgtattgccatgaaaagatccatgacaaggcaaaactggaaaagtactttaaatctgctggaatacgtgattccttgctattatagagcttgttgaattgttggaatctctgttggacttcttctgggaatatttgtggaattggtctgaagtagttccaccattggaggaaccaatttggaaaattatatgcagtattatttttgaagtaaatcagccatgaatgcttgaatttactattttgatgcctgaacacattggtccaggcgtcaatgtaatcccaataattatatcctgcagggtcaaatggtgcagaaatttt

SEQ ID NO: 7576 - DNA, 1069 bp, Glycine max
  Gm_smallRNAprecursor_409
cttacaaacccaggtttttgaaaacaaagaaaccgaagcggcggcaaagccacacaggatcggtgaggggagaagggagatatgaaaaacagaacttgaaatttattgaaactgaaagaaaagcttacaaagagtttttccctaggcagagcttctctctctaaaaacctgattctgagactatctgaaagggtgcctcacaaagggaacgaggactcctttaaatagactcaatttttactgtttctacagtatcggtaatgtttatcagatctgttacaaaacttttacaaattacattatttaaaagaaactgacaaattagttacaataattcatgattactacaactaattaatcgtcgtctaatgatataccaaaacagtattcttcattctggtagaatggatcatcttcttggtcatcattagtctcagatgattcagcttccttcttggaaggttcttcttccacttcctgttgaagtagttggagaacttctttgagattctgagcaagactctctttagattttgagcttgctaagaatgctgccagttgcgacttctgatttagaaacaaagatgtctccggatcagcaggtttaaggaactcaggattgctctggaaccagttcttgacttggtctggagcagcctttgaagtatcgaattgtgaccaccattttacaaaggcgtgtctctgtaacggtggatattgcttgctgttttcagtctttccgtatctgtattgccatgaaaagatccatgacaaggcaaaactggaaaagtactttaaatctgctggaatacgtgattccttgctattatagagcttgttgaattgttggaatctctgttggacttcttctgggaatatttgtggaattggtctgaagtagttccaccattggaggaaccaatttggaaaattatatgcagtattatttttgaagtaaatcagccatgaatgcttgaatttactattttgatgcctgaacacattggtccaggcgtcaatgtaatcccaataattatatcctgcagggtcaaatggtgcagaaattttt

SEQ ID NO: 7577 - DNA, 1048 bp, Glycine max
  Gm_smallRNAprecursor_410
gggagaagggagatatgaaaaacagaacttgaaatttattgaaactgaaagaaaagcttacaaagagtttttccctaggcagagcttctctctctaaaaacctgattctgagactatctgaaagggtgcctcacaaagggaacgaggactcctttaaatagactcaatttttactgtttctacagtatcggtaatgtttatcagatctgttacaaaacttttacaaattacattatttaaaagaaactgacaaattagttacaataattcatgattactacaactaattaatcgtcgtctaatgatataccaaaacagtattcttcattctggtagaatggatcatcttcttggtcatcattagtctcagatgattcagcttccttcttggaaggttcttcttccacttcctgttgaagtagttggagaacttctttgagattctgagcaagactctctttagattttgagcttgctaagaatgctgccagttgcgacttctgatttagaaacaaagatgtctccggatcagcaggtttaaggaactcaggattgctctggaaccagttcttgacttggtctggagcagcctttgaagtatcgaattgtgaccaccattttacaaaggcgtgtctctgtaacggtggatattgcttgctgttttcagtctttccgtatctgtattgccatgaaaagatccatgacaaggcaaaactggaaaagtactttaaatctgctggaatacgtgattccttgctattatagagcttgttgaattgttggaatctctgttggacttcttctgggaatatttgtggaattggtctgaagtagttccaccattggaggaaccaatttggaaaattatatgcagtattatttttgaagtaaatcagccatgaatgcttgaatttactattttgatgcctgaacacattggtccaggcgtcaatgtaatcccaataattatatcctgcagggtcaaatggtgcagaaatttttttgggttggtttaagtttgagccataatgtcgtggctgcataacct

SEQ ID NO: 7578 - DNA, 1047 bp, Glycine max
  Gm_smallRNAprecursor_411
ggagaagggagatatgaaaaacagaacttgaaatttattgaaactgaaagaaaagcttacaaagagtttttccctaggcagagcttctctctctaaaaacctgattctgagactatctgaaagggtgcctcacaaagggaacgaggactcctttaaatagactcaatttttactgtttctacagtatcggtaatgtttatcagatctgttacaaaacttttacaaattacattatttaaaagaaactgacaaattagttacaataattcatgattactacaactaattaatcgtcgtctaatgatataccaaaacagtattcttcattctggtagaatggatcatcttcttggtcatcattagtctcagatgattcagcttccttcttggaaggttcttcttccacttcctgttgaagtagttggagaacttctttgagattctgagcaagactctctttagattttgagcttgctaagaatgctgccagttgcgacttctgatttagaaacaaagatgtctccggatcagcaggtttaaggaactcaggattgctctggaaccagttcttgacttggtctggagcagcctttgaagtatcgaattgtgaccaccattttacaaaggcgtgtctctgtaacggtggatattgcttgctgttttcagtctttccgtatctgtattgccatgaaaagatccatgacaaggcaaaactggaaaagtactttaaatctgctggaatacgtgattccttgctattatagagcttgttgaattgttggaatctctgttggacttcttctgggaatatttgtggaattggtctgaagtagttccaccattggaggaaccaatttggaaaattatatgcagtattatttttgaagtaaatcagccatgaatgcttgaatttactattttgatgcctgaacacattggtccaggcgtcaatgtaatcccaataattatatcctgcagggtcaaatggtgcagaaatttttttgggttggtttaagtttgagccataatgtcgtggctgcataacct

SEQ ID NO: 7579 - DNA, 1198 bp, Glycine max
  Gm_smallRNAprecursor_412
aagaaaagcttacaaagagtttttccctaggcagagcttctctctctaaaaacctgattctgagactatctgaaagggtgcctcacaaagggaacgaggactcctttaaatagactcaatttttactgtttctacagtatcggtaatgtttatcagatctgttacaaaacttttacaaattacattatttaaaagaaactgacaaattagttacaataattcatgattactacaactaattaatcgtcgtctaatgatataccaaaacagtattcttcattctggtagaatggatcatcttcttggtcatcattagtctcagatgattcagcttccttcttggaaggttcttcttccacttcctgttgaagtagttggagaacttctttgagattctgagcaagactctctttagattttgagcttgctaagaatgctgccagttgcgacttctgatttagaaacaaagatgtctccggatcagcaggtttaaggaactcaggattgctctggaaccagttcttgacttggtctggagcagcctttgaagtatcgaattgtgaccaccattttacaaaggcgtgtctctgtaacggtggatattgcttgctgttttcagtctttccgtatctgtattgccatgaaaagatccatgacaaggcaaaactggaaaagtactttaaatctgctggaatacgtgattccttgctattatagagcttgttgaattgttggaatctctgttggacttcttctgggaatatttgtggaattggtctgaagtagttccaccattggaggaaccaatttggaaaattatatgcagtattatttttgaagtaaatcagccatgaatgcttgaatttactattttgatgcctgaacacattggtccaggcgtcaatgtaatcccaataattatatcctgcagggtcaaatggtgcagaaatttttttgggttggtttaagtttgagccataatgtcgtggctgcataaccttcaaaatttggattgtggaatgggtatttagatttggatctttggggtctttgaagtgtttattagatactgagtttgtatctattagaatgaattcgtagaatttgcgggttttgtttgtggctattggcctgtaatggaatcccggggggaatactttggcggttgctttgaaaggattcttgtcccagtattctg

SEQ ID NO: 7580 - DNA, 1086 bp, Glycine max
  Gm_smallRNAprecursor_413
tatctgaaagggtgcctcacaaagggaacgaggactcctttaaatagactcaatttttactgtttctacagtatcggtaatgtttatcagatctgttacaaaacttttacaaattacattatttaaaagaaactgacaaattagttacaataattcatgattactacaactaattaatcgtcgtctaatgatataccaaaacagtattcttcattctggtagaatggatcatcttcttggtcatcattagtctcagatgattcagcttccttcttggaaggttcttcttccacttcctgttgaagtagttggagaacttctttgagattctgagcaagactctctttagattttgagcttgctaagaatgctgccagttgcgacttctgatttagaaacaaagatgtctccggatcagcaggtttaaggaactcaggattgctctggaaccagttcttgacttggtctggagcagcctttgaagtatcgaattgtgaccaccattttacaaaggcgtgtctctgtaacggtggatattgcttgctgttttcagtctttccgtatctgtattgccatgaaaagatccatgacaaggcaaaactggaaaagtactttaaatctgctggaatacgtgattccttgctattatagagcttgttgaattgttggaatctctgttggacttcttctgggaatatttgtggaattggtctgaagtagttccaccattggaggaaccaatttggaaaattatatgcagtattatttttgaagtaaatcagccatgaatgcttgaatttactattttgatgcctgaacacattggtccaggcgtcaatgtaatcccaataattatatcctgcagggtcaaatggtgcagaaatttttttgggttggtttaagtttgagccataatgtcgtggctgcataaccttcaaaatttggattgtggaatgggtatttagatttggatctttggggtctttgaagtgtttattagatactgagtttgtatctattagaatgaattcgtagaatttgcgggttttgtttgtggctattggcctgtaatggaatcccgggggg

SEQ ID NO: 7581 - DNA, 1086 bp, Glycine max; identical to SEQ ID NO: 7580
  Gm_smallRNAprecursor_414

SEQ ID NO: 7582 - DNA, 1085 bp, Glycine max
  Gm_smallRNAprecursor_415
atctgaaagggtgcctcacaaagggaacgaggactcctttaaatagactcaatttttactgtttctacagtatcggtaatgtttatcagatctgttacaaaacttttacaaattacattatttaaaagaaactgacaaattagttacaataattcatgattactacaactaattaatcgtcgtctaatgatataccaaaacagtattcttcattctggtagaatggatcatcttcttggtcatcattagtctcagatgattcagcttccttcttggaaggttcttcttccacttcctgttgaagtagttggagaacttctttgagattctgagcaagactctctttagattttgagcttgctaagaatgctgccagttgcgacttctgatttagaaacaaagatgtctccggatcagcaggtttaaggaactcaggattgctctggaaccagttcttgacttggtctggagcagcctttgaagtatcgaattgtgaccaccattttacaaaggcgtgtctctgtaacggtggatattgcttgctgttttcagtctttccgtatctgtattgccatgaaaagatccatgacaaggcaaaactggaaaagtactttaaatctgctggaatacgtgattccttgctattatagagcttgttgaattgttggaatctctgttggacttcttctgggaatatttgtggaattggtctgaagtagttccaccattggaggaaccaatttggaaaattatatgcagtattatttttgaagtaaatcagccatgaatgcttgaatttactattttgatgcctgaacacattggtccaggcgtcaatgtaatcccaataattatatcctgcagggtcaaatggtgcagaaatttttttgggttggtttaagtttgagccataatgtcgtggctgcataaccttcaaaatttggattgtggaatgggtatttagatttggatctttggggtctttgaagtgtttattagatactgagtttgtatctattagaatgaattcgtagaatttgcgggttttgtttgtggctattggcctgtaatggaatcccgggggg

SEQ ID NO: 7583 - DNA, 1069 bp, Glycine max
  Gm_smallRNAprecursor_416
ttatcagatctgttacaaaacttttacaaattacattatttaaaagaaactgacaaattagttacaataattcatgattactacaactaattaatcgtcgtctaatgatataccaaaacagtattcttcattctggtagaatggatcatcttcttggtcatcattagtctcagatgattcagcttccttcttggaaggttcttcttccacttcctgttgaagtagttggagaacttctttgagattctgagcaagactctctttagattttgagcttgctaagaatgctgccagttgcgacttctgatttagaaacaaagatgtctccggatcagcaggtttaaggaactcaggattgctctggaaccagttcttgacttggtctggagcagcctttgaagtatcgaattgtgaccaccattttacaaaggcgtgtctctgtaacggtggatattgcttgctgttttcagtctttccgtatctgtattgccatgaaaagatccatgacaaggcaaaactggaaaagtactttaaatctgctggaatacgtgattccttgctattatagagcttgttgaattgttggaatctctgttggacttcttctgggaatatttgtggaattggtctgaagtagttccaccattggaggaaccaatttggaaaattatatgcagtattatttttgaagtaaatcagccatgaatgcttgaatttactattttgatgcctgaacacattggtccaggcgtcaatgtaatcccaataattatatcctgcagggtcaaatggtgcagaaatttttttgggttggtttaagtttgagccataatgtcgtggctgcataaccttcaaaatttggattgtggaatgggtatttagatttggatctttggggtctttgaagtgtttattagatactgagtttgtatctattagaatgaattcgtagaatttgcgggttttgtttgtggctattggcctgtaatggaatcccggggggaatactttggcggttgctttgaaaggattcttgtcccagtattctggttccatttgtaaaacattg

SEQ ID NO: 7584 - DNA, 1067 bp, Glycine max
  Gm_smallRNAprecursor_417
atcagatctgttacaaaacttttacaaattacattatttaaaagaaactgacaaattagttacaataattcatgattactacaactaattaatcgtcgtctaatgatataccaaaacagtattcttcattctggtagaatggatcatcttcttggtcatcattagtctcagatgattcagcttccttcttggaaggttcttcttccacttcctgttgaagtagttggagaacttctttgagattctgagcaagactctctttagattttgagcttgctaagaatgctgccagttgcgacttctgatttagaaacaaagatgtctccggatcagcaggtttaaggaactcaggattgctctggaaccagttcttgacttggtctggagcagcctttgaagtatcgaattgtgaccaccattttacaaaggcgtgtctctgtaacggtggatattgcttgctgttttcagtctttccgtatctgtattgccatgaaaagatccatgacaaggcaaaactggaaaagtactttaaatctgctggaatacgtgattccttgctattatagagcttgttgaattgttggaatctctgttggacttcttctgggaatatttgtggaattggtctgaagtagttccaccattggaggaaccaatttggaaaattatatgcagtattatttttgaagtaaatcagccatgaatgcttgaatttactattttgatgcctgaacacattggtccaggcgtcaatgtaatcccaataattatatcctgcagggtcaaatggtgcagaaatttttttgggttggtttaagtttgagccataatgtcgtggctgcataaccttcaaaatttggattgtggaatgggtatttagatttggatctttggggtctttgaagtgtttattagatactgagtttgtatctattagaatgaattcgtagaatttgcgggttttgtttgtggctattggcctgtaatggaatcccggggggaatactttggcggttgctttgaaaggattcttgtcccagtattctggttccatttgtaaaacattg

SEQ ID NO: 7585 - DNA, 1067 bp, Glycine max; identical to SEQ ID NO: 7584
  Gm_smallRNAprecursor_418

SEQ ID NO: 7586 - DNA, 1094 bp, Glycine max
  Gm_smallRNAprecursor_419
gatctgttacaaaacttttacaaattacattatttaaaagaaactgacaaattagttacaataattcatgattactacaactaattaatcgtcgtctaatgatataccaaaacagtattcttcattctggtagaatggatcatcttcttggtcatcattagtctcagatgattcagcttccttcttggaaggttcttcttccacttcctgttgaagtagttggagaacttctttgagattctgagcaagactctctttagattttgagcttgctaagaatgctgccagttgcgacttctgatttagaaacaaagatgtctccggatcagcaggtttaaggaactcaggattgctctggaaccagttcttgacttggtctggagcagcctttgaagtatcgaattgtgaccaccattttacaaaggcgtgtctctgtaacggtggatattgcttgctgttttcagtctttccgtatctgtattgccatgaaaagatccatgacaaggcaaaactggaaaagtactttaaatctgctggaatacgtgattccttgctattatagagcttgttgaattgttggaatctctgttggacttcttctgggaatatttgtggaattggtctgaagtagttccaccattggaggaaccaatttggaaaattatatgcagtattatttttgaagtaaatcagccatgaatgcttgaatttactattttgatgcctgaacacattggtccaggcgtcaatgtaatcccaataattatatcctgcagggtcaaatggtgcagaaatttttttgggttggtttaagtttgagccataatgtcgtggctgcataaccttcaaaatttggattgtggaatgggtatttagatttggatctttggggtctttgaagtgtttattagatactgagtttgtatctattagaatgaattcgtagaatttgcgggttttgtttgtggctattggcctgtaatggaatcccggggggaatactttggcggttgctttgaaaggattcttgtcccagtattctggttccatttgtaaaacattgaaaaatttgttttttgaaatgtaactgttac

SEQ ID NO: 7587 - DNA, 1037 bp, Glycine max
  Gm_smallRNAprecursor_420
ggttaacttactggggtaggcacttaacaccttccttgcttggccgacacatctcgtgaagcgtttatcagaataggtattttactgtcattaaatgctttttttttcaattgaatttttcactgtaattgaattatgttaattaactctgttggataaacagggagccgtgggacccataaaacctgcagatagaccggatcatgaggtcgatgatcccctatatcttatggcattgaccatcccacggctttttttgaagccgttgcaggttatgtgggatgctatcgtgtttggggtgtttaatcaagactttcccttgtacaaaaagcacgaagatctatctgaaatagcacacgatggtccaacatctctgttatatagttgtggattttgtaagccaatttagactattgttaatcacttaagttattgttttaaattcatacataattaactttgtgttaacaataataggcatctgactgagacaagtatgcgagcagggaattctgatgtgtatggattcctcgagccacagtccattcagagatctgagcaatcacaatttgaatcagaaagttacatcaagaactggatgcagaattcaaaacgggatgtctacctaggagcctacctgaatgggtaagtaaaactgaacaaataaatttaaataatgtataatactacaataacctatattggtctccactgcagcacacattggcaaatgatcgtcattttgcctaagaaaaatcttgttgtctggttttgttccttgcataataggtcagacaattaccttaaaggaataattaacaggtcagtgttgtttttcaatacatttgcattaatattactcagcaacatcaatattttaatgttccttgtattcaacagtgctttgaaaggacttgatgatactccacaacctaaatccaaggctggtgctaggtggattgttgttaaagtaagtgatttatatatatatatatatatatatatatatatatatatatatatatatatatatatta

SEQ ID NO: 7588 - DNA, 1044 bp, Glycine max
  Gm_smallRNAprecursor_421
tttttcatcgtaagtttttcactcacttgaaatccagaaaaaaaaaaatcactctttgtctctctcccacttccagagttgttcaacttaggaaagtgtcgcatgaatcccaacctgggtctgaaattttcagatctcttactttaataggttctgtaataaccccccctttttttttctttttttgctcccccatgcggcattatgtgtaaacgactacttaagtgacctatgtatgacaatggtatttttgtttgaaatttgaaatacaacttctccagtaatgaaatttgactgaatttataaagggatttataaaactgggggaccaaatgtgcgaattaaattataagggaaccaaaatcgaaatttgagtaaaactgggggacctaaagtacaattttacctacaaaaaatgaagcttttacagggaaccactctgacgttgacacatggcattgacatgtggcagtcacatgtggcattgacatgttgcagtcaacgtctgaggttaacggtcaacgtccaaatcgggcttctaggaccaattttgcagggatttataaaactgggtgaccaaatttgtgaattaaattataggggggccaaatccgaaattggagataaattggggaccaaaagtgcaattttgcctcttttttttttatctaaacaacatgtatcatttattggagataattatgttcaattcaaatgggataagatcacccgtgacacaactctctttatgcagttacatactaaaattcagaaatcaaattttttggtttaagttgaaacttttttcaactagtagtataagttgtggatttaagtcataataaatgaaaaaattagaaaaagtttgatatccctagctccaagggtttgaagttggttcacgctaacactaaactctagaatcaccagattcaatgatccgttttggtgaggccacaagaaaaaaataataataattgaaacattctatgagaactacttgacagtcccttaacttagaaagttcttgagagaaaaaatgtg

SEQ ID NO: 7589 - DNA, 1125 bp, Glycine max
  Gm_smallRNAprecursor_422
acgactaagataataaattgcatgttctatgccatcatcatcttcctgagccaacatgctaccaatggtcttatcagacgcagcaatatacaacttcatagacttgtttcgactaggaggcattaacacgggaggcttgatcagatattctttaatttcatcaaaagccttttgatgctcttcattccatttgaatggttcatctttcttgagtcgaagtaatggcgaaaaaatttgagctttgccacttagattcgaaatgaatcgcctcaagaagttgatttttcctagcaaagactgaagctgttttttggtcgaaggaggcttcgtctcaagaatagcctttgtcttgttttgatttatctcaatgccttttttatgcaccacaaaaccaaggaagtctcctgcacgcacacaaaaagcacattttaatggattcatttttaatccatgtttcctcattcgttcgaaagattgcctaaggtaatccaaatggctatcttctgaagaggatttgatgattatatcatcaatataaacttgcataaatgtgtcaataaaatcatgaaacatggaattcatggccctttgataagtggccccagcatttttcaacccaaaaggcataaccacccattcataagtgcctaaagcaccagggcatcgaaatgctgttttcgacacatcactttcagcaataaatatttggttataaccagaataaccatctaacatgcttaaaaattcgaagccagctgccgaatctaccaacatttccgctactggcatagcatattcatctttaggtgtagcattatttaaatccctaaaatctatgcatactctaagagttccattctttttaatgacagggactatatttgctaaccattcgacatacctggcagatctgatgaatttacacctcagcagcctttcgatctcttccttaattttggacatgatttctggtgcgaatcttcttggtagttgtttcactggtcttttgccttccttaatcggtaatttcatttcgaccatttctctgcttaacccaggcatttcgtggtaatcccaagcaaaacagtctttaaattctctgagaagaggcaccagcttttcttt

SEQ ID NO: 7590 - DNA, 1039 bp, Glycine max
  Gm_smallRNAprecursor_423
agcaatcaaagaatacaacatcagaaatcattttgattgcagaacaatttactctgaccaaagaaggctacactttgtctgcaagttacatgaaaatggttgtacatggagcttgggcgcatgcaattcaaagaggcataacaaatggattatgaagagtatcagaggtcatcacacttgtctcgtgccgatgctcagacaagatcatcgccaactcgacaaacacgtcatagcacagatcatccaaccaattgtcaaaacaaacccaactgtctccatcaagacattgattgtagagatcaaaacgttcatgaattataccccatcctacaagaagacatggttagcaaagcaaaaagcattggagatgattcatggaaactgggaagaatcatatgtcaaactgccaaaacttttcggagctttgcaatcttgtgttcccgggactgtggtcgctgctcaaacagaatccttgtatgaggggggagaaatagtaccgggcaaaagattgtttaaacgtgtcttttggtcatttggtccatgcattaatggttttgcatattgcaaacccattgtacaagtagatggtacatggctttacggaaagtatactggcacactgttgatagctaccgcacaagatggagctaaccatatcttcccgattgcctatgccattgtagaaggggagacaacttcagcttggggttttttctaaagaatttgagaagacatgttactccgcaaattaacatttctcttattttagaccgacaccccacaattataagtgcctacaacaacccaagtaacttatgggtccaggacacatcccatttcttttgcctgcgccacattgcacaaaactttctttgtggtaactcaaactgcaaacatttaaagaaaccacttaagttggctggtgagaatctattttatttattcgttataattttctttcaatcaaattttataacataatacattgattaaatatttacagggtacgcatacacggagaagatgcactggcgacatc

SEQ ID NO: 7591 - DNA, 1187 bp, Glycine max
  Gm_smallRNAprecursor_424
ggtagaatgacgaccatttgccagtgtccactgcagtagagacgaatatagtttattgtagtagtatagattatttaaattcaattattgtgtttgacttacctattcagataggctccaaggtaaacatctcgttttgaactctgtatccaactcttgatgtaactttcggattcaaattgtgattgtccagatctctgaatggactgtggctcgaggaatccatacacatcagaattccccgctcgcacacttgtctcagtcagatggctgtgttgttaagtcaaagttaattatgtatgaatttaaaacaattactttggtaattaatagtaatctaaaatgacttacagaatccacaactgtataactgatatgctgagacattgaccaccatgtgcaatttcagagagatcttcgtgctttatatacaacgggaagttttgattaaacaccccgaatatggtagcatcccacataacctggagcggcttcaaaaacagttgtgggatggtcaatgtcatcaggtacaggggatcatcgacctcttcatccgggctttctggaggttttgctggagacacagctgcctattgataaaacatagttaattagcaagttttgattacagtgaacaaattaattgaaaaaaataaacatataatcagagtaaaatacctgttctgataaacgcttcacaagatgtgttggccaagcaaggaaagtgttaagtgcctgccccactaaggtaacctcggcagtgggtacaggaacgagagcctctgtatctttaacctcctcaacaccaaccttgacttggccatgcaacaacgggatgttgtgaactgttgtggatccctcgtaaagtcttcctagggcaaccaagcgggaaggattttcttcaatatataggctgcatttgtctgagtcacccatccctggattgttccctgagggagcaacacaactctcctttgtactgacacgaggacctgagggagcaacacaatacgtgggggcagtgttttgcttctgggaggcctgtgccttttttcgtacatcctgcaaaagtttaacattaatgaaaatgattattacaataaattataagaaatgattttgttgtggaaaacaactaaaatgacaaagtacatacctcccatgaggggtctctacgggtctgacaa

SEQ ID NO: 7592 - DNA, 1116 bp, Glycine max
  Gm_smallRNAprecursor_425
aggacctgagggagcaacacaatacgtgggggcagtgttttgcttctgggaggcctgtgccttttttcgtacatcctgcaaaagtttaacattaatgaaaatgattattacaataaattataagaaatgattttgttgtggaaaacaactaaaatgacaaagtacatacctcccatgaggggtctctacgggtctgacaaaactgagtccatttctccttgctaatgccatatttttcacagacaatgtcgtccgcaccgtccttgtcgactgcaagtgcccatttcctagtcaagtcagatttaaattgcctccagcgctcgccgacaatctgaagaattttcttctttgtcctattgtcagaagcttcagggatttgaaattccgcctgacaaacaataaattaggttttgttgtaagtaaataacaaatttagactattaaagaaaatcaacgaagaaaactcaaatacctgaatatcctcccatatcaaatccttctgagcagtagggacttccttccaggtgtcatatgtcacgtcgaccttatcacgagcgacaatccccaaatatgttcttaatttcttcttgtagggaccgtcggccttgccggtagcaggatcgacgttgaccacaggtctttctgccccaggtggtctagtggccaatgatcgtagccgtgtcgccttgcgtgtccgcttcaacgtagatggagacgcatcagcgtttgcaggaggaggaggaagaggaggaggaggcgaggcaggtggagtatccatggtcctttaaagaaaaaaagttgagttagttaatattatcaaaaaacactgtatgagttatgtaaatgaatgtaccgaaatgaaatattatattagaaaattacgttagacgatgttaattaattctccttcatcatgatcattacgattagcatgaacatcgtcagcttcttcttctccaacgttgttagaagtcatttgtgtagacaaaggactaacataagtgtccatgtatgaatcatcatcttctacattaacaccaattgttttcccgtttagaaccacagaccacctttcatcacaagggtcttgcacataaaatacttgcttagcttgtt

SEQ ID NO: 7593 - DNA, 1085 bp, Glycine max
  Gm_smallRNAprecursor_426
tgcaacaaacgttgccatgaaggtacaagttgatgattcatggctatggcatcgaagatttggccacttcaacacacatgccttgaagttgttacatgagaagaacatgatgagagatcttccaagcataaaggataacaatgaagtgtgtgaaggatgtctccttggtaagcaacaccgatttcctttctcaacaagcagagcatggagagcgaaagatctattggagctgatacatacggacgtttgtggaccaatgaggacgccatcacatgggaacaacaggtacttcatactcttcattgacgacttctctaaaatgacatgggtatattttctaaaagaaaaatcagaagtctttggagtattcaaaaagttcaaggcccttgctgaaaatcaaagtggaaaacgaataaaagtactaagaagtgattgtggcaaagagtacacctctcgcgagtttgaaagattttgtgaggatgaaggcattgagcgacaacttacagtcgcatattctcctcaacaaaatagagtgtccgagagaaagaatcgcacagttatggagatggctagatcgatgctcaaggagaagggactacctaacacagtctgggctgaagcagtctacactgctgtttacatactcaacaagtctgtaaaagacaagactccaattgaagcttggaacgggaagaagccatcagcaaatcacctaagggtctttggatctatatgctacattcatatttcagacgtgaagaggcacaagcttgaagacaagactatacgaggtatcttccttgggtatagcaatatctctaagggctaccgtgtctacaacttgcaaactaagaaactcgtcatcagtcgagatgttgaagttgagtagtacgcttcttggaattgggataaagaaaaagtggagaagaacgttcttatacccgctcaactacctcaagaagaagctgaggaagaagacccaggtgaaccaccttcacctccaccacaacaacaagatcaagaactatcatcaccagagtctactccaagacgagtaagatctttggtggacatatatgaaacct

SEQ ID NO: 7594 - DNA, 1041 bp, Glycine max
  Gm_smallRNAprecursor_427
gaggcagtttaaatctgacctgactaggaaatgggcacttgcagccgacaaggatggtgtggacgacattttctgtgaaaaatatggcattagcaaggagaaatgggcccagtgtcagacccgcagagacccctcatgggaggtatgtactttgtcattttagttgttttccacaacaaaatcacttcttataatttattgtaataatcattttcattaatgttaaacttttgcaggatgtgcggaaaaaggcacaggcctcccagaagcaaaacactgctccctacatattgtctcatgggggttatgaatatttaaaagaaaagctcatggctgagaagacaaagaaaagactggaagaagctgcccagtctggaagcactgaaggcatcattgaccctcaatctcctatcagacgccacgtgaaatggaagatggcccgcacgaagaaaactggacagatgacgtttgaggcagcaaaggaaatagctgacaggattgtaagtcatttttaattaataattgtaattatctttgtgtattctgtgaattccttggacaaatatgtgtttggtacaggattctttggacgagcaggcgtcacagggatcgttcgttccccatggacgtcaggatatcctgactgctgccattgggcgaccagaacaccctggccgtgtttgtgctgttggagccggtgtcaccataaagcaatactttggatcggcttcacgaacgtcccgcagttcttcctccatgcctcctgaagacctagaacagctgacccaacaaatcagagaccaactggaggagtcaatcacagaaaaagtgactcggaagcttatggcatccttcagctagatgtagtcccagttttagtctcacatgcaatcaaagggacttgcactacctccagagccagagtttggtcccttaggtccttgtgtcagcacaaaggagagttgtgttgctccctcagggaacgatccagggatgggtgactcagacaaatgcgggctatacattgaagaaaatccttcc

SEQ ID NO: 7595 - DNA, 1200 bp, Glycine max
  Gm_smallRNAprecursor_428
acgtttcccctcatcaaagcattgtacccatttttgtttgggtaattgatcaagccattcagctgcacttggcttattcgcacgaatatccccaagatgtcgccagtgcatcttctccgtgtatgcgtaccctataaatatttaatcaatgtattatgttataaaatttgattgaaagaaaattataacgaataaataaaatagattctcaccagccaacataagtggtttctttaaatgtttgcagtttgagttaccacaaagaaagttttgtgcaatgtggcgcaggcaaaagaaatgggatgtgtcctggacccataagttacttaggttgttgtaggcacttataattgaggggtgtcggtctgaaataagagaaatgttaatttgcggagtaacatgtcttctcaaattctttagaaaaaaaccccaagctgaagttgtctccctttctacaatggcataggcaatcgagaagatatggttagctccatcttgtgcggtagctatcaacagtgtgccagtatactttccgtaaagccatgtaccatatacttgtacaatgggtttgcaatatgcaaaaccattaatgcatggaccaaatgaccaaaagacacgtttaatcaatcttttgcccggtactatttctcccccctcatacaaggattctgtttgagcagcgaccacagtcccgggaacacaagattgcaaagctccgaaaagttttggcagtttggcatatgattcttcccagtttccatgaatcatctccaatgctttttgctttgctaaccatgtcttcttgtaggatggggtataattcatgaacgttttgatctttgcaatcaacgtcttgatggagacagttgggtttgttttgacaattggttggatgatctgtgctatgacgtgtttgtcaagttggcgatgatcttgtctgagcatcggcacgagacaagtgtgatgacctctgatactcttgataatccatttgttatgcctctttgaattgcatgcgcccaagctccatgtacaatgacatgtattataacattacaatgaatactgagtttgtatgttttacattttagatggagtggtggtagattagaatatagggccacaccgcatggtgacttagtcgaatataggtctcgtatagatcatatggagagccatgaggtataatactatcatgat

SEQ ID NO: 7596 - DNA, 1063 bp, Glycine max
  Gm_smallRNAprecursor_429
cgtaccctataaatatttaatcaatgtattatgttataaaatttgattgaaagaaaattataacgaataaataaaatagattctcaccagccaacataagtggtttctttaaatgtttgcagtttgagttaccacaaagaaagttttgtgcaatgtggcgcaggcaaaagaaatgggatgtgtcctggacccataagttacttaggttgttgtaggcacttataattgaggggtgtcggtctgaaataagagaaatgttaatttgcggagtaacatgtcttctcaaattctttagaaaaaaaccccaagctgaagttgtctccctttctacaatggcataggcaatcgagaagatatggttagctccatcttgtgcggtagctatcaacagtgtgccagtatactttccgtaaagccatgtaccatatacttgtacaatgggtttgcaatatgcaaaaccattaatgcatggaccaaatgaccaaaagacacgtttaatcaatcttttgcccggtactatttctcccccctcatacaaggattctgtttgagcagcgaccacagtcccgggaacacaagattgcaaagctccgaaaagttttggcagtttggcatatgattcttcccagtttccatgaatcatctccaatgctttttgctttgctaaccatgtcttcttgtaggatggggtataattcatgaacgttttgatctttgcaatcaacgtcttgatggagacagttgggtttgttttgacaattggttggatgatctgtgctatgacgtgtttgtcaagttggcgatgatcttgtctgagcatcggcacgagacaagtgtgatgacctctgatactcttgataatccatttgttatgcctctttgaattgcatgcgcccaagctccatgtacaatgacatgtattataacattacaatgaatactgagtttgtatgttttacattttagatggagtggtggtagattagaatatagggccacaccgcatggtgacttagtcgaatataggtctcgtatagatcatatggagagccatgaggtataa

SEQ ID NO: 7597 - DNA, 1065 bp, Glycine max
  Gm_smallRNAprecursor_430
cgtaccctataaatatttaatcaatgtattatgttataaaatttgattgaaagaaaattataacgaataaataaaatagattctcaccagccaacataagtggtttctttaaatgtttgcagtttgagttaccacaaagaaagttttgtgcaatgtggcgcaggcaaaagaaatgggatgtgtcctggacccataagttacttaggttgttgtaggcacttataattgaggggtgtcggtctgaaataagagaaatgttaatttgcggagtaacatgtcttctcaaattctttagaaaaaaaccccaagctgaagttgtctccctttctacaatggcataggcaatcgagaagatatggttagctccatcttgtgcggtagctatcaacagtgtgccagtatactttccgtaaagccatgtaccatatacttgtacaatgggtttgcaatatgcaaaaccattaatgcatggaccaaatgaccaaaagacacgtttaatcaatcttttgcccggtactatttctcccccctcatacaaggattctgtttgagcagcgaccacagtcccgggaacacaagattgcaaagctccgaaaagttttggcagtttggcatatgattcttcccagtttccatgaatcatctccaatgctttttgctttgctaaccatgtcttcttgtaggatggggtataattcatgaacgttttgatctttgcaatcaacgtcttgatggagacagttgggtttgttttgacaattggttggatgatctgtgctatgacgtgtttgtcaagttggcgatgatcttgtctgagcatcggcacgagacaagtgtgatgacctctgatactcttgataatccatttgttatgcctctttgaattgcatgcgcccaagctccatgtacaatgacatgtattataacattacaatgaatactgagtttgtatgttttacattttagatggagtggtggtagattagaatatagggccacaccgcatggtgacttagtcgaatataggtctcgtatagatcatatggagagccatgaggtataata

SEQ ID NO: 7598 - DNA, 1190 bp, Glycine max
  Gm_smallRNAprecursor_431
acctctaatcttgaggacttatcatgtgaatacgagacttgttggctcaaaaaccatgatagtgatacggactcctcttccgggcccgaaggaagtaacctgtctccatcccacgaacctatattcaaacgagattggtaatatacggatcattcatgtctaagttatttcttctttgagattttcatgtaatgtcttatgtctgtcttcagttatcactttatgtattgaaataatttttcctttaaatttaaattagcaatttttagtttacccacttttactgcagtagttgacatggtaacataactgtcaaaattcacaatactttgtcatttacactacattgtttttaaaaattaaatgtctcatcgacaaaactgacatgaaatggacaactcataatctctttattcactctgaaaataattatggacgtttgctgctttaattacaagggaaaaataacaatccaaattgacaatactctgcaatttgcacacgtctctaaaaattaaatgtctcacctgtaaaactgtcatgaaatggatagctcatcaactctttattcactctgaaaatcatcgtgaacgtctgttgctttaattacatgggaaaaatcacagtccaaattaacaacactctgcattatgagctgtccatttcatgtcagttttacaggtgatacatttaatttttagagacgtgtgtaaaactgatatgagatggacaactcataatctctttgttcactctgaaattataatgggcgtctgctacatcacttactagggaaaaagaaacattggattccaatacacatcaacgtggcagaatactcatacaactataaataacacaacacagacacaatacaaacacaccatctcacacaacataatttcacaaaccaaattcaatcttattactatgtcattttttggagaaacaagcagtcagaccattactaactctagattagcttttatttttccaaatggatcaatcagttacaaccaaactggtgtttattttcaaagtctcattccaacaccaatgcgagttcctaacaactgttcttttgatacactcaagcgtagaatgcacaacacccttcaactaaccaacgatcaattactggatgaaatctactatcgacaaccattcatagatgcaggtcaacaatattt

SEQ ID NO: 7599 - DNA, 1132 bp, Glycine max
  Gm_smallRNAprecursor_432
tacaagattggtgctgaccactttggttccgactttgcaatggctcaaaggaaaacccattctcctagtaagaaacttttatcatactattttttttatgtattagtgttagaattcagaattctaagttatgctcttggttggtaattggtattgcagcatattggtggcgaatgtttgggtcacaaactccaaatttgcagaagctggctattaagattttgagtttgacttgcagtgcttcaggatgtgaaagaaattggagtgtgtttgagcaagtaattgtgacaaaactctaactatactttttaattttatttaattttgatgatcaagttatatttggagtatatttgagattgaaatcaacatttatttgttatgttgtagattcattccaaaaaaagaaataggcttgagcacaagaggttgcatgatttggtgtttgtcaaatacaaccaacaattgaagcaaagatataatgcaagagatgaaattgatccaatttctcttaatgatattgatgtatgcaatgaatggctcgtgggagagatggatcaagatgatgataatgatgctggaaatgatttggtatttgaagatgatgatgctctaaattgggcaactgtgtatcaggcttcgggggttggagagtgtaggatgtatactaggcggaaaaagcaaaaaacaagtgttgctgctgcccaaacttctaaaaaacaggcaatggttgttggatcttcatcaaggaagcaaaaagcagtccaagaaaatgatgaggatctagatgttgaggagaatattgatgttgaatctgaagaagaagaaatcatggtcaattttgaggcgtctgatggggaagagggagagggagatgctccattaccatatgataacaacgaagatgattatgttgggattggagaagatgattagagcctcaaccttcactttgcactttgcattatgtttttatcattttcttattttgaactctttaatgagtttatttggtgttggtacttgattattgtatgaacttatgaaacttttttagtttatttgaatgcaatcctttgtttttttcaatttcaatgagtttatatatatgttttttttttttttttgtgtc

SEQ ID NO: 7600 - DNA, 1092 bp, Glycine max
  Gm_smallRNAprecursor_433
agtttgacttgcagtgcttcaggatgtgaaagaaattggagtgtgtttgagcaagtaattgtgacaaaactctaactatactttttaattttatttaattttgatgatcaagttatatttggagtatatttgagattgaaatcaacatttatttgttatgttgtagattcattccaaaaaaagaaataggcttgagcacaagaggttgcatgatttggtgtttgtcaaatacaaccaacaattgaagcaaagatataatgcaagagatgaaattgatccaatttctcttaatgatattgatgtatgcaatgaatggctcgtgggagagatggatcaagatgatgataatgatgctggaaatgatttggtatttgaagatgatgatgctctaaattgggcaactgtgtatcaggcttcgggggttggagagtgtaggatgtatactaggcggaaaaagcaaaaaacaagtgttgctgctgcccaaacttctaaaaaacaggcaatggttgttggatcttcatcaaggaagcaaaaagcagtccaagaaaatgatgaggatctagatgttgaggagaatattgatgttgaatctgaagaagaagaaatcatggtcaattttgaggcgtctgatggggaagagggagagggagatgctccattaccatatgataacaacgaagatgattatgttgggattggagaagatgattagagcctcaaccttcactttgcactttgcattatgtttttatcattttcttattttgaactctttaatgagtttatttggtgttggtacttgattattgtatgaacttatgaaacttttttagtttatttgaatgcaatcctttgtttttttcaatttcaatgagtttatatatatgttttttttttttttttgtgtccgctatgacatccgccattttccgctacgccatccgccatatttttatggcggatttttgactttccgccatgaaccgccatccgccattaacaacattgaaaacaacagaaattttgaaactgagtaccatctatctcttctgtaaataacaataataataataataataataataatagaac

SEQ ID NO: 7601 - DNA, 1092 bp, Glycine max; identical to SEQ ID NO: 7600
  Gm_smallRNAprecursor_434

SEQ ID NO: 7602 - DNA, 1188 bp, Glycine max
  Gm_smallRNAprecursor_435
gaaatagatacaacacataaaaaacctcagcacccactttagactaatagcaatattatttgacataattatacatgactcataaataatttttgtttattctattaattgtattttaaaaactatagtctaccaaatatttaatcgactatgtaattataattgacaacaataattaataacttaaaatattttattaatagtccattattaaaatatatcaaaaagaatttaaaatatgaataattcctaatataaatttaagaaaaatatttatacatttaaaatatttcataaaaatattcgtagataatatttactcgttcatgacacacatcacacattttagttataagtcactggtagaaaaagcggtttcaacgacggtggaaagagacaaacaacgacagtgtttgaccgtctttgaatctaatgtcgttgaaagtgtctcactttcaaagacggtcgaaaggacaccgtcttagaaaatctcaactttcaaagacggtgctgacatcacgaccgtcttagaaaaccaggcttcaaagacggtgttgacgtcacggctgtctttgaaggttggctttctaagacgttgtcgacgtcagcactgtcttagaagcctgactttctaagacgttcgtgatgtcaacaacgtctttgaagcctggctttctaagacggtcgtgatgtcagcaccgtctttgaagcttgactttctaagacgttcgtgatgttagcaccgtctttgaagcctgactttctaagacattcgtgatatcaacaccatcttagaaaaatatttatattacataaaatcagattagaatatattaatcctacactaatgcacgaagttaatgaacgactaacaattaaagtaaatagatttctatatatatatatatatatatatatatatatatataatgtaacataaacctatgatgaattacaatgtttagttaaataaaatagaaatacacacaagggaaaattaaatacagtcacaagcccacgacatcaaatgtaaaggactaacaccaatcatgatacattcctattaaccctctatccattataatcgaaacactatctagcagatcaatggtactcaatgagaggtgcggcaaatctgcaaataacagacttagaggaaactagtcaattaaataagatacaagagtc

SEQ ID NO: 7603 - DNA, 1173 bp, Glycine max
  Gm_smallRNAprecursor_436
atacaacacataaaaaacctcagcacccactttagactaatagcaatattatttgacataattatacatgactcataaataatttttgtttattctattaattgtattttaaaaactatagtctaccaaatatttaatcgactatgtaattataattgacaacaataattaataacttaaaatattttattaatagtccattattaaaatatatcaaaaagaatttaaaatatgaataattcctaatataaatttaagaaaaatatttatacatttaaaatatttcataaaaatattcgtagataatatttactcgttcatgacacacatcacacattttagttataagtcactggtagaaaaagcggtttcaacgacggtggaaagagacaaacaacgacagtgtttgaccgtctttgaatctaatgtcgttgaaagtgtctcactttcaaagacggtcgaaaggacaccgtcttagaaaatctcaactttcaaagacggtgctgacatcacgaccgtcttagaaaaccaggcttcaaagacggtgttgacgtcacggctgtctttgaaggttggctttctaagacgttgtcgacgtcagcactgtcttagaagcctgactttctaagacgttcgtgatgtcaacaacgtctttgaagcctggctttctaagacggtcgtgatgtcagcaccgtctttgaagcttgactttctaagacgttcgtgatgttagcaccgtctttgaagcctgactttctaagacattcgtgatatcaacaccatcttagaaaaatatttatattacataaaatcagattagaatatattaatcctacactaatgcacgaagttaatgaacgactaacaattaaagtaaatagatttctatatatatatatatatatatatatatatatatataatgtaacataaacctatgatgaattacaatgtttagttaaataaaatagaaatacacacaagggaaaattaaatacagtcacaagcccacgacatcaaatgtaaaggactaacaccaatcatgatacattcctattaaccctctatccattataatcgaaacactatctagcagatcaatggtactcaatgagaggtgcggcaaatctgcaaataacagacttagaggaaactagtcaattaaataagata

SEQ ID NO: 7604 - DNA, 1045 bp, Glycine max
  Gm_smallRNAprecursor_437
taaacggagacaagcaaatcattcattttggtgtctgtgatgtcgtgaggatgtgccacatggtcgatcccatcttcgtgcttggcgatcaggatttcttctgccccgatgcctccccgcttcttcttcgtcagcctccgcagaaaatgcgtgacgcaaatcaacaccgaataagtcacccgtattaggtatttgtcccggtacattccattatgttcctaatggggcattaggtgttggaattgggccatgatgttgctgtgaaggggtcatagtggaccatgaaaaatgagcttgtgtttccgcaacaccaccgaacgaatgctgacttgcagaagtatcagtgtgatgaccctgaaaaggatactgatacatctgtgtcggatactgagcaaatgtttgtggcgtgtaatacattccatggccacgctccgccatttgttgggaatattcttccgcttcaacagcctcccttcgtctgtctataccctgagtttcaacacttgactgaagcatgtgaaactattgtgcgggaaattgacgctctgatgcaggaccatgtgacactggctcaatgactctctcttgctcttcggataaaattgtaattttttccacataaggcacgagatcatcaactgtccatgtattcctcccttgaagagacaccatgtattgtaatgtctctgcaacttcagcctacaattattagggtcagaaaattaatggccatcattaaaaaaatgttcaagttaaatattcaaaaaaattaaaaaataccaatgtagccatgtttgcattttgtgggtcaacaaacatctttgtctttcgcctataccagaccatgtagtctgagttaaagctcaataggccttcttgtcggggataagcgtcgaccctaaatgcatggcgattattccattgatgaatcattggggcgaacaattgcccccaatttttgtcatgtttccctcttaatgttatgccatgaatgtttaagggttgcgaaggagactctggaattggttgctgcatcccaaattgt

SEQ ID NO: 7605 - DNA, 1188 bp, Glycine max
  Gm_smallRNAprecursor_438
gccatgtttgcattttgtgggtcaacaaacatctttgtctttcgcctataccagaccatgtagtctgagttaaagctcaataggccttcttgtcggggataagcgtcgaccctaaatgcatggcgattattccattgatgaatcattggggcgaacaattgcccccaatttttgtcatgtttccctcttaatgttatgccatgaatgtttaagggttgcgaaggagactctggaattggttgctgcatcccaaattgtctcaatactctgtccggttggtgccactcaataacttggaaacaaattagtggcaccaccgcgtatcacgcgagacttccgactacacaaatgggaggcaacaatgatataacggttgctgtgtaaggctcccacacaaactgcatataacaacatagttgtcaacattttagtaaaataacacatatcattttttattttacaaatacaataccattttcttatctcatgacgtttcataatatccaacttgcgacgaaaaactctcacatcatcattgccgatatgttggttttcacgtcgcagccacctacaaagattaaaatttaatataccctaaaaccatttattctattgaaatgaaagacgcttttaaaaatgactaacctgtgccccagtggtttattttctacttgggaaggagtcctctttggagccaaggttggacatcgttcccatgcccacatttgtagtaagatgcacatacctccgattgatttagttttataatcggtgacactgcacatctctctgtatagaaagccaagtacaacagctccccatgcatatgtgccacagtcttcaaagtcacgtaaaaattgaaggtaccttagcgaaactttgttactgcttttgtcaacgaacaagacacctccaatgaatctcaatatccatgcacgggcaaaccttcatacttgttcttcgtcatcgtcgttatttatttgtgcaaaatggtgagccagccaacttaatttaaccacactacctttaatttcaccttcttgtggtctgactcccaataattcctcacataaattagcccaatcaagatttgttggaccgattaatggtaaaacatccacacttatacctaacaatacaaagacgtcttggagagtaatagtacactctccgcatctcatgtgaaac

SEQ ID NO: 7606 - DNA, 1058 bp, Glycine max
  Gm_smallRNAprecursor_439
tctcttaaactaaattagtctttccttgttgattagcaatgctcattttagcttaactaaaaaatgcttaattgatatagtaacatttttcatagtttatcagtgttattaatttgatcaaattaatatggtaaactaatgaaatcatcaatttgatctaataaagatatttcaagagatgaaagtgaaacttttaaatttgaagaatgaaactgaaactagaaaaacaagataaaagtatatctttttgttttgaatttcttcacttcttttatttttttcccttttgtgtttgtgtctgaattttcccacgtccccttctctgcttctataaatacctctgctacgtccctccccaccatgtatcagaagcatttaatgttccataatggtagctagctatagccagcttttttttttaaaagggttattagctttgctgcaccttcctcgtgtgtgctgttgtgctgctcttgttttttagtgtggaagaatctgtaaagctcaggagggatagcgccatggatgatctcttctccactcttgatcttctcttgcgctatccatcctgagtttcatggcttctatccacacacaatggaagaagctcctctctgttttttgcctctatatttgcctgaatcttgacttttcaggagacaccccccaaaggaaaaagaaattggtctcttaatcatcatgccctactctatacactagtcaaggttctttgggttttacttcttttgttctgcttctttctttcttgttttttatggctattttagtgactaattaacatcttttgttttttgtagttttgtttccccaagtgaaagagagtgcctaaggatgaagtaataagtggaagaaagtagacaccaaaatgtgttaagcctcttgggttgtgtagagtgattctctctttaatttgcttcaaagttttctctttttaaagtgtattttaaaagttgatgactagccaaaatttggtatctgttaatgtctatctaacactatatccatatatgctacaatataagttcaagtaagtaaac

SEQ ID NO: 7607 - DNA, 1057 bp, Glycine max
  Gm_smallRNAprecursor_440
ctcttaaactaaattagtctttccttgttgattagcaatgctcattttagcttaactaaaaaatgcttaattgatatagtaacatttttcatagtttatcagtgttattaatttgatcaaattaatatggtaaactaatgaaatcatcaatttgatctaataaagatatttcaagagatgaaagtgaaacttttaaatttgaagaatgaaactgaaactagaaaaacaagataaaagtatatctttttgttttgaatttcttcacttcttttatttttttcccttttgtgtttgtgtctgaattttcccacgtccccttctctgcttctataaatacctctgctacgtccctccccaccatgtatcagaagcatttaatgttccataatggtagctagctatagccagcttttttttttaaaagggttattagctttgctgcaccttcctcgtgtgtgctgttgtgctgctcttgttttttagtgtggaagaatctgtaaagctcaggagggatagcgccatggatgatctcttctccactcttgatcttctcttgcgctatccatcctgagtttcatggcttctatccacacacaatggaagaagctcctctctgttttttgcctctatatttgcctgaatcttgacttttcaggagacaccccccaaaggaaaaagaaattggtctcttaatcatcatgccctactctatacactagtcaaggttctttgggttttacttcttttgttctgcttctttctttcttgttttttatggctattttagtgactaattaacatcttttgttttttgtagttttgtttccccaagtgaaagagagtgcctaaggatgaagtaataagtggaagaaagtagacaccaaaatgtgttaagcctcttgggttgtgtagagtgattctctctttaatttgcttcaaagttttctctttttaaagtgtattttaaaagttgatgactagccaaaatttggtatctgttaatgtctatctaacactatatccatatatgctacaatataagttcaagtaagtaaac

SEQ ID NO: 7608 - DNA, 1057 bp, Glycine max; identical to SEQ ID NO: 7607
  Gm_smallRNAprecursor_441

SEQ ID NO: 7609 - DNA, 1107 bp, Glycine max
  Gm_smallRNAprecursor_442
tccataatcatcacacttctaagatctcactcactttttacttatcaatgatttccctttcactcaatattttataatttctaatcaatttttattaaaaaatcataaattaaaaaacttagttacatatctcactttttattgaccaatgatttccccttcactcaattttttatgactttagagtaacaaagtggcaaacggatcaatctgtcttgtcccgcaaaagcaggttgatttgccccatccgtataagaaaaatggatttaaaattcaagctccgtttatgcttacattgactgattgactcacaaaaaccaaaaaattaaataaaaagtaaataataaatatatgacaaaattacatttttatctctccgtttatctttaatttcagatttgatcccccaataatttaatttacaaatttgattctcttattttataaaattgtgtaatattgatccctcaaatcacaattagatgttgaccgttaacgagtgatgttgactgtcacgtgtcacgtttctattgaatgataactgtcgcgtgtcatgttctgattggtcaatgaaaacaaaaattcatttcatctttcatgaagttgacatccaatcagaacatgacacatgacacagtcattatccaacaagaacgtgacacgtgaccgtcaacatcttaatgatcaacatccaattatgatctgggggaccaacattacacaattttacaaaataaaggactaaatttgtaaattaaattactgggggaccaaatctgaaattggaaatatactggaggactaaatttgcaattttgtctaaatatatttgaattaattttatttttataaatactcattaaaaaaaacattaaatgtattatcttaaattttgaatcataatttatttaaacaaaaaataaattaaataaaaaataataatatatgtataaaatatcaaaataaatattaaatttattaatttttaataaaaaaaattgcgagttgacgcgcctcacttttctctcaactcatgttttgcgcggatgaaaacagaatgaattaaagtgggttaatgaattaaaaacctcaaaatcaatctgaaaa

SEQ ID NO: 7610 - DNA, 1113 bp, Glycine max
  Gm_smallRNAprecursor_443
ttactttcactcatacactaaattttcgggtgtaggaatactccggcaaagagagaataggtttgcttatttcctaattctgaagttagggtacgtgcgtaatttactgtgtgttctgtgatgatgagttaagtggtcctattttacatgtaacttttgacaatctgtttgggttgagaatacaaattaaggccccacacccaactaagcttagctctctcccatttttagcacccatcccgcacccaactttaaaagcaccctcaattgcctcttctattataggagagtaggcttcaaagcacacaagaatatgataagatgaagaagttcagtgtctcaaaattcaccacttctcttaaaacctccctcatttgttttttcacactttcctttccctcaccactctctctattacctcttgtttgttgttaagagtactcagaagaataactcctccaacccacttagcatgtggcaaaggtgcatgctgagcaagatggagaagcagggcacgtgcaattctaactcatgaaaccatagaatcatcttgttttttcttcttttcactctaaccaaatagattcctctacctgcagtgagttagtccttcatgtgccccccttccccatcatgacggcagcaccttaaatataaaaatgctgaaaatgggttttgattgtggctccacccaccactttgatttcaaggtgagttataatattgttattattgttctcatctatctttattattcttcaatgttagcatgtctagcttgtgtgataatatgcggttaagaatgtttcaacttagtataaagtcaaattaattattagaaatatgataaacattgaagcgtcaaggatatgtatgatatgatgtgagtggcttggaatcttggttatgagatatgaaaataacatggtgaataaacattgactgaattataataatatcactaattatatactccttccgtccccctgatcataaattttttttttaaatatatttgtcatttttataaaaaaaattctaatttttagatgtattaattatttttttatatattcttacttagttattttattttcaaacattaataagaaa

SEQ ID NO: 7611 - DNA, 1188 bp, Glycine max
  Gm_smallRNAprecursor_444
ccgtctttgcattttctgggtcaacaaacatctttgtctttcgcctataccagaccatgtagtccgagctaaaactcaataggcattcttgtcggggataagcgtcgaccctaaatgcatgccgattattccactgctgaatcattggggcgaacaattgcccccaattttcgtcatgtttcccttttaatgttatgccatgaatgattaagggttgtgaaggagactctggaactggttgctgcatcccaaattgtctcaacactctgtccggttggtgccactcaataacttggaaacaaattagtggcaccaccgcgtaccacgcgagacttccgactaaacaaacaggaggcaacaatgatataacggttgatgagtaaggctcccacacaaactgcatataacaacatagttgtgaacattgtagtaaaataagacatacaattttgtattttacaaatacagtagcatggttcttacctcatgacgtttcataatatccaacttgcgacgaaaaactttcacatcatcattgtcgatatgttggtttccacgtcgcagccacctacaaagaataaaatttaatataccctaaaaccatttattctattgaaatgaaagacgctgttaaaaatgactgacctatgccctagtggtatattttctatttgggaaggagtcctctttggagccaaggttggacatcgttcccatgcccacaattgtagtaagatgcacatacctccgattgatttagttttataatcggtggcactgcacatctctctgtatagaaaaccaagtacggcagctccccatgcatatctgctacattcttcaaagtcacgtaaaaattgaaggtaccttagcgaaactctgttactggttttgtcaacgaacaagacacctccaataaatctcaatatccatgcacgggcaaaccttcgtacttgttcttcgtcgtcgtcattattaatttgatcaaaatggtgagccagccaacttaatttaaccacactacctttaatttcaccttcttgtggtctaactcccaataagtcctcacataaatcagcctaatcaagatttgttggaccgattaatggtaaaccatccacacttatacctaacaacacaaagacgtcttgtaaagtgatagtacactctccgcatctcatgtgaaac

SEQ ID NO: 7612 - DNA, 1071 bp, Glycine max
  Gm_smallRNAprecursor_445
tttggttttctgagtggatgacccaatctgggttggtgacccagaagatactaaagatgtttttttggtagtcggctctggaagagccagtttgaaaccttttcctgagcttcagcctcctctcagggaggtccctactgccttaggaggcatcaccatttttctgtaagaattcacgggtaagatagtcaggaagagagtttgaggtgcccttgatatattctatttcaaaatcaaagacacttaaaattgcttgccatcttgcaaaaatttgttttgaggcaaaatttttgacatccttttgtaaaatatctttggctgatttacaatcaacccttattaaaaatatttgatttaataaatctgattgaaatttggaaatgcacaaaacaattgctaaaacttcctttttaatagttgaatactttaattgtgcagagttccaatactttgatgtgtatgcaatgacatgttcttggccatggactctttgtttgaggatgccaccataacctatgtctgaagcatcagtttcgacaattttgaacgcctgtgggatagggaggtgcagacattttatggattggactttgagtttgatatctttgacagtttgagtatggaggtcagaccaagaaggcgggtttttcttcaacctatcatgcagtggtttgacaatgttgtttaaatatggaacaaattcacctatataattcagatagccaagaaatctttgtaactgggttttgtctaagatttggttagggaatttgctagcaaattctattgatctgtctattgggatgattgtaccttgatatatgttatgaccaaggaacctaattctagtttgaaaaagattgattttggatttagagactactaagccattctgtttgatgatatggatgaaagtctaaagatatttaaaatgttggtcaattttttgggaaaagactaaaacatcatctatgtagacaatgacaaattttgagtaaggattgaaaatatcattcataattttttgaaattctaaaggggcattcttcaatccgaatggcattacattcc

SEQ ID NO: 7613 - DNA, 1158 bp, Glycine max
  Gm_smallRNAprecursor_446
tcctgaaaatagatttccctgattcaaagaaggaaaatgattttggaaataaaatcatgaataatcggatctccactctagaaatcaggttaaaccaaatagaaaagacggtagattttctttacaaaaatttccaaaaagaaagagatccaaaatgtactgaagaacatactagtaggcttatggcattgcaaaacaaagattgcattcccataatttgtaataaagaaaaaaacaaagcctacacattttagttaaaataaattttcctaaaataaataaatttaaccaaactgaaataattctgcaagccttggtagatactggttgttctttcacttctatatgccaaagtattgtacccaagtacaattgtttcaaaagcaacctaataaccaaaactagaacaatgtctggagacataataacaaatgatatagaaacacgaattttcactattcaattatccacaaattgtgaaatttttggtaataaaatttttataaataaagcagatgtggtagacttatgacctgctaaagaaaaaatgattttaggacttgattttattatacataataatagatcaattaccattacaaaagattacctattaatttctacaaactcacaaatgtcacctataatagatgagatcacatcagagttacgaacaaagcgtggtgatgcccccactaatcctaccaagaataaacaatgtccttgtgatacacccggtagttgtaaaataaaagaatcaaaaaatcatggcaatataaacactataaaaacatacaacacatcccatgattcttattatgaaagtattttagaaagcataaaaactgaaacagaactacaatatgagttatctgtagcaaaatctgattacaaagctgtcaaaattaacaaaattataacctttgacaatatacaacaaattatagatggattgataaaactagcataataggagaagaccctacaaaatattgggaaaaagatccagttacatgcaaattagaaatcataaacccagacctgataattaaaactaaagatattcagtatgggaatttcgaacaagaatgtaagaatcacataaaaaccctattagatctgaaagttatagcacccagtactagtcctcatagaagc

SEQ ID NO: 7614 - DNA, 1120 bp, Glycine max
  Gm_smallRNAprecursor_447
agtacacttaattaatcacattatcactagttcatctgtgtaagttaagagtgtaattactacaaaagcaatagtaccttttgttaaatgttaaggggagttgatcaataaaaatgtttagatactaaaaaaatcctaaaatacttaagactaaaaaactaataaactctaaaaataacattattaagaaacattttgcggggtggctcttggatggacttgctggtttcttgacagatttttttattaagaaacatttgggaaataatgaggcacgatacaggagatacaatgtttgttttcctttcttagtttatctgatctttgtgaaggttaacttatcatgcattagcctgtaaaaaaaaattatgaacttgttctatttattactatctaaaaatgttgttactgcaattctacagagggaatggagaacgggaagcggtgggggtagcagccactggcaatcacaaaaaaaaaactatctaagacggttttaaaagaaccgtcgtagtatgtctacgaaactaaggcggtcatggtgataactgtcgtagcaagtcaacagcaaaaacgctattctaagacggttatcaaaataaccgtcttagttactaagacatactacgacggttcttttaaaaccgtcttagaattcacatgctgactacagcatattacatcgggtttagtacgtggaccgcctttgtatctactacattctaagacggttattaaataaccgtcttagaaaacattagcttttacgacggttcaaaaaccgttgttgtaagtgtattatgatattacgacactggcttataagacggttcaaaaccgtcgtaaaaggtcttaaataaccgacttaaaagatcattattgtagtagtgaacttggcttaggattgactaaaagtaagggaacggtgaaaaagttgcaacaaaaccttgacaagcatgtcgcctatatgtccagtaagactaaggaaaacaaggccttgagtggccgagttgttgacctagagcagcaagtgaaggtcataggcaagaagatgaaggatctaaccttggagaagaagatgactaaggaggagttagggaccgcaagggacgagatggct

SEQ ID NO: 7615 - DNA, 1118 bp, Glycine max
  Gm_smallRNAprecursor_448
gtacacttaattaatcacattatcactagttcatctgtgtaagttaagagtgtaattactacaaaagcaatagtaccttttgttaaatgttaaggggagttgatcaataaaaatgtttagatactaaaaaaatcctaaaatacttaagactaaaaaactaataaactctaaaaataacattattaagaaacattttgcggggtggctcttggatggacttgctggtttcttgacagatttttttattaagaaacatttgggaaataatgaggcacgatacaggagatacaatgtttgttttcctttcttagtttatctgatctttgtgaaggttaacttatcatgcattagcctgtaaaaaaaaattatgaacttgttctatttattactatctaaaaatgttgttactgcaattctacagagggaatggagaacgggaagcggtgggggtagcagccactggcaatcacaaaaaaaaaactatctaagacggttttaaaagaaccgtcgtagtatgtctacgaaactaaggcggtcatggtgataactgtcgtagcaagtcaacagcaaaaacgctattctaagacggttatcaaaataaccgtcttagttactaagacatactacgacggttcttttaaaaccgtcttagaattcacatgctgactacagcatattacatcgggtttagtacgtggaccgcctttgtatctactacattctaagacggttattaaataaccgtcttagaaaacattagcttttacgacggttcaaaaaccgttgttgtaagtgtattatgatattacgacactggcttataagacggttcaaaaccgtcgtaaaaggtcttaaataaccgacttaaaagatcattattgtagtagtgaacttggcttaggattgactaaaagtaagggaacggtgaaaaagttgcaacaaaaccttgacaagcatgtcgcctatatgtccagtaagactaaggaaaacaaggccttgagtggccgagttgttgacctagagcagcaagtgaaggtcataggcaagaagatgaaggatctaaccttggagaagaagatgactaaggaggagttagggaccgcaagggacgagatggc

SEQ ID NO: 7616 - DNA, 1119 bp, Glycine max
  Gm_smallRNAprecursor_449
gtacacttaattaatcacattatcactagttcatctgtgtaagttaagagtgtaattactacaaaagcaatagtaccttttgttaaatgttaaggggagttgatcaataaaaatgtttagatactaaaaaaatcctaaaatacttaagactaaaaaactaataaactctaaaaataacattattaagaaacattttgcggggtggctcttggatggacttgctggtttcttgacagatttttttattaagaaacatttgggaaataatgaggcacgatacaggagatacaatgtttgttttcctttcttagtttatctgatctttgtgaaggttaacttatcatgcattagcctgtaaaaaaaaattatgaacttgttctatttattactatctaaaaatgttgttactgcaattctacagagggaatggagaacgggaagcggtgggggtagcagccactggcaatcacaaaaaaaaaactatctaagacggttttaaaagaaccgtcgtagtatgtctacgaaactaaggcggtcatggtgataactgtcgtagcaagtcaacagcaaaaacgctattctaagacggttatcaaaataaccgtcttagttactaagacatactacgacggttcttttaaaaccgtcttagaattcacatgctgactacagcatattacatcgggtttagtacgtggaccgcctttgtatctactacattctaagacggttattaaataaccgtcttagaaaacattagcttttacgacggttcaaaaaccgttgttgtaagtgtattatgatattacgacactggcttataagacggttcaaaaccgtcgtaaaaggtcttaaataaccgacttaaaagatcattattgtagtagtgaacttggcttaggattgactaaaagtaagggaacggtgaaaaagttgcaacaaaaccttgacaagcatgtcgcctatatgtccagtaagactaaggaaaacaaggccttgagtggccgagttgttgacctagagcagcaagtgaaggtcataggcaagaagatgaaggatctaaccttggagaagaagatgactaaggaggagttagggaccgcaagggacgagatggct

SEQ ID NO: 7617 - DNA, 1119 bp, Glycine max
  Gm_smallRNAprecursor_450
acgtttcccctcatcgaagcattgtaccaatttttgtttgggtaattaatcaagccatttagctgcacttggcttattcgcacgaatatccccaagatgttgccagtgcatcttctctatgtatgcgtaacctgtaaatattcaatcaatctattatgttataaaatttgattgaaagaaaattataacgaataaataaaatagattctcaccagccaacatgagtgatttctttaaatgtttgcagtttgagttaccgcgaagaaagttttgtgcaatgtggcgcaggcaaaagaaatgggatgtgtcttggacccataagttacttgggttgttgtaggaacttataattgaggggtgtcggtctgaaataagagaaatgttaatttgcagattagcatgtcttatcaaattctttagaaaaaaaccccaagctgaagttgtctccccttctacaatggcataggcaatcaggaagatatggttagctccatcttgtgcggtagctatcaacagtgtgccagtatacttcccgtaaaaccatgtaccatctacttgtactttgggtttgcaatatgcaaaaccattaatgcatggaccaaatgaccaaaagacacgtttaaacaatcttttgcccggtactatttctcccccctcatacaaggattttgtttgagctgcgaccacagtcccagaaacacaagattgcaaagctccgaaaacttttggcagtttgacatatgattcttcccaattttcatgaatcatctccaactctctttgctttgctaaccatgtgttcttgtaggatggggtataattcatgaacattttgatctctgcaatcaacgtcttgatggagacgattgggtttgttttaacaattggttggatgatctgtgctatgacatgtttgttgagttggcgatgatcttgtctgagcatcgacacgagacaagtgtgatgacctctgatactcttgataattcatttgttatgcctcttttaattgcatgcacccaagctccatgtacaaccattttcatgtaacttgcagacgaagtttagccttctctggtcagagtaaattgttttgtaattaaaatgatttctgatgtt

SEQ ID NO: 7618 - DNA, 1200 bp, Glycine max
  Gm_smallRNAprecursor_451
acgtttcccctcatcgaagcattgtaccaatttttgtttgggtaattaatcaagccatttagctgcacttggcttattcgcacgaatatccccaagatgttgccagtgcatcttctctatgtatgcgtaacctgtaaatattcaatcaatctattatgttataaaatttgattgaaagaaaattataacgaataaataaaatagattctcaccagccaacatgagtgatttctttaaatgtttgcagtttgagttaccgcgaagaaagttttgtgcaatgtggcgcaggcaaaagaaatgggatgtgtcttggacccataagttacttgggttgttgtaggaacttataattgaggggtgtcggtctgaaataagagaaatgttaatttgcagattagcatgtcttatcaaattctttagaaaaaaaccccaagctgaagttgtctccccttctacaatggcataggcaatcaggaagatatggttagctccatcttgtgcggtagctatcaacagtgtgccagtatacttcccgtaaaaccatgtaccatctacttgtactttgggtttgcaatatgcaaaaccattaatgcatggaccaaatgaccaaaagacacgtttaaacaatcttttgcccggtactatttctcccccctcatacaaggattttgtttgagctgcgaccacagtcccagaaacacaagattgcaaagctccgaaaacttttggcagtttgacatatgattcttcccaattttcatgaatcatctccaactctctttgctttgctaaccatgtgttcttgtaggatggggtataattcatgaacattttgatctctgcaatcaacgtcttgatggagacgattgggtttgttttaacaattggttggatgatctgtgctatgacatgtttgttgagttggcgatgatcttgtctgagcatcgacacgagacaagtgtgatgacctctgatactcttgataattcatttgttatgcctcttttaattgcatgcacccaagctccatgtacaaccattttcatgtaacttgcagacgaagtttagccttctctggtcagagtaaattgttttgtaattaaaatgatttctgatgttgtattctttgattgctcgaatacattgtgctttgtcatcgaaggtcatgccaacctcgagtataccgactggtggttgtac

SEQ ID NO: 7619 - DNA, 1180 bp, Glycine max
  Gm_smallRNAprecursor_452
acctctaatcttgaggacttatcagatgaatacgagacttgttgggtcaaaaaccatgatagtgatactaactcctcttctgggcccgaaggaagtaacctgtctccatcccacgaacctatattcaaacgggattgataatctacggatcattcatgtctaagttatttcttctttgagattttcatgtaatgtcttatgttcgtcttcagttatcactttacgtattgaaataatttttcctctaaatttaaattagcaattttcagtttacccacttttattgcaatagttgacatggtaacataactgtcaaaattcacaatactttgccatttacactacactatttctaaaaattaaatgtctcatcgacaaaactgacatgaaatggacaactcataatctctttgttcactctgaaaataatcacgaacgtttgctgctttaattacaagggaaaaatcacagtccaaattgacaacactctgcaatttgcacacgtctctaaaaattaaatgtctcacctgcaaaaatgacatgaaatggacagctttgttcactctgaaaatcatcatgaacgtctgctgctttaattacatgagaaaaaacacagtccaaattgacagcactttgcattatgagttgtccatttcatgtcagttttgcaggtgagacatttaatttttagagacgtgtgcaaaactgacatgagatggacaactcataatccctttgttcactctagaattgtaatggacgtctgttacatcacttactagggagaaaaagaaacattggattccaatacacatcaacctggaagaatactcatacaactataaataacacaacacacacacaatacaaacacacaatctcacacaacataatttcataaaccaaattcaatcttattactatgtcatttttgggagaaacaaacagtcagaccatccattgctaacttcagattaactttcattttttcaaatggatcaatcactcacaatcaaactgatgtttattttcaaattctcactccaacaccaatgcgagttcctaacaattgttcttttgatacactcaagtgtagaatgcacaacacccttcaactaaccaacgatcaattacttgatgaaatctattaccgacaacccattcatagatgaaggtcagc

SEQ ID NO: 7620 - DNA, 1046 bp, Glycine max
  Gm_smallRNAprecursor_453
tattttctatatattttttatatgattttatttaatatttcctatatttttactttttgacacaactttttagattaaattattagacttgtgtcaatataaaaagttgcaaaatcataataatttattgataaataaaatgaattttatgttggagattccatcatgtgaaaaaaaactaaattattaactttgtgactttagttggaaaatatcagcaaaattatatatatatatatatatatatatatatatatatatatatatatatatgtaagaattcacgggtaaggtagtcaggtagtgaatttgaggtgcccttgatgtattctatgtcaaaatcaaagacacaactatttgactgtttgttacaagacaagtagttttgaccgggactttaatggctacaggacaggtagtattgtctagcattaattacatattaattacaaacagacggttttgtgaccgaaattaaatttaatctaaacagataccaaaacaatcatcttcgttttggtaaaagggatcttcttcttcttcttcagcagaacttgtttcttccttctttgaggatgaagcttcttcttcctgctgtaacatttgcagaacttccttcagatttttagctaagacctcctttgatgtcgatcctgctaaaaatgctgttagatgagacttttggttcaaaaacacagaagtctctggatcagctgctttgaggaattctggatgggatcgaaaccagagttttacttgttctggatccgctttggatgagtcaaattgtgtccaccattttacaaatgcgtgtctttgtagtgatggatattggtttgtcttttcagtcttgctataacgatattgccatgagaatatccatgacagtgcaaagcttgaaaagtattgaagatctgctggaattcgtgattcctgcgaattgtattgtttcttaaattgggcaaatccttgttggaccgtttctgggaatatctctgggattggtccaaagaagtcccaccattgcaaaaaccaattgggaaaat

SEQ ID NO: 7621 - DNA, 1158 bp, Glycine max
  Gm_smallRNAprecursor_454
tcctatatttttactttttgacacaactttttagattaaattattagacttgtgtcaatataaaaagttgcaaaatcataataatttattgataaataaaatgaattttatgttggagattccatcatgtgaaaaaaaactaaattattaactttgtgactttagttggaaaatatcagcaaaattatatatatatatatatatatatatatatatatatatatatatatatatgtaagaattcacgggtaaggtagtcaggtagtgaatttgaggtgcccttgatgtattctatgtcaaaatcaaagacacaactatttgactgtttgttacaagacaagtagttttgaccgggactttaatggctacaggacaggtagtattgtctagcattaattacatattaattacaaacagacggttttgtgaccgaaattaaatttaatctaaacagataccaaaacaatcatcttcgttttggtaaaagggatcttcttcttcttcttcagcagaacttgtttcttccttctttgaggatgaagcttcttcttcctgctgtaacatttgcagaacttccttcagatttttagctaagacctcctttgatgtcgatcctgctaaaaatgctgttagatgagacttttggttcaaaaacacagaagtctctggatcagctgctttgaggaattctggatgggatcgaaaccagagttttacttgttctggatccgctttggatgagtcaaattgtgtccaccattttacaaatgcgtgtctttgtagtgatggatattggtttgtcttttcagtcttgctataacgatattgccatgagaatatccatgacagtgcaaagcttgaaaagtattgaagatctgctggaattcgtgattcctgcgaattgtattgtttcttaaattgggcaaatccttgttggaccgtttctgggaatatctctgggattggtccaaagaagtcccaccattgcaaaaaccaattgggaaaattgtaaattgtgttggtcttgaaatatatcagccatgaatgcttgaagcgggtattttggtgccaaaacaccttagtccaagcatcaacgtaatcccaataggtataacctaccggatcaaatggaactaaagatatctataatggtttctt

SEQ ID NO: 7622 - DNA, 1072 bp, Glycine max
  Gm_smallRNAprecursor_455
gcttcttcttcctgctgtaacatttgcagaacttccttcagatttttagctaagacctcctttgatgtcgatcctgctaaaaatgctgttagatgagacttttggttcaaaaacacagaagtctctggatcagctgctttgaggaattctggatgggatcgaaaccagagttttacttgttctggatccgctttggatgagtcaaattgtgtccaccattttacaaatgcgtgtctttgtagtgatggatattggtttgtcttttcagtcttgctataacgatattgccatgagaatatccatgacagtgcaaagcttgaaaagtattgaagatctgctggaattcgtgattcctgcgaattgtattgtttcttaaattgggcaaatccttgttggaccgtttctgggaatatctctgggattggtccaaagaagtcccaccattgcaaaaaccaattgggaaaattgtaaattgtgttggtcttgaaatatatcagccatgaatgcttgaagcgggtattttggtgccaaaacaccttagtccaagcatcaacgtaatcccaataggtataacctaccggatcaaatggaactaaagatatctataatggtttcttctgaacactcgtgggaggtttggtaagccgtagctaccatggtcatatgttggagtgtattcatgatattatactccgtttgtgcatctatgttccattcatagatgttatttgcactaaaactcttaaaattgttttcacctctttcttctaatagaaggtcaggggcagttggacgttgataatataatttggagggtgttttccagtgtttggaattaattggatttatattcttttctgacactgatcctatctcagttgtgttatctgagttttggtcactatcttcattaataacattaattaatttggaggtacttcttgttaccattttggaagtattttccgaggcttggggagtatctggaatgaccttaagtaaactaccaatcttgtttagtaattcactatggttgtcacctacgccttcaattaaggatttagtttttcta

SEQ ID NO: 7623 - DNA, 1189 bp, Glycine max
  Gm_smallRNAprecursor_456
gcttcttcttcctgctgtaacatttgcagaacttccttcagatttttagctaagacctcctttgatgtcgatcctgctaaaaatgctgttagatgagacttttggttcaaaaacacagaagtctctggatcagctgctttgaggaattctggatgggatcgaaaccagagttttacttgttctggatccgctttggatgagtcaaattgtgtccaccattttacaaatgcgtgtctttgtagtgatggatattggtttgtcttttcagtcttgctataacgatattgccatgagaatatccatgacagtgcaaagcttgaaaagtattgaagatctgctggaattcgtgattcctgcgaattgtattgtttcttaaattgggcaaatccttgttggaccgtttctgggaatatctctgggattggtccaaagaagtcccaccattgcaaaaaccaattgggaaaattgtaaattgtgttggtcttgaaatatatcagccatgaatgcttgaagcgggtattttggtgccaaaacaccttagtccaagcatcaacgtaatcccaataggtataacctaccggatcaaatggaactaaagatatctataatggtttcttctgaacactcgtgggaggtttggtaagccgtagctaccatggtcatatgttggagtgtattcatgatattatactccgtttgtgcatctatgttccattcatagatgttatttgcactaaaactcttaaaattgttttcacctctttcttctaatagaaggtcaggggcagttggacgttgataatataatttggagggtgttttccagtgtttggaattaattggatttatattcttttctgacactgatcctatctcagttgtgttatctgagttttggtcactatcttcattaataacattaattaatttggaggtacttcttgttaccattttggaagtattttccgaggcttggggagtatctggaatgaccttaagtaaactaccaatcttgtttagtaattcactatggttgtcacctacgccttcaattaaggatttagtttttctaagttccctaatttttcgtttagccttttcactaactttgaaaggtttgaataaaggtttttcaatggggatacttggctaagcttcctcaattaatttttgtttaggaactacctta

SEQ ID NO: 7624 - DNA, 1166 bp, Glycine max
  Gm_smallRNAprecursor_457
attttgctggtttttttcttatatgtaaatataaataatataaggttatgccatagggacatggtcatttttacccctaacaatcttagaagtaaatatagaccatgtttttacgccatacccttataccatttatatttacatattagcaaaaagacacagtaaaatcttaaggacaaatagttaagaaacttgttcattagctgcaaatatccttccctcctcaagtgcaaacttcttgcgtagccgctcttggtgctcagaaaatcccaaaaataaatccctcttattactagctattttgaattctttagttcctgaatatacaaccttcaaattgttgctcgttcccctctttgagaatgaggaggatcttcataggacttcatccagctgatgtttgtcggcagtttcatcatccaccacccttttcttctgtgccttctcacgttcattgttgttaaacccatatttatgccttcttcccttcatgtcttgcttgatcacaactttagctgaatctcccatcttcagcatagttgaatctcctgtcttattgtccaatgccacattttgatggcctgtatctcttttgttcgtatgttctactgcttcagcttcacaatgcatagagcaatcagaattttcgagtcatcaccaaaggcttctgcatcagcgttgacactctctaccctctttggtttatgcttctgtgttttcttccatgcttcctccttataattctcagatttattggaggtcccactagaaggatcagcaccaattcgtgcctgttcctcctctaccagctcaatatctttcctttcacctttgcttttgaaaactacactgtaatttacaaaacaaaagttgaaaggaaagatattgacctgatagacgaggaagaagcacagattggtggtgatcgttctagtgcaacctcgaataaagctgagatttataacgaggaggcacggaagaaaacacagaagcataaaccaaagagggtggagagtgtcaatgctgatgcagaagcctttggtgatcactcggaaattcggattgctttatgcattctgaagctgaagcactagaacatacgaagaaaagagatacaggccatcaaagtgtggcattggataatgagacaggagtttcaactatgc

SEQ ID NO: 7625 - DNA, 1058 bp, Glycine max
  Gm_smallRNAprecursor_458
tgttaattatttatcattgttgatttatgtgtttgtcattaattttttttaataattgtataatttgtacttcaaatcaggaacgtcctgatttgaagttggtgtcacatgggaggaaggtgacactgattgggaggccagtgcctgagattttaggcctggtggttgccacaggattaagtccactgatcgattattcagttattactggcaatcctggactgatatccgcattcgtggagaggtggcacggtgagaccagcaccttccaccttccggtaggagagtttacgatcacattggatgatgtgtcgttactccttcatttgcccatcactggcgcgttgcacaatttccatgctctttctacagaggaggccagatttttgctgacagagttgcttgaggtgtctgccgaggaggctagagccgagaccatggttatcaaactctcgagttaattcgctaactcttacgagtttacgagtccacttgtcctctacgagttgactcttgagtaaactctttttttagtggactatgggtaaactctataaactctaagtaaactcggtagactctcgagtttaccaccgagtcaacgagttagcaagttaaaaaaattagaccaaaatgtaagtcattttttattgttttatgtgtttagcattcaacatatcttcattgagcatgttattctcaaatacaaaattctcacctttaataatattaaacctcttgttctctaataacatcaaaccctcgatgagaatgatctaccactagtataacctctacaaattattgtctactagtgatgtattattactagacttggtttaaatattcagaactttatgatttactgttttgctttattatattgttgaaatatttaattagtatattttttttacaaatattttgttattatttttatatgaagtagactcttacgagtctacaagttgagtctacgagtcgagtctatagaactctcacgagtctgcgtaaactctcgagtttgataaccttggctgagacagcactgacacgtg

SEQ ID NO: 7626 - DNA, 1053 bp, Glycine max
  Gm_smallRNAprecursor_459
ttaattatttatcattgttgatttatgtgtttgtcattaattttttttaataattgtataatttgtacttcaaatcaggaacgtcctgatttgaagttggtgtcacatgggaggaaggtgacactgattgggaggccagtgcctgagattttaggcctggtggttgccacaggattaagtccactgatcgattattcagttattactggcaatcctggactgatatccgcattcgtggagaggtggcacggtgagaccagcaccttccaccttccggtaggagagtttacgatcacattggatgatgtgtcgttactccttcatttgcccatcactggcgcgttgcacaatttccatgctctttctacagaggaggccagatttttgctgacagagttgcttgaggtgtctgccgaggaggctagagccgagaccatggttatcaaactctcgagttaattcgctaactcttacgagtttacgagtccacttgtcctctacgagttgactcttgagtaaactctttttttagtggactatgggtaaactctataaactctaagtaaactcggtagactctcgagtttaccaccgagtcaacgagttagcaagttaaaaaaattagaccaaaatgtaagtcattttttattgttttatgtgtttagcattcaacatatcttcattgagcatgttattctcaaatacaaaattctcacctttaataatattaaacctcttgttctctaataacatcaaaccctcgatgagaatgatctaccactagtataacctctacaaattattgtctactagtgatgtattattactagacttggtttaaatattcagaactttatgatttactgttttgctttattatattgttgaaatatttaattagtatattttttttacaaatattttgttattatttttatatgaagtagactcttacgagtctacaagttgagtctacgagtcgagtctatagaactctcacgagtctgcgtaaactctcgagtttgataaccttggctgagacagcactgacac

SEQ ID NO: 7627 - DNA, 1085 bp, Glycine max
  Gm_smallRNAprecursor_460
tgcaacaaacattgccatgaaggtacaagttgatgattcatggctatggcatcgaagatttggccatttcaacacacatgccttgaagttgttgcattagaagaacatgatgagagatcttccaagcataaaggagaacaatgaagtgtgtgaaggatgtctccttggtaagcaacaccgatttcctttctcaacaagcggagcatggagagcgaaagatctattggagctgatacatacggatgtttgtggaccaatgaagacgccatcacatgggaacaacaggtacttcatactcttcattgatgacttctctagaatgacatgggtatattttctaaaagaaaaatcagaagtctttggagtattcaaaaagttcaaggctcttgctgaaaatcaaagtggaaaacggataaaagtactaagaagtgatcgcgacaaagagtacacctctcgcgagtttgaaagattttgtgaggatgaaggcattgagcgacaacttacagtcgcatattctcctcaacaaaatggagtgtccgagagaaagaatcgcacagttatggagatggctagatcgatgctcaaggagaagggactacctaacacattctgggctgaagcagtctacactgctgtttacatactcaacatatgtccaactaagtctgtaaaagacaagactccaattgaagcttggaacgggaagaagccatcagcaaaacacctaagggtctttggatctatatgctacattcatattccagacgtgaagaggcacaagcttgaagacaagactatatgaggtatcttccttgggtatagcaatatctctaagggctaccgtgtctacaacttgcaaactaagaaactcgtcatcagtcgagatgttgaagttgatgagtacgcttcttggaattgggatgaagaaaaagtggagaagaacgttcttatacccgctcaactacctcaagaagaagctgaggaagaagacccaccttcacctccaccacaacaacaagatcaagaactatcatcaccagagtctactccaagacgagtaagatctttggtggacatatatgaaa

SEQ ID NO: 7628 - DNA, 1076 bp, Glycine max
  Gm_smallRNAprecursor_461
aaaatagctgttataaaattggatctgatcgtatcaagtgtctttttgtcaacaaagatattttgactctgctgatgctgatatttttctctgtttctttccacaagttagcgaacactttggagaacgaaatatcttgtttttcttccaattaaattaaatatgaattgaggcaaaaaaaaaaaaattacacttctttgtagttatcatattttgaataacaaatcttaatatttgaaaagaatcatattaagtactgaaaatattatactgctacttatattaaacctttaatttaatacggatttatctttaatgtcgagaatatgccgcagtgcatattatatactactagtacttttttatgacagatatatacttgtacttattcatagcaaaaataaataaatatttatattaaataacactttaatttagtacaggtttatgtttaatgccaagaatatgccgagtacatattatctatgaagcaccgacaccgatacagacaccagacacgacacggatatgaacacatggacacctataatatccaaaatatagaacgtaatacgggtgtcgtgtcggtgtcggagactgacacgcgtgtcaaacaccaaacacgacaaagggctgaagtgtccgtgcttcatagcatactatacctgatatatatttaattagccaagctattttcttcgccaaatcaggtaagtttcctgggaacacaattgatgcttgatataagaaaaaacatgtctagggttccaagaatagatacgatttcaatttcactggctatggtcgaggtatcgtagctggcattcagattttaaataacttttcaacaaaaaaggtggggaggggatgtcaattttccttcttttcatgaaaacattcttatggagaatatatatatccattatttccaacaaattactttagtttatatcttttcaaaacttttttttagacagcttttcacgcccacataattaatggataaatattatcccatgttcatttttacacttcattcaaatcctaattattcatcctttttatatggaacctat

SEQ ID NO: 7629 - DNA, 1083 bp, Glycine max
  Gm_smallRNAprecursor_462
gatagataaaagacagtttgagggtttattcataaaagtattacaaaattagtttatttatacaaaaacaaaaccaactgcttaatcgtgatagaaactagtaagtgtagttatatttgaaaattttaactgttccaacaagtaaataaattcctaatgttttgttttattcaaatctcgatacacaagagcttttctgtttaatgttaattttatgttcagagctttgaaggagcatgccatttgttaatctatgtttaagctatgtttgtgttgaatgtagatgccaatcaattaataccgataagaggaaatcaaacagaaatctgctggacaacgcaagtaacctccttacggacttgttaagtggtggaagtatagggtctatgcccatagctgaaggtgcagtctcacatctgtttggccgacctctctttttctcactatatgattggttcttggaggtacttacatttttctcaatcatgaactatgaagcaccgacaccgacacggacaccggacacgacacggatacggacacgtggacacctgtaatgtccaaaatataaaacgtaatacgggtgtcgtgtcggtgtcggacactgacacggacgcgtgtcggacaccggatacggcaaagggctgaagtgtccgtgcttcatagatcatgaacttgttgtgtcccactttacataagttttatatatgattttttttccactttcacttatcctttttgttttcattcttatatttgtttgttttaatttttcacttttgaatggagttcaaggtttgattggtggttgaatggagaaggggagggagaggttgtgggttcgaatccctctcactaacaaaaactaatatttgcctataaaaaaatcacttttgtattttggtgcttttacttcaatgcatgttaacttatagttatatatgagaatatatagtttcctcataaaattacacagattgttttgtttactctttccatcattttttagtttactcgatcattcctattttaattatcatctgaggatattattgaacatgatgcagcatggcgcggtgtata

SEQ ID NO: 7630 - DNA, 1084 bp, Glycine max
  Gm_smallRNAprecursor_463
gatagataaaagacagtttgagggtttattcataaaagtattacaaaattagtttatttatacaaaaacaaaaccaactgcttaatcgtgatagaaactagtaagtgtagttatatttgaaaattttaactgttccaacaagtaaataaattcctaatgttttgttttattcaaatctcgatacacaagagcttttctgtttaatgttaattttatgttcagagctttgaaggagcatgccatttgttaatctatgtttaagctatgtttgtgttgaatgtagatgccaatcaattaataccgataagaggaaatcaaacagaaatctgctggacaacgcaagtaacctccttacggacttgttaagtggtggaagtatagggtctatgcccatagctgaaggtgcagtctcacatctgtttggccgacctctctttttctcactatatgattggttcttggaggtacttacatttttctcaatcatgaactatgaagcaccgacaccgacacggacaccggacacgacacggatacggacacgtggacacctgtaatgtccaaaatataaaacgtaatacgggtgtcgtgtcggtgtcggacactgacacggacgcgtgtcggacaccggatacggcaaagggctgaagtgtccgtgcttcatagatcatgaacttgttgtgtcccactttacataagttttatatatgattttttttccactttcacttatcctttttgttttcattcttatatttgtttgttttaatttttcacttttgaatggagttcaaggtttgattggtggttgaatggagaaggggagggagaggttgtgggttcgaatccctctcactaacaaaaactaatatttgcctataaaaaaatcacttttgtattttggtgcttttacttcaatgcatgttaacttatagttatatatgagaatatatagtttcctcataaaattacacagattgttttgtttactctttccatcattttttagtttactcgatcattcctattttaattatcatctgaggatattattgaacatgatgcagcatggcgcggtgtataa

SEQ ID NO: 7631 - DNA, 1085 bp, Glycine max
  Gm_smallRNAprecursor_464
gatagataaaagacagtttgagggtttattcataaaagtattacaaaattagtttatttatacaaaaacaaaaccaactgcttaatcgtgatagaaactagtaagtgtagttatatttgaaaattttaactgttccaacaagtaaataaattcctaatgttttgttttattcaaatctcgatacacaagagcttttctgtttaatgttaattttatgttcagagctttgaaggagcatgccatttgttaatctatgtttaagctatgtttgtgttgaatgtagatgccaatcaattaataccgataagaggaaatcaaacagaaatctgctggacaacgcaagtaacctccttacggacttgttaagtggtggaagtatagggtctatgcccatagctgaaggtgcagtctcacatctgtttggccgacctctctttttctcactatatgattggttcttggaggtacttacatttttctcaatcatgaactatgaagcaccgacaccgacacggacaccggacacgacacggatacggacacgtggacacctgtaatgtccaaaatataaaacgtaatacgggtgtcgtgtcggtgtcggacactgacacggacgcgtgtcggacaccggatacggcaaagggctgaagtgtccgtgcttcatagatcatgaacttgttgtgtcccactttacataagttttatatatgattttttttccactttcacttatcctttttgttttcattcttatatttgtttgttttaatttttcacttttgaatggagttcaaggtttgattggtggttgaatggagaaggggagggagaggttgtgggttcgaatccctctcactaacaaaaactaatatttgcctataaaaaaatcacttttgtattttggtgcttttacttcaatgcatgttaacttatagttatatatgagaatatatagtttcctcataaaattacacagattgttttgtttactctttccatcattttttagtttactcgatcattcctattttaattatcatctgaggatattattgaacatgatgcagcatggcgcggtgtataaa

SEQ ID NO: 7632 - DNA, 1107 bp, Glycine max
  Gm_smallRNAprecursor_465
gatagataaaagacagtttgagggtttattcataaaagtattacaaaattagtttatttatacaaaaacaaaaccaactgcttaatcgtgatagaaactagtaagtgtagttatatttgaaaattttaactgttccaacaagtaaataaattcctaatgttttgttttattcaaatctcgatacacaagagcttttctgtttaatgttaattttatgttcagagctttgaaggagcatgccatttgttaatctatgtttaagctatgtttgtgttgaatgtagatgccaatcaattaataccgataagaggaaatcaaacagaaatctgctggacaacgcaagtaacctccttacggacttgttaagtggtggaagtatagggtctatgcccatagctgaaggtgcagtctcacatctgtttggccgacctctctttttctcactatatgattggttcttggaggtacttacatttttctcaatcatgaactatgaagcaccgacaccgacacggacaccggacacgacacggatacggacacgtggacacctgtaatgtccaaaatataaaacgtaatacgggtgtcgtgtcggtgtcggacactgacacggacgcgtgtcggacaccggatacggcaaagggctgaagtgtccgtgcttcatagatcatgaacttgttgtgtcccactttacataagttttatatatgattttttttccactttcacttatcctttttgttttcattcttatatttgtttgttttaatttttcacttttgaatggagttcaaggtttgattggtggttgaatggagaaggggagggagaggttgtgggttcgaatccctctcactaacaaaaactaatatttgcctataaaaaaatcacttttgtattttggtgcttttacttcaatgcatgttaacttatagttatatatgagaatatatagtttcctcataaaattacacagattgttttgtttactctttccatcattttttagtttactcgatcattcctattttaattatcatctgaggatattattgaacatgatgcagcatggcgcggtgtataaacttgcctttggaccaaaagcat

SEQ ID NO: 7633 - DNA, 1112 bp, Glycine max
  Gm_smallRNAprecursor_466
gatagataaaagacagtttgagggtttattcataaaagtattacaaaattagtttatttatacaaaaacaaaaccaactgcttaatcgtgatagaaactagtaagtgtagttatatttgaaaattttaactgttccaacaagtaaataaattcctaatgttttgttttattcaaatctcgatacacaagagcttttctgtttaatgttaattttatgttcagagctttgaaggagcatgccatttgttaatctatgtttaagctatgtttgtgttgaatgtagatgccaatcaattaataccgataagaggaaatcaaacagaaatctgctggacaacgcaagtaacctccttacggacttgttaagtggtggaagtatagggtctatgcccatagctgaaggtgcagtctcacatctgtttggccgacctctctttttctcactatatgattggttcttggaggtacttacatttttctcaatcatgaactatgaagcaccgacaccgacacggacaccggacacgacacggatacggacacgtggacacctgtaatgtccaaaatataaaacgtaatacgggtgtcgtgtcggtgtcggacactgacacggacgcgtgtcggacaccggatacggcaaagggctgaagtgtccgtgcttcatagatcatgaacttgttgtgtcccactttacataagttttatatatgattttttttccactttcacttatcctttttgttttcattcttatatttgtttgttttaatttttcacttttgaatggagttcaaggtttgattggtggttgaatggagaaggggagggagaggttgtgggttcgaatccctctcactaacaaaaactaatatttgcctataaaaaaatcacttttgtattttggtgcttttacttcaatgcatgttaacttatagttatatatgagaatatatagtttcctcataaaattacacagattgttttgtttactctttccatcattttttagtttactcgatcattcctattttaattatcatctgaggatattattgaacatgatgcagcatggcgcggtgtataaacttgcctttggaccaaaagcatttgtc

SEQ ID NO: 7634 - DNA, 1113 bp, Glycine max
  Gm_smallRNAprecursor_467
gatagataaaagacagtttgagggtttattcataaaagtattacaaaattagtttatttatacaaaaacaaaaccaactgcttaatcgtgatagaaactagtaagtgtagttatatttgaaaattttaactgttccaacaagtaaataaattcctaatgttttgttttattcaaatctcgatacacaagagcttttctgtttaatgttaattttatgttcagagctttgaaggagcatgccatttgttaatctatgtttaagctatgtttgtgttgaatgtagatgccaatcaattaataccgataagaggaaatcaaacagaaatctgctggacaacgcaagtaacctccttacggacttgttaagtggtggaagtatagggtctatgcccatagctgaaggtgcagtctcacatctgtttggccgacctctctttttctcactatatgattggttcttggaggtacttacatttttctcaatcatgaactatgaagcaccgacaccgacacggacaccggacacgacacggatacggacacgtggacacctgtaatgtccaaaatataaaacgtaatacgggtgtcgtgtcggtgtcggacactgacacggacgcgtgtcggacaccggatacggcaaagggctgaagtgtccgtgcttcatagatcatgaacttgttgtgtcccactttacataagttttatatatgattttttttccactttcacttatcctttttgttttcattcttatatttgtttgttttaatttttcacttttgaatggagttcaaggtttgattggtggttgaatggagaaggggagggagaggttgtgggttcgaatccctctcactaacaaaaactaatatttgcctataaaaaaatcacttttgtattttggtgcttttacttcaatgcatgttaacttatagttatatatgagaatatatagtttcctcataaaattacacagattgttttgtttactctttccatcattttttagtttactcgatcattcctattttaattatcatctgaggatattattgaacatgatgcagcatggcgcggtgtataaacttgcctttggaccaaaagcatttgtcg

SEQ ID NO: 7635 - DNA, 1118 bp, Glycine max
  Gm_smallRNAprecursor_468
gatagataaaagacagtttgagggtttattcataaaagtattacaaaattagtttatttatacaaaaacaaaaccaactgcttaatcgtgatagaaactagtaagtgtagttatatttgaaaattttaactgttccaacaagtaaataaattcctaatgttttgttttattcaaatctcgatacacaagagcttttctgtttaatgttaattttatgttcagagctttgaaggagcatgccatttgttaatctatgtttaagctatgtttgtgttgaatgtagatgccaatcaattaataccgataagaggaaatcaaacagaaatctgctggacaacgcaagtaacctccttacggacttgttaagtggtggaagtatagggtctatgcccatagctgaaggtgcagtctcacatctgtttggccgacctctctttttctcactatatgattggttcttggaggtacttacatttttctcaatcatgaactatgaagcaccgacaccgacacggacaccggacacgacacggatacggacacgtggacacctgtaatgtccaaaatataaaacgtaatacgggtgtcgtgtcggtgtcggacactgacacggacgcgtgtcggacaccggatacggcaaagggctgaagtgtccgtgcttcatagatcatgaacttgttgtgtcccactttacataagttttatatatgattttttttccactttcacttatcctttttgttttcattcttatatttgtttgttttaatttttcacttttgaatggagttcaaggtttgattggtggttgaatggagaaggggagggagaggttgtgggttcgaatccctctcactaacaaaaactaatatttgcctataaaaaaatcacttttgtattttggtgcttttacttcaatgcatgttaacttatagttatatatgagaatatatagtttcctcataaaattacacagattgttttgtttactctttccatcattttttagtttactcgatcattcctattttaattatcatctgaggatattattgaacatgatgcagcatggcgcggtgtataaacttgcctttggaccaaaagcatttgtcgttgta

SEQ ID NO: 7636 - DNA, 1119 bp, Glycine max
  Gm_smallRNAprecursor_469
gatagataaaagacagtttgagggtttattcataaaagtattacaaaattagtttatttatacaaaaacaaaaccaactgcttaatcgtgatagaaactagtaagtgtagttatatttgaaaattttaactgttccaacaagtaaataaattcctaatgttttgttttattcaaatctcgatacacaagagcttttctgtttaatgttaattttatgttcagagctttgaaggagcatgccatttgttaatctatgtttaagctatgtttgtgttgaatgtagatgccaatcaattaataccgataagaggaaatcaaacagaaatctgctggacaacgcaagtaacctccttacggacttgttaagtggtggaagtatagggtctatgcccatagctgaaggtgcagtctcacatctgtttggccgacctctctttttctcactatatgattggttcttggaggtacttacatttttctcaatcatgaactatgaagcaccgacaccgacacggacaccggacacgacacggatacggacacgtggacacctgtaatgtccaaaatataaaacgtaatacgggtgtcgtgtcggtgtcggacactgacacggacgcgtgtcggacaccggatacggcaaagggctgaagtgtccgtgcttcatagatcatgaacttgttgtgtcccactttacataagttttatatatgattttttttccactttcacttatcctttttgttttcattcttatatttgtttgttttaatttttcacttttgaatggagttcaaggtttgattggtggttgaatggagaaggggagggagaggttgtgggttcgaatccctctcactaacaaaaactaatatttgcctataaaaaaatcacttttgtattttggtgcttttacttcaatgcatgttaacttatagttatatatgagaatatatagtttcctcataaaattacacagattgttttgtttactctttccatcattttttagtttactcgatcattcctattttaattatcatctgaggatattattgaacatgatgcagcatggcgcggtgtataaacttgcctttggaccaaaagcatttgtcgttgtat

SEQ ID NO: 7637 - DNA, 1119 bp, Glycine max; identical to SEQ ID NO: 7636
  Gm_smallRNAprecursor_470

SEQ ID NO: 7638 - DNA, 1082 bp, Glycine max
  Gm_smallRNAprecursor_471
atagataaaagacagtttgagggtttattcataaaagtattacaaaattagtttatttatacaaaaacaaaaccaactgcttaatcgtgatagaaactagtaagtgtagttatatttgaaaattttaactgttccaacaagtaaataaattcctaatgttttgttttattcaaatctcgatacacaagagcttttctgtttaatgttaattttatgttcagagctttgaaggagcatgccatttgttaatctatgtttaagctatgtttgtgttgaatgtagatgccaatcaattaataccgataagaggaaatcaaacagaaatctgctggacaacgcaagtaacctccttacggacttgttaagtggtggaagtatagggtctatgcccatagctgaaggtgcagtctcacatctgtttggccgacctctctttttctcactatatgattggttcttggaggtacttacatttttctcaatcatgaactatgaagcaccgacaccgacacggacaccggacacgacacggatacggacacgtggacacctgtaatgtccaaaatataaaacgtaatacgggtgtcgtgtcggtgtcggacactgacacggacgcgtgtcggacaccggatacggcaaagggctgaagtgtccgtgcttcatagatcatgaacttgttgtgtcccactttacataagttttatatatgattttttttccactttcacttatcctttttgttttcattcttatatttgtttgttttaatttttcacttttgaatggagttcaaggtttgattggtggttgaatggagaaggggagggagaggttgtgggttcgaatccctctcactaacaaaaactaatatttgcctataaaaaaatcacttttgtattttggtgcttttacttcaatgcatgttaacttatagttatatatgagaatatatagtttcctcataaaattacacagattgttttgtttactctttccatcattttttagtttactcgatcattcctattttaattatcatctgaggatattattgaacatgatgcagcatggcgcggtgtata

SEQ ID NO: 7639 - DNA, 1082 bp, Glycine max; identical to SEQ ID NO: 7638
  Gm_smallRNAprecursor_472

SEQ ID NO: 7640 - DNA, 1083 bp, Glycine max
  Gm_smallRNAprecursor_473
atagataaaagacagtttgagggtttattcataaaagtattacaaaattagtttatttatacaaaaacaaaaccaactgcttaatcgtgatagaaactagtaagtgtagttatatttgaaaattttaactgttccaacaagtaaataaattcctaatgttttgttttattcaaatctcgatacacaagagcttttctgtttaatgttaattttatgttcagagctttgaaggagcatgccatttgttaatctatgtttaagctatgtttgtgttgaatgtagatgccaatcaattaataccgataagaggaaatcaaacagaaatctgctggacaacgcaagtaacctccttacggacttgttaagtggtggaagtatagggtctatgcccatagctgaaggtgcagtctcacatctgtttggccgacctctctttttctcactatatgattggttcttggaggtacttacatttttctcaatcatgaactatgaagcaccgacaccgacacggacaccggacacgacacggatacggacacgtggacacctgtaatgtccaaaatataaaacgtaatacgggtgtcgtgtcggtgtcggacactgacacggacgcgtgtcggacaccggatacggcaaagggctgaagtgtccgtgcttcatagatcatgaacttgttgtgtcccactttacataagttttatatatgattttttttccactttcacttatcctttttgttttcattcttatatttgtttgttttaatttttcacttttgaatggagttcaaggtttgattggtggttgaatggagaaggggagggagaggttgtgggttcgaatccctctcactaacaaaaactaatatttgcctataaaaaaatcacttttgtattttggtgcttttacttcaatgcatgttaacttatagttatatatgagaatatatagtttcctcataaaattacacagattgttttgtttactctttccatcattttttagtttactcgatcattcctattttaattatcatctgaggatattattgaacatgatgcagcatggcgcggtgtataa

SEQ ID NO: 7641 - DNA, 1117 bp, Glycine max
  Gm_smallRNAprecursor_474
atagataaaagacagtttgagggtttattcataaaagtattacaaaattagtttatttatacaaaaacaaaaccaactgcttaatcgtgatagaaactagtaagtgtagttatatttgaaaattttaactgttccaacaagtaaataaattcctaatgttttgttttattcaaatctcgatacacaagagcttttctgtttaatgttaattttatgttcagagctttgaaggagcatgccatttgttaatctatgtttaagctatgtttgtgttgaatgtagatgccaatcaattaataccgataagaggaaatcaaacagaaatctgctggacaacgcaagtaacctccttacggacttgttaagtggtggaagtatagggtctatgcccatagctgaaggtgcagtctcacatctgtttggccgacctctctttttctcactatatgattggttcttggaggtacttacatttttctcaatcatgaactatgaagcaccgacaccgacacggacaccggacacgacacggatacggacacgtggacacctgtaatgtccaaaatataaaacgtaatacgggtgtcgtgtcggtgtcggacactgacacggacgcgtgtcggacaccggatacggcaaagggctgaagtgtccgtgcttcatagatcatgaacttgttgtgtcccactttacataagttttatatatgattttttttccactttcacttatcctttttgttttcattcttatatttgtttgttttaatttttcacttttgaatggagttcaaggtttgattggtggttgaatggagaaggggagggagaggttgtgggttcgaatccctctcactaacaaaaactaatatttgcctataaaaaaatcacttttgtattttggtgcttttacttcaatgcatgttaacttatagttatatatgagaatatatagtttcctcataaaattacacagattgttttgtttactctttccatcattttttagtttactcgatcattcctattttaattatcatctgaggatattattgaacatgatgcagcatggcgcggtgtataaacttgcctttggaccaaaagcatttgtcgttgta

SEQ ID NO: 7642 - DNA, 1117 bp, Glycine max; identical to SEQ ID NO: 7641
  Gm_smallRNAprecursor_475

SEQ ID NO: 7643 - DNA, 1077 bp, Glycine max
  Gm_smallRNAprecursor_476
taaaagacagtttgagggtttattcataaaagtattacaaaattagtttatttatacaaaaacaaaaccaactgcttaatcgtgatagaaactagtaagtgtagttatatttgaaaattttaactgttccaacaagtaaataaattcctaatgttttgttttattcaaatctcgatacacaagagcttttctgtttaatgttaattttatgttcagagctttgaaggagcatgccatttgttaatctatgtttaagctatgtttgtgttgaatgtagatgccaatcaattaataccgataagaggaaatcaaacagaaatctgctggacaacgcaagtaacctccttacggacttgttaagtggtggaagtatagggtctatgcccatagctgaaggtgcagtctcacatctgtttggccgacctctctttttctcactatatgattggttcttggaggtacttacatttttctcaatcatgaactatgaagcaccgacaccgacacggacaccggacacgacacggatacggacacgtggacacctgtaatgtccaaaatataaaacgtaatacgggtgtcgtgtcggtgtcggacactgacacggacgcgtgtcggacaccggatacggcaaagggctgaagtgtccgtgcttcatagatcatgaacttgttgtgtcccactttacataagttttatatatgattttttttccactttcacttatcctttttgttttcattcttatatttgtttgttttaatttttcacttttgaatggagttcaaggtttgattggtggttgaatggagaaggggagggagaggttgtgggttcgaatccctctcactaacaaaaactaatatttgcctataaaaaaatcacttttgtattttggtgcttttacttcaatgcatgttaacttatagttatatatgagaatatatagtttcctcataaaattacacagattgttttgtttactctttccatcattttttagtttactcgatcattcctattttaattatcatctgaggatattattgaacatgatgcagcatggcgcggtgtata

SEQ ID NO: 7644 - DNA, 1077 bp, Glycine max; identical to SEQ ID NO: 7643
  Gm_smallRNAprecursor_477

SEQ ID NO: 7645 - DNA, 1078 bp, Glycine max
  Gm_smallRNAprecursor_478
taaaagacagtttgagggtttattcataaaagtattacaaaattagtttatttatacaaaaacaaaaccaactgcttaatcgtgatagaaactagtaagtgtagttatatttgaaaattttaactgttccaacaagtaaataaattcctaatgttttgttttattcaaatctcgatacacaagagcttttctgtttaatgttaattttatgttcagagctttgaaggagcatgccatttgttaatctatgtttaagctatgtttgtgttgaatgtagatgccaatcaattaataccgataagaggaaatcaaacagaaatctgctggacaacgcaagtaacctccttacggacttgttaagtggtggaagtatagggtctatgcccatagctgaaggtgcagtctcacatctgtttggccgacctctctttttctcactatatgattggttcttggaggtacttacatttttctcaatcatgaactatgaagcaccgacaccgacacggacaccggacacgacacggatacggacacgtggacacctgtaatgtccaaaatataaaacgtaatacgggtgtcgtgtcggtgtcggacactgacacggacgcgtgtcggacaccggatacggcaaagggctgaagtgtccgtgcttcatagatcatgaacttgttgtgtcccactttacataagttttatatatgattttttttccactttcacttatcctttttgttttcattcttatatttgtttgttttaatttttcacttttgaatggagttcaaggtttgattggtggttgaatggagaaggggagggagaggttgtgggttcgaatccctctcactaacaaaaactaatatttgcctataaaaaaatcacttttgtattttggtgcttttacttcaatgcatgttaacttatagttatatatgagaatatatagtttcctcataaaattacacagattgttttgtttactctttccatcattttttagtttactcgatcattcctattttaattatcatctgaggatattattgaacatgatgcagcatggcgcggtgtataa

SEQ ID NO: 7646 - DNA, 1078 bp, Glycine max; identical to SEQ ID NO: 7645
  Gm_smallRNAprecursor_479

SEQ ID NO: 7647 - DNA, 1079 bp, Glycine max
  Gm_smallRNAprecursor_480
taaaagacagtttgagggtttattcataaaagtattacaaaattagtttatttatacaaaaacaaaaccaactgcttaatcgtgatagaaactagtaagtgtagttatatttgaaaattttaactgttccaacaagtaaataaattcctaatgttttgttttattcaaatctcgatacacaagagcttttctgtttaatgttaattttatgttcagagctttgaaggagcatgccatttgttaatctatgtttaagctatgtttgtgttgaatgtagatgccaatcaattaataccgataagaggaaatcaaacagaaatctgctggacaacgcaagtaacctccttacggacttgttaagtggtggaagtatagggtctatgcccatagctgaaggtgcagtctcacatctgtttggccgacctctctttttctcactatatgattggttcttggaggtacttacatttttctcaatcatgaactatgaagcaccgacaccgacacggacaccggacacgacacggatacggacacgtggacacctgtaatgtccaaaatataaaacgtaatacgggtgtcgtgtcggtgtcggacactgacacggacgcgtgtcggacaccggatacggcaaagggctgaagtgtccgtgcttcatagatcatgaacttgttgtgtcccactttacataagttttatatatgattttttttccactttcacttatcctttttgttttcattcttatatttgtttgttttaatttttcacttttgaatggagttcaaggtttgattggtggttgaatggagaaggggagggagaggttgtgggttcgaatccctctcactaacaaaaactaatatttgcctataaaaaaatcacttttgtattttggtgcttttacttcaatgcatgttaacttatagttatatatgagaatatatagtttcctcataaaattacacagattgttttgtttactctttccatcattttttagtttactcgatcattcctattttaattatcatctgaggatattattgaacatgatgcagcatggcgcggtgtataaa

SEQ ID NO: 7648 - DNA, 1079 bp, Glycine max; identical to SEQ ID NO: 7647
  Gm_smallRNAprecursor_481

SEQ ID NO: 7649 - DNA, 1080 bp, Glycine max
  Gm_smallRNAprecursor_482
taaaagacagtttgagggtttattcataaaagtattacaaaattagtttatttatacaaaaacaaaaccaactgcttaatcgtgatagaaactagtaagtgtagttatatttgaaaattttaactgttccaacaagtaaataaattcctaatgttttgttttattcaaatctcgatacacaagagcttttctgtttaatgttaattttatgttcagagctttgaaggagcatgccatttgttaatctatgtttaagctatgtttgtgttgaatgtagatgccaatcaattaataccgataagaggaaatcaaacagaaatctgctggacaacgcaagtaacctccttacggacttgttaagtggtggaagtatagggtctatgcccatagctgaaggtgcagtctcacatctgtttggccgacctctctttttctcactatatgattggttcttggaggtacttacatttttctcaatcatgaactatgaagcaccgacaccgacacggacaccggacacgacacggatacggacacgtggacacctgtaatgtccaaaatataaaacgtaatacgggtgtcgtgtcggtgtcggacactgacacggacgcgtgtcggacaccggatacggcaaagggctgaagtgtccgtgcttcatagatcatgaacttgttgtgtcccactttacataagttttatatatgattttttttccactttcacttatcctttttgttttcattcttatatttgtttgttttaatttttcacttttgaatggagttcaaggtttgattggtggttgaatggagaaggggagggagaggttgtgggttcgaatccctctcactaacaaaaactaatatttgcctataaaaaaatcacttttgtattttggtgcttttacttcaatgcatgttaacttatagttatatatgagaatatatagtttcctcataaaattacacagattgttttgtttactctttccatcattttttagtttactcgatcattcctattttaattatcatctgaggatattattgaacatgatgcagcatggcgcggtgtataaac

SEQ ID NO: 7650 - DNA, 1080 bp, Glycine max; identical to SEQ ID NO: 7649
  Gm_smallRNAprecursor_483

SEQ ID NO: 7651 - DNA, 1101 bp, Glycine max
  Gm_smallRNAprecursor_484
taaaagacagtttgagggtttattcataaaagtattacaaaattagtttatttatacaaaaacaaaaccaactgcttaatcgtgatagaaactagtaagtgtagttatatttgaaaattttaactgttccaacaagtaaataaattcctaatgttttgttttattcaaatctcgatacacaagagcttttctgtttaatgttaattttatgttcagagctttgaaggagcatgccatttgttaatctatgtttaagctatgtttgtgttgaatgtagatgccaatcaattaataccgataagaggaaatcaaacagaaatctgctggacaacgcaagtaacctccttacggacttgttaagtggtggaagtatagggtctatgcccatagctgaaggtgcagtctcacatctgtttggccgacctctctttttctcactatatgattggttcttggaggtacttacatttttctcaatcatgaactatgaagcaccgacaccgacacggacaccggacacgacacggatacggacacgtggacacctgtaatgtccaaaatataaaacgtaatacgggtgtcgtgtcggtgtcggacactgacacggacgcgtgtcggacaccggatacggcaaagggctgaagtgtccgtgcttcatagatcatgaacttgttgtgtcccactttacataagttttatatatgattttttttccactttcacttatcctttttgttttcattcttatatttgtttgttttaatttttcacttttgaatggagttcaaggtttgattggtggttgaatggagaaggggagggagaggttgtgggttcgaatccctctcactaacaaaaactaatatttgcctataaaaaaatcacttttgtattttggtgcttttacttcaatgcatgttaacttatagttatatatgagaatatatagtttcctcataaaattacacagattgttttgtttactctttccatcattttttagtttactcgatcattcctattttaattatcatctgaggatattattgaacatgatgcagcatggcgcggtgtataaacttgcctttggaccaaaagcat

SEQ ID NO: 7652 - DNA, 1101 bp, Glycine max; identical to SEQ ID NO: 7651
  Gm_smallRNAprecursor_485

SEQ ID NO: 7653 - DNA, 1112 bp, Glycine max
  Gm_smallRNAprecursor_486
taaaagacagtttgagggtttattcataaaagtattacaaaattagtttatttatacaaaaacaaaaccaactgcttaatcgtgatagaaactagtaagtgtagttatatttgaaaattttaactgttccaacaagtaaataaattcctaatgttttgttttattcaaatctcgatacacaagagcttttctgtttaatgttaattttatgttcagagctttgaaggagcatgccatttgttaatctatgtttaagctatgtttgtgttgaatgtagatgccaatcaattaataccgataagaggaaatcaaacagaaatctgctggacaacgcaagtaacctccttacggacttgttaagtggtggaagtatagggtctatgcccatagctgaaggtgcagtctcacatctgtttggccgacctctctttttctcactatatgattggttcttggaggtacttacatttttctcaatcatgaactatgaagcaccgacaccgacacggacaccggacacgacacggatacggacacgtggacacctgtaatgtccaaaatataaaacgtaatacgggtgtcgtgtcggtgtcggacactgacacggacgcgtgtcggacaccggatacggcaaagggctgaagtgtccgtgcttcatagatcatgaacttgttgtgtcccactttacataagttttatatatgattttttttccactttcacttatcctttttgttttcattcttatatttgtttgttttaatttttcacttttgaatggagttcaaggtttgattggtggttgaatggagaaggggagggagaggttgtgggttcgaatccctctcactaacaaaaactaatatttgcctataaaaaaatcacttttgtattttggtgcttttacttcaatgcatgttaacttatagttatatatgagaatatatagtttcctcataaaattacacagattgttttgtttactctttccatcattttttagtttactcgatcattcctattttaattatcatctgaggatattattgaacatgatgcagcatggcgcggtgtataaacttgcctttggaccaaaagcatttgtcgttgta

SEQ ID NO: 7654 - DNA, 1112 bp, Glycine max; identical to SEQ ID NO: 7653
  Gm_smallRNAprecursor_487

SEQ ID NO: 7655 - DNA, 1113 bp, Glycine max
  Gm_smallRNAprecursor_488
taaaagacagtttgagggtttattcataaaagtattacaaaattagtttatttatacaaaaacaaaaccaactgcttaatcgtgatagaaactagtaagtgtagttatatttgaaaattttaactgttccaacaagtaaataaattcctaatgttttgttttattcaaatctcgatacacaagagcttttctgtttaatgttaattttatgttcagagctttgaaggagcatgccatttgttaatctatgtttaagctatgtttgtgttgaatgtagatgccaatcaattaataccgataagaggaaatcaaacagaaatctgctggacaacgcaagtaacctccttacggacttgttaagtggtggaagtatagggtctatgcccatagctgaaggtgcagtctcacatctgtttggccgacctctctttttctcactatatgattggttcttggaggtacttacatttttctcaatcatgaactatgaagcaccgacaccgacacggacaccggacacgacacggatacggacacgtggacacctgtaatgtccaaaatataaaacgtaatacgggtgtcgtgtcggtgtcggacactgacacggacgcgtgtcggacaccggatacggcaaagggctgaagtgtccgtgcttcatagatcatgaacttgttgtgtcccactttacataagttttatatatgattttttttccactttcacttatcctttttgttttcattcttatatttgtttgttttaatttttcacttttgaatggagttcaaggtttgattggtggttgaatggagaaggggagggagaggttgtgggttcgaatccctctcactaacaaaaactaatatttgcctataaaaaaatcacttttgtattttggtgcttttacttcaatgcatgttaacttatagttatatatgagaatatatagtttcctcataaaattacacagattgttttgtttactctttccatcattttttagtttactcgatcattcctattttaattatcatctgaggatattattgaacatgatgcagcatggcgcggtgtataaacttgcctttggaccaaaagcatttgtcgttgtat

SEQ ID NO: 7656 - DNA, 1113 bp, Glycine max; identical to SEQ ID NO: 7655
  Gm_smallRNAprecursor_489

SEQ ID NO: 7657 - DNA, 1113 bp, Glycine max; identical to SEQ ID NO: 7655
  Gm_smallRNAprecursor_490

SEQ ID NO: 7658 - DNA, 1113 bp, Glycine max; identical to SEQ ID NO: 7655
  Gm_smallRNAprecursor_491

SEQ ID NO: 7659 - DNA, 1076 bp, Glycine max
  Gm_smallRNAprecursor_492
aaaagacagtttgagggtttattcataaaagtattacaaaattagtttatttatacaaaaacaaaaccaactgcttaatcgtgatagaaactagtaagtgtagttatatttgaaaattttaactgttccaacaagtaaataaattcctaatgttttgttttattcaaatctcgatacacaagagcttttctgtttaatgttaattttatgttcagagctttgaaggagcatgccatttgttaatctatgtttaagctatgtttgtgttgaatgtagatgccaatcaattaataccgataagaggaaatcaaacagaaatctgctggacaacgcaagtaacctccttacggacttgttaagtggtggaagtatagggtctatgcccatagctgaaggtgcagtctcacatctgtttggccgacctctctttttctcactatatgattggttcttggaggtacttacatttttctcaatcatgaactatgaagcaccgacaccgacacggacaccggacacgacacggatacggacacgtggacacctgtaatgtccaaaatataaaacgtaatacgggtgtcgtgtcggtgtcggacactgacacggacgcgtgtcggacaccggatacggcaaagggctgaagtgtccgtgcttcatagatcatgaacttgttgtgtcccactttacataagttttatatatgattttttttccactttcacttatcctttttgttttcattcttatatttgtttgttttaatttttcacttttgaatggagttcaaggtttgattggtggttgaatggagaaggggagggagaggttgtgggttcgaatccctctcactaacaaaaactaatatttgcctataaaaaaatcacttttgtattttggtgcttttacttcaatgcatgttaacttatagttatatatgagaatatatagtttcctcataaaattacacagattgttttgtttactctttccatcattttttagtttactcgatcattcctattttaattatcatctgaggatattattgaacatgatgcagcatggcgcggtgtata

SEQ ID NO: 7660 - DNA, 1076 bp, Glycine max; identical to SEQ ID NO: 7659
  Gm_smallRNAprecursor_493

SEQ ID NO: 7661 - DNA, 1076 bp, Glycine max; identical to SEQ ID NO: 7659
  Gm_smallRNAprecursor_494

SEQ ID NO: 7662 - DNA, 1076 bp, Glycine max; identical to SEQ ID NO: 7659
  Gm_smallRNAprecursor_495

SEQ ID NO: 7663 - DNA, 1077 bp, Glycine max
  Gm_smallRNAprecursor_496
aaaagacagtttgagggtttattcataaaagtattacaaaattagtttatttatacaaaaacaaaaccaactgcttaatcgtgatagaaactagtaagtgtagttatatttgaaaattttaactgttccaacaagtaaataaattcctaatgttttgttttattcaaatctcgatacacaagagcttttctgtttaatgttaattttatgttcagagctttgaaggagcatgccatttgttaatctatgtttaagctatgtttgtgttgaatgtagatgccaatcaattaataccgataagaggaaatcaaacagaaatctgctggacaacgcaagtaacctccttacggacttgttaagtggtggaagtatagggtctatgcccatagctgaaggtgcagtctcacatctgtttggccgacctctctttttctcactatatgattggttcttggaggtacttacatttttctcaatcatgaactatgaagcaccgacaccgacacggacaccggacacgacacggatacggacacgtggacacctgtaatgtccaaaatataaaacgtaatacgggtgtcgtgtcggtgtcggacactgacacggacgcgtgtcggacaccggatacggcaaagggctgaagtgtccgtgcttcatagatcatgaacttgttgtgtcccactttacataagttttatatatgattttttttccactttcacttatcctttttgttttcattcttatatttgtttgttttaatttttcacttttgaatggagttcaaggtttgattggtggttgaatggagaaggggagggagaggttgtgggttcgaatccctctcactaacaaaaactaatatttgcctataaaaaaatcacttttgtattttggtgcttttacttcaatgcatgttaacttatagttatatatgagaatatatagtttcctcataaaattacacagattgttttgtttactctttccatcattttttagtttactcgatcattcctattttaattatcatctgaggatattattgaacatgatgcagcatggcgcggtgtataa

SEQ ID NO: 7664 - DNA, 1077 bp, Glycine max; identical to SEQ ID NO: 7663
  Gm_smallRNAprecursor_497

SEQ ID NO: 7665 - DNA, 1078 bp, Glycine max
  Gm_smallRNAprecursor_498
aaaagacagtttgagggtttattcataaaagtattacaaaattagtttatttatacaaaaacaaaaccaactgcttaatcgtgatagaaactagtaagtgtagttatatttgaaaattttaactgttccaacaagtaaataaattcctaatgttttgttttattcaaatctcgatacacaagagcttttctgtttaatgttaattttatgttcagagctttgaaggagcatgccatttgttaatctatgtttaagctatgtttgtgttgaatgtagatgccaatcaattaataccgataagaggaaatcaaacagaaatctgctggacaacgcaagtaacctccttacggacttgttaagtggtggaagtatagggtctatgcccatagctgaaggtgcagtctcacatctgtttggccgacctctctttttctcactatatgattggttcttggaggtacttacatttttctcaatcatgaactatgaagcaccgacaccgacacggacaccggacacgacacggatacggacacgtggacacctgtaatgtccaaaatataaaacgtaatacgggtgtcgtgtcggtgtcggacactgacacggacgcgtgtcggacaccggatacggcaaagggctgaagtgtccgtgcttcatagatcatgaacttgttgtgtcccactttacataagttttatatatgattttttttccactttcacttatcctttttgttttcattcttatatttgtttgttttaatttttcacttttgaatggagttcaaggtttgattggtggttgaatggagaaggggagggagaggttgtgggttcgaatccctctcactaacaaaaactaatatttgcctataaaaaaatcacttttgtattttggtgcttttacttcaatgcatgttaacttatagttatatatgagaatatatagtttcctcataaaattacacagattgttttgtttactctttccatcattttttagtttactcgatcattcctattttaattatcatctgaggatattattgaacatgatgcagcatggcgcggtgtataaa

SEQ ID NO: 7666 - DNA, 1110 bp, Glycine max
  Gm_smallRNAprecursor_499
aaaagacagtttgagggtttattcataaaagtattacaaaattagtttatttatacaaaaacaaaaccaactgcttaatcgtgatagaaactagtaagtgtagttatatttgaaaattttaactgttccaacaagtaaataaattcctaatgttttgttttattcaaatctcgatacacaagagcttttctgtttaatgttaattttatgttcagagctttgaaggagcatgccatttgttaatctatgtttaagctatgtttgtgttgaatgtagatgccaatcaattaataccgataagaggaaatcaaacagaaatctgctggacaacgcaagtaacctccttacggacttgttaagtggtggaagtatagggtctatgcccatagctgaaggtgcagtctcacatctgtttggccgacctctctttttctcactatatgattggttcttggaggtacttacatttttctcaatcatgaactatgaagcaccgacaccgacacggacaccggacacgacacggatacggacacgtggacacctgtaatgtccaaaatataaaacgtaatacgggtgtcgtgtcggtgtcggacactgacacggacgcgtgtcggacaccggatacggcaaagggctgaagtgtccgtgcttcatagatcatgaacttgttgtgtcccactttacataagttttatatatgattttttttccactttcacttatcctttttgttttcattcttatatttgtttgttttaatttttcacttttgaatggagttcaaggtttgattggtggttgaatggagaaggggagggagaggttgtgggttcgaatccctctcactaacaaaaactaatatttgcctataaaaaaatcacttttgtattttggtgcttttacttcaatgcatgttaacttatagttatatatgagaatatatagtttcctcataaaattacacagattgttttgtttactctttccatcattttttagtttactcgatcattcctattttaattatcatctgaggatattattgaacatgatgcagcatggcgcggtgtataaacttgcctttggaccaaaagcatttgtcgttgt

SEQ ID NO: 7667 - DNA, 1110 bp, Glycine max; identical to SEQ ID NO: 7666
  Gm_smallRNAprecursor_500

SEQ ID NO: 7668 - DNA, 1111 bp, Glycine max
  Gm_smallRNAprecursor_501
aaaagacagtttgagggtttattcataaaagtattacaaaattagtttatttatacaaaaacaaaaccaactgcttaatcgtgatagaaactagtaagtgtagttatatttgaaaattttaactgttccaacaagtaaataaattcctaatgttttgttttattcaaatctcgatacacaagagcttttctgtttaatgttaattttatgttcagagctttgaaggagcatgccatttgttaatctatgtttaagctatgtttgtgttgaatgtagatgccaatcaattaataccgataagaggaaatcaaacagaaatctgctggacaacgcaagtaacctccttacggacttgttaagtggtggaagtatagggtctatgcccatagctgaaggtgcagtctcacatctgtttggccgacctctctttttctcactatatgattggttcttggaggtacttacatttttctcaatcatgaactatgaagcaccgacaccgacacggacaccggacacgacacggatacggacacgtggacacctgtaatgtccaaaatataaaacgtaatacgggtgtcgtgtcggtgtcggacactgacacggacgcgtgtcggacaccggatacggcaaagggctgaagtgtccgtgcttcatagatcatgaacttgttgtgtcccactttacataagttttatatatgattttttttccactttcacttatcctttttgttttcattcttatatttgtttgttttaatttttcacttttgaatggagttcaaggtttgattggtggttgaatggagaaggggagggagaggttgtgggttcgaatccctctcactaacaaaaactaatatttgcctataaaaaaatcacttttgtattttggtgcttttacttcaatgcatgttaacttatagttatatatgagaatatatagtttcctcataaaattacacagattgttttgtttactctttccatcattttttagtttactcgatcattcctattttaattatcatctgaggatattattgaacatgatgcagcatggcgcggtgtataaacttgcctttggaccaaaagcatttgtcgttgta

SEQ ID NO: 7669 - DNA, 1111 bp, Glycine max; identical to SEQ ID NO: 7668
  Gm_smallRNAprecursor_502

SEQ ID NO: 7670 - DNA, 1111 bp, Glycine max; identical to SEQ ID NO: 7668
  Gm_smallRNAprecursor_503

SEQ ID NO: 7671 - DNA, 1111 bp, Glycine max; identical to SEQ ID NO: 7668
  Gm_smallRNAprecursor_504

SEQ ID NO: 7672 - DNA, 1112 bp, Glycine max
  Gm_smallRNAprecursor_505
aaaagacagtttgagggtttattcataaaagtattacaaaattagtttatttatacaaaaacaaaaccaactgcttaatcgtgatagaaactagtaagtgtagttatatttgaaaattttaactgttccaacaagtaaataaattcctaatgttttgttttattcaaatctcgatacacaagagcttttctgtttaatgttaattttatgttcagagctttgaaggagcatgccatttgttaatctatgtttaagctatgtttgtgttgaatgtagatgccaatcaattaataccgataagaggaaatcaaacagaaatctgctggacaacgcaagtaacctccttacggacttgttaagtggtggaagtatagggtctatgcccatagctgaaggtgcagtctcacatctgtttggccgacctctctttttctcactatatgattggttcttggaggtacttacatttttctcaatcatgaactatgaagcaccgacaccgacacggacaccggacacgacacggatacggacacgtggacacctgtaatgtccaaaatataaaacgtaatacgggtgtcgtgtcggtgtcggacactgacacggacgcgtgtcggacaccggatacggcaaagggctgaagtgtccgtgcttcatagatcatgaacttgttgtgtcccactttacataagttttatatatgattttttttccactttcacttatcctttttgttttcattcttatatttgtttgttttaatttttcacttttgaatggagttcaaggtttgattggtggttgaatggagaaggggagggagaggttgtgggttcgaatccctctcactaacaaaaactaatatttgcctataaaaaaatcacttttgtattttggtgcttttacttcaatgcatgttaacttatagttatatatgagaatatatagtttcctcataaaattacacagattgttttgtttactctttccatcattttttagtttactcgatcattcctattttaattatcatctgaggatattattgaacatgatgcagcatggcgcggtgtataaacttgcctttggaccaaaagcatttgtcgttgtat

SEQ ID NO: 7673 - DNA, 1112 bp, Glycine max; identical to SEQ ID NO: 7672
  Gm_smallRNAprecursor_506

SEQ ID NO: 7674 - DNA, 1112 bp, Glycine max; identical to SEQ ID NO: 7672
  Gm_smallRNAprecursor_507

SEQ ID NO: 7675 - DNA, 1112 bp, Glycine max; identical to SEQ ID NO: 7672
  Gm_smallRNAprecursor_508

SEQ ID NO: 7676 - DNA, 1062 bp, Glycine max
  Gm_smallRNAprecursor_509
tttgagggtttattcataaaagtattacaaaattagtttatttatacaaaaacaaaaccaactgcttaatcgtgatagaaactagtaagtgtagttatatttgaaaattttaactgttccaacaagtaaataaattcctaatgttttgttttattcaaatctcgatacacaagagcttttctgtttaatgttaattttatgttcagagctttgaaggagcatgccatttgttaatctatgtttaagctatgtttgtgttgaatgtagatgccaatcaattaataccgataagaggaaatcaaacagaaatctgctggacaacgcaagtaacctccttacggacttgttaagtggtggaagtatagggtctatgcccatagctgaaggtgcagtctcacatctgtttggccgacctctctttttctcactatatgattggttcttggaggtacttacatttttctcaatcatgaactatgaagcaccgacaccgacacggacaccggacacgacacggatacggacacgtggacacctgtaatgtccaaaatataaaacgtaatacgggtgtcgtgtcggtgtcggacactgacacggacgcgtgtcggacaccggatacggcaaagggctgaagtgtccgtgcttcatagatcatgaacttgttgtgtcccactttacataagttttatatatgattttttttccactttcacttatcctttttgttttcattcttatatttgtttgttttaatttttcacttttgaatggagttcaaggtttgattggtggttgaatggagaaggggagggagaggttgtgggttcgaatccctctcactaacaaaaactaatatttgcctataaaaaaatcacttttgtattttggtgcttttacttcaatgcatgttaacttatagttatatatgagaatatatagtttcctcataaaattacacagattgttttgtttactctttccatcattttttagtttactcgatcattcctattttaattatcatctgaggatattattgaacatgatgcagcatggcgcggt

SEQ ID NO: 7677 - DNA, 1059 bp, Glycine max
  Gm_smallRNAprecursor_510
gagggtttattcataaaagtattacaaaattagtttatttatacaaaaacaaaaccaactgcttaatcgtgatagaaactagtaagtgtagttatatttgaaaattttaactgttccaacaagtaaataaattcctaatgttttgttttattcaaatctcgatacacaagagcttttctgtttaatgttaattttatgttcagagctttgaaggagcatgccatttgttaatctatgtttaagctatgtttgtgttgaatgtagatgccaatcaattaataccgataagaggaaatcaaacagaaatctgctggacaacgcaagtaacctccttacggacttgttaagtggtggaagtatagggtctatgcccatagctgaaggtgcagtctcacatctgtttggccgacctctctttttctcactatatgattggttcttggaggtacttacatttttctcaatcatgaactatgaagcaccgacaccgacacggacaccggacacgacacggatacggacacgtggacacctgtaatgtccaaaatataaaacgtaatacgggtgtcgtgtcggtgtcggacactgacacggacgcgtgtcggacaccggatacggcaaagggctgaagtgtccgtgcttcatagatcatgaacttgttgtgtcccactttacataagttttatatatgattttttttccactttcacttatcctttttgttttcattcttatatttgtttgttttaatttttcacttttgaatggagttcaaggtttgattggtggttgaatggagaaggggagggagaggttgtgggttcgaatccctctcactaacaaaaactaatatttgcctataaaaaaatcacttttgtattttggtgcttttacttcaatgcatgttaacttatagttatatatgagaatatatagtttcctcataaaattacacagattgttttgtttactctttccatcattttttagtttactcgatcattcctattttaattatcatctgaggatattattgaacatgatgcagcatggcgcggt

SEQ ID NO: 7678 - DNA, 1064 bp, Glycine max
  Gm_smallRNAprecursor_511
gagggtttattcataaaagtattacaaaattagtttatttatacaaaaacaaaaccaactgcttaatcgtgatagaaactagtaagtgtagttatatttgaaaattttaactgttccaacaagtaaataaattcctaatgttttgttttattcaaatctcgatacacaagagcttttctgtttaatgttaattttatgttcagagctttgaaggagcatgccatttgttaatctatgtttaagctatgtttgtgttgaatgtagatgccaatcaattaataccgataagaggaaatcaaacagaaatctgctggacaacgcaagtaacctccttacggacttgttaagtggtggaagtatagggtctatgcccatagctgaaggtgcagtctcacatctgtttggccgacctctctttttctcactatatgattggttcttggaggtacttacatttttctcaatcatgaactatgaagcaccgacaccgacacggacaccggacacgacacggatacggacacgtggacacctgtaatgtccaaaatataaaacgtaatacgggtgtcgtgtcggtgtcggacactgacacggacgcgtgtcggacaccggatacggcaaagggctgaagtgtccgtgcttcatagatcatgaacttgttgtgtcccactttacataagttttatatatgattttttttccactttcacttatcctttttgttttcattcttatatttgtttgttttaatttttcacttttgaatggagttcaaggtttgattggtggttgaatggagaaggggagggagaggttgtgggttcgaatccctctcactaacaaaaactaatatttgcctataaaaaaatcacttttgtattttggtgcttttacttcaatgcatgttaacttatagttatatatgagaatatatagtttcctcataaaattacacagattgttttgtttactctttccatcattttttagtttactcgatcattcctattttaattatcatctgaggatattattgaacatgatgcagcatggcgcggtgtata

SEQ ID NO: 7679 - DNA, 1065 bp, Glycine max
  Gm_smallRNAprecursor_512
gagggtttattcataaaagtattacaaaattagtttatttatacaaaaacaaaaccaactgcttaatcgtgatagaaactagtaagtgtagttatatttgaaaattttaactgttccaacaagtaaataaattcctaatgttttgttttattcaaatctcgatacacaagagcttttctgtttaatgttaattttatgttcagagctttgaaggagcatgccatttgttaatctatgtttaagctatgtttgtgttgaatgtagatgccaatcaattaataccgataagaggaaatcaaacagaaatctgctggacaacgcaagtaacctccttacggacttgttaagtggtggaagtatagggtctatgcccatagctgaaggtgcagtctcacatctgtttggccgacctctctttttctcactatatgattggttcttggaggtacttacatttttctcaatcatgaactatgaagcaccgacaccgacacggacaccggacacgacacggatacggacacgtggacacctgtaatgtccaaaatataaaacgtaatacgggtgtcgtgtcggtgtcggacactgacacggacgcgtgtcggacaccggatacggcaaagggctgaagtgtccgtgcttcatagatcatgaacttgttgtgtcccactttacataagttttatatatgattttttttccactttcacttatcctttttgttttcattcttatatttgtttgttttaatttttcacttttgaatggagttcaaggtttgattggtggttgaatggagaaggggagggagaggttgtgggttcgaatccctctcactaacaaaaactaatatttgcctataaaaaaatcacttttgtattttggtgcttttacttcaatgcatgttaacttatagttatatatgagaatatatagtttcctcataaaattacacagattgttttgtttactctttccatcattttttagtttactcgatcattcctattttaattatcatctgaggatattattgaacatgatgcagcatggcgcggtgtataa

SEQ ID NO: 7680 - DNA, 1066 bp, Glycine max
  Gm_smallRNAprecursor_513
gagggtttattcataaaagtattacaaaattagtttatttatacaaaaacaaaaccaactgcttaatcgtgatagaaactagtaagtgtagttatatttgaaaattttaactgttccaacaagtaaataaattcctaatgttttgttttattcaaatctcgatacacaagagcttttctgtttaatgttaattttatgttcagagctttgaaggagcatgccatttgttaatctatgtttaagctatgtttgtgttgaatgtagatgccaatcaattaataccgataagaggaaatcaaacagaaatctgctggacaacgcaagtaacctccttacggacttgttaagtggtggaagtatagggtctatgcccatagctgaaggtgcagtctcacatctgtttggccgacctctctttttctcactatatgattggttcttggaggtacttacatttttctcaatcatgaactatgaagcaccgacaccgacacggacaccggacacgacacggatacggacacgtggacacctgtaatgtccaaaatataaaacgtaatacgggtgtcgtgtcggtgtcggacactgacacggacgcgtgtcggacaccggatacggcaaagggctgaagtgtccgtgcttcatagatcatgaacttgttgtgtcccactttacataagttttatatatgattttttttccactttcacttatcctttttgttttcattcttatatttgtttgttttaatttttcacttttgaatggagttcaaggtttgattggtggttgaatggagaaggggagggagaggttgtgggttcgaatccctctcactaacaaaaactaatatttgcctataaaaaaatcacttttgtattttggtgcttttacttcaatgcatgttaacttatagttatatatgagaatatatagtttcctcataaaattacacagattgttttgtttactctttccatcattttttagtttactcgatcattcctattttaattatcatctgaggatattattgaacatgatgcagcatggcgcggtgtataaa

SEQ ID NO: 7681 - DNA, 1093 bp, Glycine max
  Gm_smallRNAprecursor_514
gagggtttattcataaaagtattacaaaattagtttatttatacaaaaacaaaaccaactgcttaatcgtgatagaaactagtaagtgtagttatatttgaaaattttaactgttccaacaagtaaataaattcctaatgttttgttttattcaaatctcgatacacaagagcttttctgtttaatgttaattttatgttcagagctttgaaggagcatgccatttgttaatctatgtttaagctatgtttgtgttgaatgtagatgccaatcaattaataccgataagaggaaatcaaacagaaatctgctggacaacgcaagtaacctccttacggacttgttaagtggtggaagtatagggtctatgcccatagctgaaggtgcagtctcacatctgtttggccgacctctctttttctcactatatgattggttcttggaggtacttacatttttctcaatcatgaactatgaagcaccgacaccgacacggacaccggacacgacacggatacggacacgtggacacctgtaatgtccaaaatataaaacgtaatacgggtgtcgtgtcggtgtcggacactgacacggacgcgtgtcggacaccggatacggcaaagggctgaagtgtccgtgcttcatagatcatgaacttgttgtgtcccactttacataagttttatatatgattttttttccactttcacttatcctttttgttttcattcttatatttgtttgttttaatttttcacttttgaatggagttcaaggtttgattggtggttgaatggagaaggggagggagaggttgtgggttcgaatccctctcactaacaaaaactaatatttgcctataaaaaaatcacttttgtattttggtgcttttacttcaatgcatgttaacttatagttatatatgagaatatatagtttcctcataaaattacacagattgttttgtttactctttccatcattttttagtttactcgatcattcctattttaattatcatctgaggatattattgaacatgatgcagcatggcgcggtgtataaacttgcctttggaccaaaagcatttgtc

SEQ ID NO: 7682 - DNA, 1094 bp, Glycine max
  Gm_smallRNAprecursor_515
gagggtttattcataaaagtattacaaaattagtttatttatacaaaaacaaaaccaactgcttaatcgtgatagaaactagtaagtgtagttatatttgaaaattttaactgttccaacaagtaaataaattcctaatgttttgttttattcaaatctcgatacacaagagcttttctgtttaatgttaattttatgttcagagctttgaaggagcatgccatttgttaatctatgtttaagctatgtttgtgttgaatgtagatgccaatcaattaataccgataagaggaaatcaaacagaaatctgctggacaacgcaagtaacctccttacggacttgttaagtggtggaagtatagggtctatgcccatagctgaaggtgcagtctcacatctgtttggccgacctctctttttctcactatatgattggttcttggaggtacttacatttttctcaatcatgaactatgaagcaccgacaccgacacggacaccggacacgacacggatacggacacgtggacacctgtaatgtccaaaatataaaacgtaatacgggtgtcgtgtcggtgtcggacactgacacggacgcgtgtcggacaccggatacggcaaagggctgaagtgtccgtgcttcatagatcatgaacttgttgtgtcccactttacataagttttatatatgattttttttccactttcacttatcctttttgttttcattcttatatttgtttgttttaatttttcacttttgaatggagttcaaggtttgattggtggttgaatggagaaggggagggagaggttgtgggttcgaatccctctcactaacaaaaactaatatttgcctataaaaaaatcacttttgtattttggtgcttttacttcaatgcatgttaacttatagttatatatgagaatatatagtttcctcataaaattacacagattgttttgtttactctttccatcattttttagtttactcgatcattcctattttaattatcatctgaggatattattgaacatgatgcagcatggcgcggtgtataaacttgcctttggaccaaaagcatttgtcg

SEQ ID NO: 7683 - DNA, 1053 bp, Glycine max
  Gm_smallRNAprecursor_516
cataaaagtattacaaaattagtttatttatacaaaaacaaaaccaactgcttaatcgtgatagaaactagtaagtgtagttatatttgaaaattttaactgttccaacaagtaaataaattcctaatgttttgttttattcaaatctcgatacacaagagcttttctgtttaatgttaattttatgttcagagctttgaaggagcatgccatttgttaatctatgtttaagctatgtttgtgttgaatgtagatgccaatcaattaataccgataagaggaaatcaaacagaaatctgctggacaacgcaagtaacctccttacggacttgttaagtggtggaagtatagggtctatgcccatagctgaaggtgcagtctcacatctgtttggccgacctctctttttctcactatatgattggttcttggaggtacttacatttttctcaatcatgaactatgaagcaccgacaccgacacggacaccggacacgacacggatacggacacgtggacacctgtaatgtccaaaatataaaacgtaatacgggtgtcgtgtcggtgtcggacactgacacggacgcgtgtcggacaccggatacggcaaagggctgaagtgtccgtgcttcatagatcatgaacttgttgtgtcccactttacataagttttatatatgattttttttccactttcacttatcctttttgttttcattcttatatttgtttgttttaatttttcacttttgaatggagttcaaggtttgattggtggttgaatggagaaggggagggagaggttgtgggttcgaatccctctcactaacaaaaactaatatttgcctataaaaaaatcacttttgtattttggtgcttttacttcaatgcatgttaacttatagttatatatgagaatatatagtttcctcataaaattacacagattgttttgtttactctttccatcattttttagtttactcgatcattcctattttaattatcatctgaggatattattgaacatgatgcagcatggcgcggtgtata

SEQ ID NO: 7684 - DNA, 1054 bp, Glycine max
  Gm_smallRNAprecursor_517
cataaaagtattacaaaattagtttatttatacaaaaacaaaaccaactgcttaatcgtgatagaaactagtaagtgtagttatatttgaaaattttaactgttccaacaagtaaataaattcctaatgttttgttttattcaaatctcgatacacaagagcttttctgtttaatgttaattttatgttcagagctttgaaggagcatgccatttgttaatctatgtttaagctatgtttgtgttgaatgtagatgccaatcaattaataccgataagaggaaatcaaacagaaatctgctggacaacgcaagtaacctccttacggacttgttaagtggtggaagtatagggtctatgcccatagctgaaggtgcagtctcacatctgtttggccgacctctctttttctcactatatgattggttcttggaggtacttacatttttctcaatcatgaactatgaagcaccgacaccgacacggacaccggacacgacacggatacggacacgtggacacctgtaatgtccaaaatataaaacgtaatacgggtgtcgtgtcggtgtcggacactgacacggacgcgtgtcggacaccggatacggcaaagggctgaagtgtccgtgcttcatagatcatgaacttgttgtgtcccactttacataagttttatatatgattttttttccactttcacttatcctttttgttttcattcttatatttgtttgttttaatttttcacttttgaatggagttcaaggtttgattggtggttgaatggagaaggggagggagaggttgtgggttcgaatccctctcactaacaaaaactaatatttgcctataaaaaaatcacttttgtattttggtgcttttacttcaatgcatgttaacttatagttatatatgagaatatatagtttcctcataaaattacacagattgttttgtttactctttccatcattttttagtttactcgatcattcctattttaattatcatctgaggatattattgaacatgatgcagcatggcgcggtgtataa

SEQ ID NO: 7685 - DNA, 1055 bp, Glycine max
  Gm_smallRNAprecursor_518
cataaaagtattacaaaattagtttatttatacaaaaacaaaaccaactgcttaatcgtgatagaaactagtaagtgtagttatatttgaaaattttaactgttccaacaagtaaataaattcctaatgttttgttttattcaaatctcgatacacaagagcttttctgtttaatgttaattttatgttcagagctttgaaggagcatgccatttgttaatctatgtttaagctatgtttgtgttgaatgtagatgccaatcaattaataccgataagaggaaatcaaacagaaatctgctggacaacgcaagtaacctccttacggacttgttaagtggtggaagtatagggtctatgcccatagctgaaggtgcagtctcacatctgtttggccgacctctctttttctcactatatgattggttcttggaggtacttacatttttctcaatcatgaactatgaagcaccgacaccgacacggacaccggacacgacacggatacggacacgtggacacctgtaatgtccaaaatataaaacgtaatacgggtgtcgtgtcggtgtcggacactgacacggacgcgtgtcggacaccggatacggcaaagggctgaagtgtccgtgcttcatagatcatgaacttgttgtgtcccactttacataagttttatatatgattttttttccactttcacttatcctttttgttttcattcttatatttgtttgttttaatttttcacttttgaatggagttcaaggtttgattggtggttgaatggagaaggggagggagaggttgtgggttcgaatccctctcactaacaaaaactaatatttgcctataaaaaaatcacttttgtattttggtgcttttacttcaatgcatgttaacttatagttatatatgagaatatatagtttcctcataaaattacacagattgttttgtttactctttccatcattttttagtttactcgatcattcctattttaattatcatctgaggatattattgaacatgatgcagcatggcgcggtgtataaa

SEQ ID NO: 7686 - DNA, 1082 bp, Glycine max
  Gm_smallRNAprecursor_519
cataaaagtattacaaaattagtttatttatacaaaaacaaaaccaactgcttaatcgtgatagaaactagtaagtgtagttatatttgaaaattttaactgttccaacaagtaaataaattcctaatgttttgttttattcaaatctcgatacacaagagcttttctgtttaatgttaattttatgttcagagctttgaaggagcatgccatttgttaatctatgtttaagctatgtttgtgttgaatgtagatgccaatcaattaataccgataagaggaaatcaaacagaaatctgctggacaacgcaagtaacctccttacggacttgttaagtggtggaagtatagggtctatgcccatagctgaaggtgcagtctcacatctgtttggccgacctctctttttctcactatatgattggttcttggaggtacttacatttttctcaatcatgaactatgaagcaccgacaccgacacggacaccggacacgacacggatacggacacgtggacacctgtaatgtccaaaatataaaacgtaatacgggtgtcgtgtcggtgtcggacactgacacggacgcgtgtcggacaccggatacggcaaagggctgaagtgtccgtgcttcatagatcatgaacttgttgtgtcccactttacataagttttatatatgattttttttccactttcacttatcctttttgttttcattcttatatttgtttgttttaatttttcacttttgaatggagttcaaggtttgattggtggttgaatggagaaggggagggagaggttgtgggttcgaatccctctcactaacaaaaactaatatttgcctataaaaaaatcacttttgtattttggtgcttttacttcaatgcatgttaacttatagttatatatgagaatatatagtttcctcataaaattacacagattgttttgtttactctttccatcattttttagtttactcgatcattcctattttaattatcatctgaggatattattgaacatgatgcagcatggcgcggtgtataaacttgcctttggaccaaaagcatttgtc

SEQ ID NO: 7687 - DNA, 1087 bp, Glycine max
  Gm_smallRNAprecursor_520
cataaaagtattacaaaattagtttatttatacaaaaacaaaaccaactgcttaatcgtgatagaaactagtaagtgtagttatatttgaaaattttaactgttccaacaagtaaataaattcctaatgttttgttttattcaaatctcgatacacaagagcttttctgtttaatgttaattttatgttcagagctttgaaggagcatgccatttgttaatctatgtttaagctatgtttgtgttgaatgtagatgccaatcaattaataccgataagaggaaatcaaacagaaatctgctggacaacgcaagtaacctccttacggacttgttaagtggtggaagtatagggtctatgcccatagctgaaggtgcagtctcacatctgtttggccgacctctctttttctcactatatgattggttcttggaggtacttacatttttctcaatcatgaactatgaagcaccgacaccgacacggacaccggacacgacacggatacggacacgtggacacctgtaatgtccaaaatataaaacgtaatacgggtgtcgtgtcggtgtcggacactgacacggacgcgtgtcggacaccggatacggcaaagggctgaagtgtccgtgcttcatagatcatgaacttgttgtgtcccactttacataagttttatatatgattttttttccactttcacttatcctttttgttttcattcttatatttgtttgttttaatttttcacttttgaatggagttcaaggtttgattggtggttgaatggagaaggggagggagaggttgtgggttcgaatccctctcactaacaaaaactaatatttgcctataaaaaaatcacttttgtattttggtgcttttacttcaatgcatgttaacttatagttatatatgagaatatatagtttcctcataaaattacacagattgttttgtttactctttccatcattttttagtttactcgatcattcctattttaattatcatctgaggatattattgaacatgatgcagcatggcgcggtgtataaacttgcctttggaccaaaagcatttgtcgttgt

SEQ ID NO: 7688 - DNA, 1088 bp, Glycine max
  Gm_smallRNAprecursor_521
cataaaagtattacaaaattagtttatttatacaaaaacaaaaccaactgcttaatcgtgatagaaactagtaagtgtagttatatttgaaaattttaactgttccaacaagtaaataaattcctaatgttttgttttattcaaatctcgatacacaagagcttttctgtttaatgttaattttatgttcagagctttgaaggagcatgccatttgttaatctatgtttaagctatgtttgtgttgaatgtagatgccaatcaattaataccgataagaggaaatcaaacagaaatctgctggacaacgcaagtaacctccttacggacttgttaagtggtggaagtatagggtctatgcccatagctgaaggtgcagtctcacatctgtttggccgacctctctttttctcactatatgattggttcttggaggtacttacatttttctcaatcatgaactatgaagcaccgacaccgacacggacaccggacacgacacggatacggacacgtggacacctgtaatgtccaaaatataaaacgtaatacgggtgtcgtgtcggtgtcggacactgacacggacgcgtgtcggacaccggatacggcaaagggctgaagtgtccgtgcttcatagatcatgaacttgttgtgtcccactttacataagttttatatatgattttttttccactttcacttatcctttttgttttcattcttatatttgtttgttttaatttttcacttttgaatggagttcaaggtttgattggtggttgaatggagaaggggagggagaggttgtgggttcgaatccctctcactaacaaaaactaatatttgcctataaaaaaatcacttttgtattttggtgcttttacttcaatgcatgttaacttatagttatatatgagaatatatagtttcctcataaaattacacagattgttttgtttactctttccatcattttttagtttactcgatcattcctattttaattatcatctgaggatattattgaacatgatgcagcatggcgcggtgtataaacttgcctttggaccaaaagcatttgtcgttgta

SEQ ID NO: 7689 - DNA, 1088 bp, Glycine max; identical to SEQ ID NO: 7688
  Gm_smallRNAprecursor_522

SEQ ID NO: 7690 - DNA, 1089 bp, Glycine max
  Gm_smallRNAprecursor_523
cataaaagtattacaaaattagtttatttatacaaaaacaaaaccaactgcttaatcgtgatagaaactagtaagtgtagttatatttgaaaattttaactgttccaacaagtaaataaattcctaatgttttgttttattcaaatctcgatacacaagagcttttctgtttaatgttaattttatgttcagagctttgaaggagcatgccatttgttaatctatgtttaagctatgtttgtgttgaatgtagatgccaatcaattaataccgataagaggaaatcaaacagaaatctgctggacaacgcaagtaacctccttacggacttgttaagtggtggaagtatagggtctatgcccatagctgaaggtgcagtctcacatctgtttggccgacctctctttttctcactatatgattggttcttggaggtacttacatttttctcaatcatgaactatgaagcaccgacaccgacacggacaccggacacgacacggatacggacacgtggacacctgtaatgtccaaaatataaaacgtaatacgggtgtcgtgtcggtgtcggacactgacacggacgcgtgtcggacaccggatacggcaaagggctgaagtgtccgtgcttcatagatcatgaacttgttgtgtcccactttacataagttttatatatgattttttttccactttcacttatcctttttgttttcattcttatatttgtttgttttaatttttcacttttgaatggagttcaaggtttgattggtggttgaatggagaaggggagggagaggttgtgggttcgaatccctctcactaacaaaaactaatatttgcctataaaaaaatcacttttgtattttggtgcttttacttcaatgcatgttaacttatagttatatatgagaatatatagtttcctcataaaattacacagattgttttgtttactctttccatcattttttagtttactcgatcattcctattttaattatcatctgaggatattattgaacatgatgcagcatggcgcggtgtataaacttgcctttggaccaaaagcatttgtcgttgtat

SEQ ID NO: 7691 - DNA, 1089 bp, Glycine max; identical to SEQ ID NO: 7690
  Gm_smallRNAprecursor_524

SEQ ID NO: 7692 - DNA, 1034 bp, Glycine max
  Gm_smallRNAprecursor_525
tcgtgatagaaactagtaagtgtagttatatttgaaaattttaactgttccaacaagtaaataaattcctaatgttttgttttattcaaatctcgatacacaagagcttttctgtttaatgttaattttatgttcagagctttgaaggagcatgccatttgttaatctatgtttaagctatgtttgtgttgaatgtagatgccaatcaattaataccgataagaggaaatcaaacagaaatctgctggacaacgcaagtaacctccttacggacttgttaagtggtggaagtatagggtctatgcccatagctgaaggtgcagtctcacatctgtttggccgacctctctttttctcactatatgattggttcttggaggtacttacatttttctcaatcatgaactatgaagcaccgacaccgacacggacaccggacacgacacggatacggacacgtggacacctgtaatgtccaaaatataaaacgtaatacgggtgtcgtgtcggtgtcggacactgacacggacgcgtgtcggacaccggatacggcaaagggctgaagtgtccgtgcttcatagatcatgaacttgttgtgtcccactttacataagttttatatatgattttttttccactttcacttatcctttttgttttcattcttatatttgtttgttttaatttttcacttttgaatggagttcaaggtttgattggtggttgaatggagaaggggagggagaggttgtgggttcgaatccctctcactaacaaaaactaatatttgcctataaaaaaatcacttttgtattttggtgcttttacttcaatgcatgttaacttatagttatatatgagaatatatagtttcctcataaaattacacagattgttttgtttactctttccatcattttttagtttactcgatcattcctattttaattatcatctgaggatattattgaacatgatgcagcatggcgcggtgtataaacttgcctttggaccaaaagcatttgtcgttgtat

SEQ ID NO: 7693 - DNA, 1082 bp, Glycine max
  Gm_smallRNAprecursor_526
ttttaatgtttctttccttttcttcctctcaattgcatgtgaagatgcactacaatcccccatcatattattgaacaatgatttccttgcttattcgtatatccagtcactatatatcctttttctcgattatttgtatttattcgcaatgatatgtacttcattattgataattaatttaagtttattagacacaagttattattatattaagatttaattatttgagtaatatttaactttaacttgtgaaaataattttttattagattttacttattcttttaactaaattatggactagtcagaattattatttttttcctaagaaaaaaaatatcattgaaaccaaaccctactattacagactaacaactaattagcagttgacagaaacatgttaattcaagaaagaaggattgagttgcataccatcttagatcagttgacagaaacatgttaatatctatgaagcacggacactccagtgtcttgtcgtgtccggtgtccgacacgcgtccgtgtcagtgtccgacactgacacgacacacgtattacgttctatattttggacattacaagtgtccacgtgtccgtatccgttcgtgtccggtgtccgtgtcggtgttggtgcttcataggttaatatcaactattacagactaacaactaattagcaatacaacgattgagttgcataccatcttagatcaattgctatcattatacatatattagtttgccaatttttagcattggcgtgggagttaaattttttgcattattaatttaaacaaaaaattaattttagagtattgtatttgttgatttaaataaaaatctaacttttatttaagttttgatttaatagattaaattaactcatttaataaaaaagaattgaaattgattctaaagaaaagaaatacttgaagacacgattactaaaaagaaaaatcaaaatgaactattagatttactcattaaatcctagctgttgaatttttatggaaataattaagctaaaataattaaatgcggagagtcttattagaagtacgtcataaatcatgtttgggata

SEQ ID NO: 7694 - DNA, 1100 bp, Glycine max
  Gm_smallRNAprecursor_527
aatgtttctttccttttcttcctctcaattgcatgtgaagatgcactacaatcccccatcatattattgaacaatgatttccttgcttattcgtatatccagtcactatatatcctttttctcgattatttgtatttattcgcaatgatatgtacttcattattgataattaatttaagtttattagacacaagttattattatattaagatttaattatttgagtaatatttaactttaacttgtgaaaataattttttattagattttacttattcttttaactaaattatggactagtcagaattattatttttttcctaagaaaaaaaatatcattgaaaccaaaccctactattacagactaacaactaattagcagttgacagaaacatgttaattcaagaaagaaggattgagttgcataccatcttagatcagttgacagaaacatgttaatatctatgaagcacggacactccagtgtcttgtcgtgtccggtgtccgacacgcgtccgtgtcagtgtccgacactgacacgacacacgtattacgttctatattttggacattacaagtgtccacgtgtccgtatccgttcgtgtccggtgtccgtgtcggtgttggtgcttcataggttaatatcaactattacagactaacaactaattagcaatacaacgattgagttgcataccatcttagatcaattgctatcattatacatatattagtttgccaatttttagcattggcgtgggagttaaattttttgcattattaatttaaacaaaaaattaattttagagtattgtatttgttgatttaaataaaaatctaacttttatttaagttttgatttaatagattaaattaactcatttaataaaaaagaattgaaattgattctaaagaaaagaaatacttgaagacacgattactaaaaagaaaaatcaaaatgaactattagatttactcattaaatcctagctgttgaatttttatggaaataattaagctaaaataattaaatgcggagagtcttattagaagtacgtcataaatcatgtttgggatagattattttaaaaaataaacat

SEQ ID NO: 7695 - DNA, 1100 bp, Glycine max; identical to SEQ ID NO: 7694
  Gm_smallRNAprecursor_528

SEQ ID NO: 7696 - DNA, 1101 bp, Glycine max
  Gm_smallRNAprecursor_529
aatgtttctttccttttcttcctctcaattgcatgtgaagatgcactacaatcccccatcatattattgaacaatgatttccttgcttattcgtatatccagtcactatatatcctttttctcgattatttgtatttattcgcaatgatatgtacttcattattgataattaatttaagtttattagacacaagttattattatattaagatttaattatttgagtaatatttaactttaacttgtgaaaataattttttattagattttacttattcttttaactaaattatggactagtcagaattattatttttttcctaagaaaaaaaatatcattgaaaccaaaccctactattacagactaacaactaattagcagttgacagaaacatgttaattcaagaaagaaggattgagttgcataccatcttagatcagttgacagaaacatgttaatatctatgaagcacggacactccagtgtcttgtcgtgtccggtgtccgacacgcgtccgtgtcagtgtccgacactgacacgacacacgtattacgttctatattttggacattacaagtgtccacgtgtccgtatccgttcgtgtccggtgtccgtgtcggtgttggtgcttcataggttaatatcaactattacagactaacaactaattagcaatacaacgattgagttgcataccatcttagatcaattgctatcattatacatatattagtttgccaatttttagcattggcgtgggagttaaattttttgcattattaatttaaacaaaaaattaattttagagtattgtatttgttgatttaaataaaaatctaacttttatttaagttttgatttaatagattaaattaactcatttaataaaaaagaattgaaattgattctaaagaaaagaaatacttgaagacacgattactaaaaagaaaaatcaaaatgaactattagatttactcattaaatcctagctgttgaatttttatggaaataattaagctaaaataattaaatgcggagagtcttattagaagtacgtcataaatcatgtttgggatagattattttaaaaaataaacatt

SEQ ID NO: 7697 - DNA, 1102 bp, Glycine max
  Gm_smallRNAprecursor_530
aatgtttctttccttttcttcctctcaattgcatgtgaagatgcactacaatcccccatcatattattgaacaatgatttccttgcttattcgtatatccagtcactatatatcctttttctcgattatttgtatttattcgcaatgatatgtacttcattattgataattaatttaagtttattagacacaagttattattatattaagatttaattatttgagtaatatttaactttaacttgtgaaaataattttttattagattttacttattcttttaactaaattatggactagtcagaattattatttttttcctaagaaaaaaaatatcattgaaaccaaaccctactattacagactaacaactaattagcagttgacagaaacatgttaattcaagaaagaaggattgagttgcataccatcttagatcagttgacagaaacatgttaatatctatgaagcacggacactccagtgtcttgtcgtgtccggtgtccgacacgcgtccgtgtcagtgtccgacactgacacgacacacgtattacgttctatattttggacattacaagtgtccacgtgtccgtatccgttcgtgtccggtgtccgtgtcggtgttggtgcttcataggttaatatcaactattacagactaacaactaattagcaatacaacgattgagttgcataccatcttagatcaattgctatcattatacatatattagtttgccaatttttagcattggcgtgggagttaaattttttgcattattaatttaaacaaaaaattaattttagagtattgtatttgttgatttaaataaaaatctaacttttatttaagttttgatttaatagattaaattaactcatttaataaaaaagaattgaaattgattctaaagaaaagaaatacttgaagacacgattactaaaaagaaaaatcaaaatgaactattagatttactcattaaatcctagctgttgaatttttatggaaataattaagctaaaataattaaatgcggagagtcttattagaagtacgtcataaatcatgtttgggatagattattttaaaaaataaacattt

SEQ ID NO: 7698 - DNA, 1085 bp, Glycine max
  Gm_smallRNAprecursor_531
attgtgaaggaaatagaactgggcgatgtaatttgacccggaccaaggttttaatgattgcacaaaaaaatgatagttttaatgatatataattatatatcaacattattatgtgagattttttaatagtgcttgtaatatatttttttatataatttttaatgaatttcaattaataaaaaaagatgttctcgaaagactaattattcctctggtgcgtgaatgcgtgaattctgttgaccaaagtttttttacaagaatcacatataaacgcttgtactgtgtcgttttatatattattaaatatttcttaaaatttcaacattcaattgttaataagttttatttttctcctttcacaagtgccttaatttctaggcaaaattgtatttttattagttcttttagttattttcaatttttgattttagctctcctttaaaattattgacgcattttgtcctcttattttattcaatcacacaatcttatggtcacttgtcatgttctgattggatgtcgattctatggatgatgaaatgtattattgttgttattggtcaatcagaacatgacacgtgacaatcatcgtccaatcaaaatgtgacacgcgactgtcaacattcatttataacggaaaacgtctaaatctacttaagggtcaagattatgtgattggataaaaaagaaagataaaagatctaaataactttaaagaaaaatcaaaatcaagattaaagacaattaaggaaactaaatttataattttaccatttataatagtgagtcctcgctcttagggtaaggccaaagttgtgtcccttgccgtcccttccaaacccacatgcgactatgccgcagcatcattcccaactgatgtaacactggacccactactatgcatccctcacgtgaattgtgaaatatggaaatccattcaagaaaagaaaagataaaaaaaaagagcaaaataattaaaggagattgcaaaggtttcggcttctgaggaattacttacatatacaattctagccctagctataactattttgctaggagcaactcatgtggcagcctggcaggca

SEQ ID NO: 7699 - DNA, 1100 bp, Glycine max
  Gm_smallRNAprecursor_532
tttctattattttaatttcttttataaaagatacaagtataaaagaaattgtaaagattcaaacataaataaaaaaattatttgcgaataaataaataaaaccctttgccattccttgtggtatgctgtgtcttacaggatgtcttttcattgtcatgcattcttactcacttgtttgtaggggaacaatacagtttcctttcattttgtttcttcagcttattttctagtaagaaaagcctcctattcatcatcatcatcatcaggctttcacttcttgtttctgattttttcacttaaacaaaaaaaataaactcttaccacctagaagtaataattaatcacctattcaccaggcattttcacccaaccatatggtccatatccaaagtacaagcgaataatttaatatgacatgagaagaagacaaacaaacctttgcttttgaggttgtctttctacagtcctaggtatcatttgcaaacatgaaatagcactgagatattggcacggctcaatcaaacccaaaaccacaatcacaacatgtattttgttttaaatctttctagcaaggacacaaccgtgccgtggtatacatgtctgagtgaaccaggccaatatcacaataactacttcatatacttgtgtcttaacgaggctgctgtgtttgcagagaagagaagaagccaagaaggcacagggcaaagagaaaagagaggagatagtgttccattgaaggttgtgttgtgtgagcgttgagaatgtcttggctgggatttaagatttttcaagagggtctctgaacatagcatttaaaaccccgactaccaaagcataaagctgggacatagcatttaaatccatacttctccctccatcccactttttattttccccctttttttcactcataagttggtcacatatataataatgttgctgctttcctttaagaataataaagttatatatccttttcacaataacttcttgtcaatttttaacatttaatagtgttatatcaacttttatacttttcttcaatcacaatttatcatcagtatcaatcttaaaatggttatttttataaaaattaataa

SEQ ID NO: 7700 - DNA, 1165 bp, Glycine max
  Gm_smallRNAprecursor_533
ctttcagataaccctttgagtgttgctaggtgcatccagcattattgctggtgcacccagcattctaataaaatgacaaaattacccttgcttaattttcctcttccggatcaagttgatccgaaagtctcttccggatcaacttgatccataagagacttccggatcaacttgattcgtaacttccggatcaacttaatccggaaatctcttacggagcaagttgatccggaagaggaaaaataaaatttttgttaattatacaagatatttaaagatatttatttcattaattataatataattaaatatttttatttattttactaattataatatatttataaatattgatttatcataaataattaatgctaatcaatcataatcataattcatgctaatcaatcaatcatgctaatcaatcataattccctaaaagaggatataaataatttcagagttagcaattttcagaatcaatcaatcatgctaatcaatcaatcataatcataattcatgctaatcaatcaattatgttaatcaatcataattccctaaaagaggatataaataatttcagagttagcaatttcaaaaactacattatgattgctaactctgaaattatttatatcctcttttagagaattatgattgattagcatgaattatgattatgattgattagcattaattatttataataaatcaatatttataaatatattataattaataaaataaatatctttaaatatcttgtataattaacaaaatttttatttttcctcttccgaatcaagttgatccggaagtctcttccgaatcaacttgatctgtaagagacttccagattaagttgatccggttgatccgtaagagacttccgaatcaacttgatccagaagaggaaaatcaagtaagggcaatttcgtcatttttttagaatgctggatgcaccagcaataatgctgggtgcacctagcaacactctaaccctttacagccaaacattggatctaacaggtgacgaaatggcaaagatggcaaaatggaaggtcaccttttaatagatctatgatatcataggtcaaaatggaaggtcgctttgcctgtttatttcttaaaaaaggagaataacatgtatcttgttagggtaaat

SEQ ID NO: 7701 - DNA, 1142 bp, Glycine max
  Gm_smallRNAprecursor_534
ttggcccacaggaggctaatagatactcttataggaacaattacagaggaaagaatcctatgacgaggacccaatggcgtaggttccagcgtcagaagaaattggcccaacagaatctgcagacgggccagtataaagaagtatctaggaggccagtaaaagagagactcctgcctccagtggatgaagataagatggaggatgaggatctactggattctgaaccagactttgatgtcatttgtgtggtatctatcttgccatctgaatatgatgtccagtctgaagttactgagatcgaaagcgagttcgatcatttgatatggctgacccaaagccagtatgttactatgttatgaataatggctgtgtggaagagcaattagcttatttcgaaaagccagattttcagatgaaaagtcatctcaaacctcttttcatcagggcaaaggttgagaatattgggatcaacaaagtgctcatagatggaggagcggcggtcaacttaatgcctcgatctatgctctacaagatcgggaaacatgacactgatctatctgctcacaacattgtgctctctaattatgagggcaaaactggctattcattgggagccattcaagtagatgttgctgtaggcagtatagttcgaccaactctgttcctggtgatacagtctaaggctaattttaacttgctattaggaagggaatggattcatggagttggggctgtgccatctaccctccaccagaaactcattatttggagggaggatgggattgttgaaaatatagaggcagatcaaagcttctataagtcagaggttgataatgttactgcacaaacctttgacaaaaagttggctaacatagcaccttgtggtgacaaggaggctgttgtcgaatcaagtgacaatgttatccactctgtcaaactccatcctacctatgggtttatatgggagagggaggaaattgatattgttccctctgaggatggagtcattccaccaactgggtggaatatacatgaagattaatatgactgaggccactgcatgggccagaattacggcttatatggccgaaaataaactaaatacggcctttgaggctgaatctcaacaaaatatggcagtt

SEQ ID NO: 7702 - DNA, 1142 bp, Glycine max; identical to SEQ ID NO: 7701
  Gm_smallRNAprecursor_535

SEQ ID NO: 7703 - DNA, 1141 bp, Glycine max
  Gm_smallRNAprecursor_536
tggcccacaggaggctaatagatactcttataggaacaattacagaggaaagaatcctatgacgaggacccaatggcgtaggttccagcgtcagaagaaattggcccaacagaatctgcagacgggccagtataaagaagtatctaggaggccagtaaaagagagactcctgcctccagtggatgaagataagatggaggatgaggatctactggattctgaaccagactttgatgtcatttgtgtggtatctatcttgccatctgaatatgatgtccagtctgaagttactgagatcgaaagcgagttcgatcatttgatatggctgacccaaagccagtatgttactatgttatgaataatggctgtgtggaagagcaattagcttatttcgaaaagccagattttcagatgaaaagtcatctcaaacctcttttcatcagggcaaaggttgagaatattgggatcaacaaagtgctcatagatggaggagcggcggtcaacttaatgcctcgatctatgctctacaagatcgggaaacatgacactgatctatctgctcacaacattgtgctctctaattatgagggcaaaactggctattcattgggagccattcaagtagatgttgctgtaggcagtatagttcgaccaactctgttcctggtgatacagtctaaggctaattttaacttgctattaggaagggaatggattcatggagttggggctgtgccatctaccctccaccagaaactcattatttggagggaggatgggattgttgaaaatatagaggcagatcaaagcttctataagtcagaggttgataatgttactgcacaaacctttgacaaaaagttggctaacatagcaccttgtggtgacaaggaggctgttgtcgaatcaagtgacaatgttatccactctgtcaaactccatcctacctatgggtttatatgggagagggaggaaattgatattgttccctctgaggatggagtcattccaccaactgggtggaatatacatgaagattaatatgactgaggccactgcatgggccagaattacggcttatatggccgaaaataaactaaatacggcctttgaggctgaatctcaacaaaatatggcagtt

SEQ ID NO: 7704 - DNA, 1141 bp, Glycine max; identical to SEQ ID NO: 7703
  Gm_smallRNAprecursor_537

SEQ ID NO: 7705 - DNA, 1125 bp, Glycine max
  Gm_smallRNAprecursor_538
gccaatatcacctcaagtctaaaagaaaagctggtgcctcttcttagagaatttaaagactgttttgcttgggattaccacgaaatgcctgggttaagcagagaaatggtcgaaatgaaattacctattaaggaaggaaaaagaccagtaaaacaactaccaagaagattcgcaccagaaatcatgtccaaaattaaggaagagatcgaaaggctgctgaggtgtaaattcatcaggtctgccaggtatgtcgaatggttagcaaatatagtccctgtcattaaaaagaatggaactctaagagtatgcatagattttagggatttaaacaatgctacacctaaagatgaatatgctatgccagtagcagaaatgttggtagattcagcagctggtttcgaatttttaagcatgttagatggttattctggttataaccaaatatttattgctgaaaatgatgtgtcaaaaacagcatttcgatgccctggtgctttaggcacttatgaatgggtggttatgccctttgggttgaaaaatgctggggccacttatcaaagggccatgaattccatgtttcatgattttattgacacatttatgcaagtttatattgatgatataatcatcaaatcctcttcagaagatagccatttggattaccttaggcaatctttcgaacgaatgaggaaacatggattaaaaatgaatccattaaagtgtgctttttgtgtgcgtgcaggagatttccttggttttgtggtgcataaaaaaggcattgagataaatcaaaacaagacaaaggctattcttgagacgaagcctccttcgactaaaaaacagcttcagtctttgctaggaaaaatcaacttcttgaagcgattcatttcgaatctaagtggcaaagctcaaattttttcgccattacttcgactcaagaaagatgaaccattcaaatggaatgaagagcatcaaaaggctttcgatgaaattaaagaatatctgatcaagcctcccgtgttaatgcctcctagtcgaaacaagactatgaagttgtatattgctgcgtctgacaagaccattggtagcatgttggctcaggaagatgatgatggcgtagagcat

SEQ ID NO: 7706 - DNA, 1046 bp, Glycine max
  Gm_smallRNAprecursor_539
aggtatgtcgaatggttagcaaatatagtccctgtcattaaaaagaatggaactctaagagtatgcatagattttagggatttaaacaatgctacacctaaagatgaatatgctatgccagtagcagaaatgttggtagattcagcagctggtttcgaatttttaagcatgttagatggttattctggttataaccaaatatttattgctgaaaatgatgtgtcaaaaacagcatttcgatgccctggtgctttaggcacttatgaatgggtggttatgccctttgggttgaaaaatgctggggccacttatcaaagggccatgaattccatgtttcatgattttattgacacatttatgcaagtttatattgatgatataatcatcaaatcctcttcagaagatagccatttggattaccttaggcaatctttcgaacgaatgaggaaacatggattaaaaatgaatccattaaagtgtgctttttgtgtgcgtgcaggagatttccttggttttgtggtgcataaaaaaggcattgagataaatcaaaacaagacaaaggctattcttgagacgaagcctccttcgactaaaaaacagcttcagtctttgctaggaaaaatcaacttcttgaagcgattcatttcgaatctaagtggcaaagctcaaattttttcgccattacttcgactcaagaaagatgaaccattcaaatggaatgaagagcatcaaaaggctttcgatgaaattaaagaatatctgatcaagcctcccgtgttaatgcctcctagtcgaaacaagactatgaagttgtatattgctgcgtctgacaagaccattggtagcatgttggctcaggaagatgatgatggcgtagagcatgcaatttattatcttagtcgtgtactaaatgatgcagaaactagatatactgccatagaaaaactttgtctttgtttgtatttctcttgtgcaaaacttaagcaatatataaagcctgttgatgtttatgtgtattctcattatgatattattaagcacatgtt

SEQ ID NO: 7707 - DNA, 1052 bp, Glycine max
  Gm_smallRNAprecursor_540
actgaagagtttatttcggcatcagatgaggacgaagcaccaggaatcttttcactagaggtgttggcttgacttgtggtcagcaggagtcgaagggctgcagcagggtcttcgtcttgcatttgaatgaatgtatcttctgcgatccctatgctagcggaaagcttagatgtcgaagacgccgagtaaatgttcgaacctccagcttcagcctcttctacggcctcttcatcggaaaagttttcttcggatgaacttttctgactcgatccatgaggactgctggatccaatgccttgaccttcaccctgttcctcaacattcactgcatccatctcaggagcgggagatgttcgagcatgtgagggtatttcttctatagaaacattttgttgtacctgattcgaattatcatggaaaaagcttaacaaatagtttcgtataagctatgatttaaaacacattaagaggatgatacctcgacggcaggttgttcttgtggtgagtccggttgatcgacagggttgcccatctcagcaacagaaggagtagcctctacttcagtgccgtcaatatcggtcgaaggtggttggacgtcaacaggttgattgtcaccttgttcttttgaaggcttggtttttttctttttcttcttgattggctcaccaccctcaacagccacagaaggttcaggctcgacctgcttcactttctttttcttcttaggcatttgagcctgggaattgcctgcctctgtttgttcagcagacttggtcgaagtcgcaggtaactttctttttcttataagaggtctttcctcttcttcctgcattacgagggtaaagaattgtcagaatatagacttgaaagaaagctataatattgacattagaaataaaacttgcatctttctcttcgtctaattcgacgatcgcatgcttcgagcgttttgaagtcgtggtagtatcaatgctatcatctttcttttgactctgaaaaaataaagaaatatgaggcaagacgttaagagtaagagataagttcagaagagt

SEQ ID NO: 7708 - DNA, 1055 bp, Glycine max
  Gm_smallRNAprecursor_541
aagaagggaataattatgagtttaaatttctcctactgaaaaattaaaaatcaatgaaatataaacacctcattgaaatatattgttaatatcaatgaaaaagttaatttttcttgcacattcttaatatgtatcaatacatgctggaatgcaacctcattcaaatgcaaccaatcagttcaaaagttttagtaaatggaaaatttaaatgtatttctcttccatgatgtgtagcatagtatttaaattttagcaaagctatatcttattgcagctttaaatgaaaattaagtcaaaagcaggagacaaacgacttgggccggctaaaccatcctagacagatatgcccttatttatttgggtgttgctaggtgcacccagtattattactggtgcacccagcacttaaggtaaaatgacaaaaatatccttgatccgtaagccatttaagttgatccgtaaggtttttatggatcaagttgatccgtaagccttttacgaatcaacttgatccgtaaaccttttacggaacaatacggatcaacttgatccatagaagtcttacggatcaagttgatccgtatgcttaatatcaacatatgaatcaacttgatccgtatcaatcttacggatcaaattgatccttacgatttacggatcaccctcacacacacccatcacaaatgcgaaaaaacataaggacagttttcgtattttaaaaaaatgctgggtgcacctagcaacaccctatttattttatgaacacatatgaagctcttccacttaaagatcttacatacgatggacacctcaatcacataatgtacatacacaggatatagccaatcaaacaactagctctaaatcttattggtaaaaggcaaaatcaaattacaaacaactgcagaaagaaaaaaaaatgaatgaatctaattctagtagtggcaatgtgagtgttagaagttgcagcagctatcactgatgctccctgaaattctgcaagttaatctcctttacaactcatgatgtatccctgcaccagaaagtagaatagg

SEQ ID NO: 7709 - DNA, 1079 bp, Glycine max
  Gm_smallRNAprecursor_542
gggtggcgaaaaatggcgtccctcccgcacccagccgcgtccctctcgcaccccacacgcgcacccagccgcgacacccgcagccgcacgcgcacgcagccgcgacgacctccggcagcgacgcaccggcacaagcggcggcgacgagctccggcagcgacgcatctgtcacgaacggcggcctgcagcgaggagttctcgcggagaagatgaagctgctgtcgcgaagaagaaggcgtcgcgaagaagaagaaggcgtaggttttagttttatttttgctgtttgacaccccctgttttctgtctgcagctttttttttccttttgctatttgacacctctttttacttttaacagtcccattttttttttcgtatttgacaccacaatttttttttctgttcagtcctcttttaaatggctgagtttatttgaactctttaatgagtttatttggtgtttgtacttgattattgtatgaactcatgaaacttttttagtttatttgaatgcaatcctttgtttttttcaatttcaatgagtttatatgtatgttttttttttttttggtccgccatgacatccgccattttccgctacgccatccgccatatttttatggcggattttttactttccgccatgaaccgccatccgccattaacaacattgatccaagcttggttcagtctaggttcttgtaaattgtgaatattggtagtggagagatatgtgcatttgtttatgttgtattgcaaagatcttatcaagaaaaaaatcttgtcatctgttcaggttctctgatttaactgggactgattatagtgaaagggccatcagccttgcccaaagccttgctaatcgtgatggattttccaacgtcaaatttttggtatgttctaattttagtgtgtgtgtgtgtgtgtgtgaatatgcatgtgcatctctaaatgcatagttttatttaactattttcttcttgtgtataacatgagtagtagttattttgctttgtgtataccatagtaggggcttcaacagtaaactaagtgcatgtaaactatgaacctggtggaaga

SEQ ID NO: 7710 - DNA, 1212 bp, Glycine max
  Gm_smallRNAprecursor_543
ctaactttatgatgaactatttgatacaggttaagaaatcatcatcatatctagataacttgtgtctaaaaattcaagaagtttgatgcatttggtcacttccttatcttagatcatgttgatgacacttgttttcttttataaagacatctagagtggtaggcgtagaggaatcaacactaatcaaaaccatggatctttatgttgcctcgtgccatattgcggcaaattgatcaaactaggccccttttagaaatttattcccaaaaaggggctgttttgaaactttttcctgggggagtctgtttttgaaggggactcgccaatggagatggcgagttggacacgtggcggcacctggtggactcgccagtggagttggcgagttgctgtccacgcggcgggtcccgtcattcgtactggcgaaatgtttttttacggaatttttttttaacttcaaacgggtataacttttgataggaatgtccgtttgagacccataatatgtcaaaatgctcgaaattgaatgaagaatctcttggcaaattcccgaaagggatttggtcaattcatgtttccaaaaaatggatttaagattcaaccatccatttttttaatcttaaatcctatttttgagctacttagaggtgttttttggaaaaatgagttgaccaaatcccctttggatatttgctaagggatttttcattcaatttcgagcattttgacatattatgggcctcaaacggacattcatatcaaaagttatactcgtttgaagttaaaaaaattttttccgtaaaaaaacatttcgctagtacgaatggcgggacccgccacgtggacagcaactcgccaactccattggcgagtccaccaggtgtcaccacgtgtccaactcgctatctccattggcgagtcccctccagaaacagacctccctaggaaaaagtttcaaaacaaccccctccctaggaaaaagtttcaaaacaacccccttttgggaataagtttctaaaaggggcttagtttggtcaatttgccattatgctgcttccaagtcctgctaaaccggtctacttgtcattgagacacgtgagaaccggttgtaacttgtaagtttatttgttatatattttttgatggaaagtttatttattacatattaaacctacgtatgtaggtaactcataaagttatataatttaagta

SEQ ID NO: 7711 - DNA, 1212 bp, Glycine max; identical to SEQ ID NO: 7710
  Gm_smallRNAprecursor_544

SEQ ID NO: 7712 - DNA, 1213 bp, Glycine max
  Gm_smallRNAprecursor_545
ctaactttatgatgaactatttgatacaggttaagaaatcatcatcatatctagataacttgtgtctaaaaattcaagaagtttgatgcatttggtcacttccttatcttagatcatgttgatgacacttgttttcttttataaagacatctagagtggtaggcgtagaggaatcaacactaatcaaaaccatggatctttatgttgcctcgtgccatattgcggcaaattgatcaaactaggccccttttagaaatttattcccaaaaaggggctgttttgaaactttttcctgggggagtctgtttttgaaggggactcgccaatggagatggcgagttggacacgtggcggcacctggtggactcgccagtggagttggcgagttgctgtccacgcggcgggtcccgtcattcgtactggcgaaatgtttttttacggaatttttttttaacttcaaacgggtataacttttgataggaatgtccgtttgagacccataatatgtcaaaatgctcgaaattgaatgaagaatctcttggcaaattcccgaaagggatttggtcaattcatgtttccaaaaaatggatttaagattcaaccatccatttttttaatcttaaatcctatttttgagctacttagaggtgttttttggaaaaatgagttgaccaaatcccctttggatatttgctaagggatttttcattcaatttcgagcattttgacatattatgggcctcaaacggacattcatatcaaaagttatactcgtttgaagttaaaaaaattttttccgtaaaaaaacatttcgctagtacgaatggcgggacccgccacgtggacagcaactcgccaactccattggcgagtccaccaggtgtcaccacgtgtccaactcgctatctccattggcgagtcccctccagaaacagacctccctaggaaaaagtttcaaaacaaccccctccctaggaaaaagtttcaaaacaacccccttttgggaataagtttctaaaaggggcttagtttggtcaatttgccattatgctgcttccaagtcctgctaaaccggtctacttgtcattgagacacgtgagaaccggttgtaacttgtaagtttatttgttatatattttttgatggaaagtttatttattacatattaaacctacgtatgtaggtaactcataaagttatataatttaagtaa

SEQ ID NO: 7713 - DNA, 1064 bp, Glycine max
  Gm_smallRNAprecursor_546
gcaatttctatgcagccaatagggaccaaattgaggcaaaccagataaacaatcaagctgtcttaactttcttatcagagtaaactaacttatattttttagaaacataaaaaaaataaaatcaatctattaattaatttgtaattgaaaaattatactggttttttaagagaaaaataaatgataaaatttaaataacgtaccgacatgcatattcccacgcaccaaatcttttcaaggtcgcgtacatgtaccaaacctgtaccgtaacaagcaccgaatagtaccacaatctatgtaactataatggttggacctatagtatcacatgttatcgaatcttctacacatgtgtaagctatgcaaacttctcatttaagatgtttaattcttggctgcattggagatcttacctcgcctagtaatatagtcaaagtagaatatataagtgaagataatcctcatcttataagttgattttgtaggatccagttagactcattttgaaataaatgtgagctcgggagtaatgaggagtgatgaaaggatttattcatcgctcctgagctcacatttatcccataatgggtccttgaccctaattgattcaccagtagagggacaagcttcatgtaaataagcgtataaggaggattagcatgatccaacccatagccaaccctcctatgataatccacaagatcaaatttccagagaagaaaactcttatcattaccaagaaactgagtgtgaaagagagatacccaattagctcaacaatagctgcaagccgtgggtaggaacgggttatggtatcattgtttgaaaataacaccacagagagtgaagctacaaaagcaatcactatagcaggtccaagaatacaaggttggtcttgggatgtgatcgtttgataccccaaagcagcaaaagttagacaaacaatttttggtaacagatttaagggaattttcttggggttgtagtctagtttttccttctcagttgcattaaaatggtatagtggcaagtgatcatcagaaccaccatggttctgaggcagt

SEQ ID NO: 7714 - DNA, 1046 bp, Glycine max
  Gm_smallRNAprecursor_547
caaaatgagttgtaacgaataaaaaaagaacgatcatcatttatggtaagaaaattattggattttcttttcaattagtattttaacaattagtattttaactctaaattgatagaaattaaagtttaagatctttatttacaaaaagagttcaagagggtataatactttttttttcatttttcaatctaacttacatcaatctaacttataacgataagtttttttttttaaaaaaaaaaagtggaactgaagcaaaagattaactttccaattatgttggcacctttaaccgtaactagcaagaaccatgagaagagctagaataacagaaaagttaaaagtcaaggtcggcaaaaacccgatcatataatattagagtgaatagacaatttagtccctgaaattgtacctattttgcatattagtctctaacttaatattaaattcaaaatagtccctatctttgcataagtgttgcaaaatagtccttccgttaaattttaaagtaacgccgttagtgaggtcaattttagtgccacgtggactatccacgtggcactaaaggatgacgtggcatgacacgtggacgtgcctgatgccacgtcatttgatgataacaaaacgagtaaataggcaatttagtccctgactttgtacccctgttgcatattagtccctaacttaatgaaaaattcaaaatagtccctatcttttacataagtattacaaaatagtccttccattaaattttaaagtaatgttgttagtaaggtcaattttagtgtcacgtcatttgatgatgatagaatgagtgacttcttcaaatttaatggttttgaaccaattgaggcatatatacgaaaaagaactcacacacacttgcacaaataaaaagaaccaaaaatccacagcaacaactttatctctgtagttgtcaacaccaatgggcgaggtctgcataaccattctcttttcttcttttttttttcttcaattaccatcaatgtatcattttgggttctgatttttgtgtgtgttttgaa

SEQ ID NO: 7715 - DNA, 1045 bp, Glycine max
  Gm_smallRNAprecursor_548
aaaatgagttgtaacgaataaaaaaagaacgatcatcatttatggtaagaaaattattggattttcttttcaattagtattttaacaattagtattttaactctaaattgatagaaattaaagtttaagatctttatttacaaaaagagttcaagagggtataatactttttttttcatttttcaatctaacttacatcaatctaacttataacgataagtttttttttttaaaaaaaaaaagtggaactgaagcaaaagattaactttccaattatgttggcacctttaaccgtaactagcaagaaccatgagaagagctagaataacagaaaagttaaaagtcaaggtcggcaaaaacccgatcatataatattagagtgaatagacaatttagtccctgaaattgtacctattttgcatattagtctctaacttaatattaaattcaaaatagtccctatctttgcataagtgttgcaaaatagtccttccgttaaattttaaagtaacgccgttagtgaggtcaattttagtgccacgtggactatccacgtggcactaaaggatgacgtggcatgacacgtggacgtgcctgatgccacgtcatttgatgataacaaaacgagtaaataggcaatttagtccctgactttgtacccctgttgcatattagtccctaacttaatgaaaaattcaaaatagtccctatcttttacataagtattacaaaatagtccttccattaaattttaaagtaatgttgttagtaaggtcaattttagtgtcacgtcatttgatgatgatagaatgagtgacttcttcaaatttaatggttttgaaccaattgaggcatatatacgaaaaagaactcacacacacttgcacaaataaaaagaaccaaaaatccacagcaacaactttatctctgtagttgtcaacaccaatgggcgaggtctgcataaccattctcttttcttcttttttttttcttcaattaccatcaatgtatcattttgggttctgatttttgtgtgtgttttgaa

SEQ ID NO: 7716 - DNA, 1097 bp, Glycine max
  Gm_smallRNAprecursor_549
tataagatcactatataggcagagggtgacttttattaagccttattttttatatattttattagcatgaacgcaagaaaaaattattagttggtttactatcatcatattatttatggtcccgatcaataatttaatattttaaattaattaagattccttcaattaatggataacatacttactttttgttcgataattattaattatatctttaatttagtgaatatgtataattgatggtttatgtatcacataattattgattaccttataattttagatgtgacatgttaatggcccgtgaggcttaatatgtttgtttatgctttttttttcttttttttaggcaaaattgtattattgatccctcagtttatttttagtttcggatttagtcctccagtaatttaattcacgaagggtcctcctattttataaaatcgtgcatggttgattcccaggctacaattggacgtcgttagcgagtgatgttgattgtcacatgtcacgttcttattggatgatgactaccccgtgtcatgttctgattggatgtcaactacatggatgaaatacattgttattttcattgaccaatcagaacatgacacatgatagtcatcatccaataagaatgtgacacgtgacaatcaacgtcacttactaacggtcaacgttcaattgtggcctgggagatcaattgtacgattttaaaaaataggaggacccaattcgtaaattaaattaacggggaaccaaatcctgtagataaattgtgatgatggcttggacgtgataatagcgcgtacatatttagatttcagcatactagcaaacgttagtgtaattgcccaaaactgtaaaacatgtttacatgttttttttttttaagccaaaaatattgggtctagatgaaagagaaattgccattccaactatattgatatctaatttctacaacatcaaaaagagccatctcaaaatagcaagtggaccctcttgaatgcgttgacgaaaccactcccttatttttggggcactgatcctatttcctccttctttgaattttgaaaatattatctaatactatctgg

SEQ ID NO: 7717 - DNA, 1115 bp, Glycine max
  Gm_smallRNAprecursor_550
aaacaaacaaacaataatctatttggcccaaaaggatgatgaaacacgggagaaaaaaaatgaacaaaagaagcaccaaagcaagttattattcccatacaaatatttaactcctccaggacaatgcaagatgaagcaaaactattcaagtgataaaatagcatcaacaagtagcctgatttaacaaatagcactaacaagatgctaactgaaactccacatacgtaaagattcaacagcagcaccatacaagatggggcaaacaaccaacacaattattatgttttgcttcttctctttttattggaaagtcatcttaattgcagtcaccccaaatccgtcttagttgcagcctctttggggctgccttaatgctatttgttaaatcaaggctattggcctagagcatagcaacataagtggcccaacaattgatctaagataggccctaaatacctttttaaaattggagtttagggcctaattcaacctcacaaaactgggttgtaaggtgaggattgtccaagcttgcaatagagcttagaggcaacctcaaggtagagtttagtatcacatcaactaaagatataacttaaatagagcttgtaaagcttggacaatcttcaccttacaacccaatttagggtggttgaattaggccctaaactcattttaaatagtatttagagcctatcttagatctatccattgttggcccacttacgttgctacgctctaggccaatagtcttgatttaccaaatagcattaacaagatcctaattgaaactccacttaggatgcaacagcagcaaaacgcaagaagaggcaaacaaccaacacaattattctgtttttcctttaatcttttgttagaaagccatcttaactacgggaacccctaagtccgtcttagttgcagactctttggggctgccttgactgcaacctcaagggtggtgtttagtctcacaccgacaaaagatatgacttaaatagagattgagtttgccctaatttaacaaatagcattaacaagatcctaattgaaactccacttgaattcaacaacagcacaatgcaagacgaggtaaactgcaaacaaccaacaaaatt

SEQ ID NO: 7718 - DNA, 1189 bp, Glycine max
  Gm_smallRNAprecursor_551
atggaggccgaaaacacatacgtttcacatgagatgcggagagtgtactattactcttcaagacgtctctgtattgttaggtctacgtgtggatagtttaccattaatcgatccaacaaatcttaattggactgatttatgtgagggattattgggagtcagaccacaagaaggtgaaattaaaggtagtgtggttaaattaagttggctggctcaccattttgcacaaataaataaccacgacgacaaagaacaagtacgaaggtttgcccgtgcatggatattgagattcattggaggtgtcttgttcgttgacaaaagcattaacaaagtttcgctaaggtaccttcaatttttacgtgactttggagactgtagcacatatgcatagggacctgccgtacttgcttttctatacaggcagatgtgcagtgccaccgattataaaactaaatcaatcggaggtatgtgcatcttactacaaatgtgggcatgtgaacgatgtccaaccttggctccaaagaggactccttcccaagtagtaaataaaccactggggcacaggttagtcatttttaaaagcgtctttcatttcaaaagaataaatggttttagggtatattaaattttaatctttgtaggtggttgcgacgtggaaaccaacatatcggcaatgatgatgtgagagtttttcgtcgcaagttggatattatgaaacgtcatgaggtaagaacatggtattgtatttgaaaaataaaaaatgatatgtgttattttactaaattgctgacaactacgttgttatatgttgtttatgtgtgagccttacacaacaactgttatatcattgttgcctcccatttgtgtagtcgaaagtgtcgcgtggtgcacggtggtgccactaatttgtttccaagttattgaatgacaccaaccggatagagtattgagacaatttggaatgcagcaaccaattccagagtctcattcgcaacccttgaatatttatggcataacactaaaagggaaacatgacgaaaattgggggcaattgttcgccccaatgattgatcagtggaacaatcaccatgcttttagggtcgacgcttatccccgacaagagggcctattgagctttaactcggactacatggtctggtataggcgaaagacaaagatgtttgttgac

SEQ ID NO: 7719 - DNA, 1047 bp, Glycine max
  Gm_smallRNAprecursor_552
ctcatttatgctttctaggaaaattcccataaggtcacccaccccataactactccaagccaaacatgcttaactatagagttcttaagtgatagggtaccaaaaagtatatgcattttgttggtataggtagtaccagttaattcctttaagttatcatcaattttatagtttcatacctacacaaccttcgaaccatcaattttggtgtgatttggttggggtgttatgtaacaccctgatatatatctacatattattagtaattatgtttgatgtttgattatatttgttgtgttatttttatccgtaattattttcaaggaggctaatttagttaatagagaggtgtgggtagataaggatctagcttctcaaagaagcctcttgagaaagcttatcaaagaagccacgaggaagcttcttgaggaagcctcttaatgaagcttctcaaggaagctacatgaagctgcctcggtaaaaacgcttcccagcattctttaaccgttggatcttctcaaaatttggtttgcagcttcaaaagacacttgtccacgatctgaccattgggatctttgagaagatgtttggagtgtgggcgacgtttcagatcccgagagcattgctcacttgagcgtttcagcctttgctttcatgtagcttaggaaaaatgtcatttcttatcctttctttcttccaaaaccatttccaatgttccaagctttttctccatcacccatagccaccattagccaccacaaaccgccgttgttctccgttaaaaaccccacaccgagagcaacccttcaaccgaagcggaatcttccaacttggcttgcggtttcggtagagaacgaaaccctaatctgaactttcattttcctttgaggtaaccatggttctatgcttgttccttgttagttttagtttgtcatttcatcttttctgactttggaaactgccattgcatgttttatgtttcctctgaaaaaccctagagcaaagaaactttgtaaacgttctcctttcatgaaatgcatgttattt

SEQ ID NO: 7720 - DNA, 1133 bp, Glycine max
  Gm_smallRNAprecursor_553
aatggcggatgtcatggcggacacaaaaaaaaaaaaaaacatatatataaactcattgaaattgaaaaaaacaaaggattgcattcaaataaactaaaaaagtttcatgagttcatacaataatcaagtaccaacaccaaataaactcattaaagagttcaaaataagaaaatgataaaaacataatgcaaagtgcaaagtgaaggttgaggctctaatcatcttctccaatcccaacataatcatcttcgttgttatcatatggtaatggagcatctccctctccctcttccccatcagacgcctcaaaattgaccatgatttcttcttcttcttcagattcaacatcaatattctcctcaacatctagatcctcatcattttcttggactgctttttgcttccttgatgaagatccaacaaccattgcctgttttttagaagtttgggcagcagcaacacttgttttttgctttttccgcctagtatacatcctacactctccaacccccgaagcctgatacacagttgcccaatttagagcatcatcatcttcaaataccaaatcatttccagcatcattatcatcatcttgatccatctctcccacgagccattcattgcatacatcaatatcattaagagaaattggatcaatttcatctcttgcattatatctttgcttcaattgttggttgtatttgacaaacaccaaatcatgcaacctcttgtgctcaagcctatttctttttttggaatgaatctacaacataacaaataaatgttgatttcaatctcaaatatactccaaatataacttgatcatcaaaattaaataaaattaaaaagtatagttagagttttgtcacaattacttgctcaaacacactccaatttctttcacatcctgaagcactgcaagtcaaactcaaaatcttaatagccagcttctgcaaatttggagtttgtgacccaaacattcgccaccaatatgctgcaataccaattaccaaccaagagcataacttagaattctgaattctaacactaatacataaaaaaaatagtatgataaaagtttcttactaggagaatgggttttcctttgagccattgcaaagtcggaaccaaag

SEQ ID NO: 7721 - DNA, 1080 bp, Glycine max
  Gm_smallRNAprecursor_554
ttttggacctgtttagtttccaagggaagaaagatggatctcttggggcagacaattggaaagcttgaatggtttacttttggttggtgtctcatctcattgaaaggttaattgagaatcctctctgtttctttcattactatggtttgttgtcgagtcaagatccttttcatttcttctatattatgtagaggtggcataatgggttggactagtcgggccgaccctaacccatccaatgaaagggtgttactaggtgcacccaacattattgctggtgcatccaacattttttaaaaatatcaaaattacccctgcattttttcgcatttgtgatggatgtgcgtgagggtggtccataaattatacagatcaacttgatccgtaaggttgatacggatcaagttgatccatatgttgatattaagcatacgaatcaacttgatccgtaaggttgatacggatcaagttgatccatatgttgatattaagcatacgaatcaacttgatccgtaagccttttacggatcaagttaatccgtaaggcttctacggaacaaattgatccatgttgttctataaaagacttacggatcaagttgattcgtaaaaggtttacggatcaacttgatctgtaagccttttacggaacaacacggatcaatttgatccgtagaagccttacggatcaagttgatctgtaagccttttacggatcaacttaaaaggcttacggataaagaatattttcgtcattttattttaagtgttgggtgtacctagcaacacctccaatgaaatataggacttgagaattaatttttcagcccaaattaaacatggactttttagcctgacccaaccacagcccaatgtgggctatgcctgcaaaacctgttaaaagcccacaaaaataggcttttaaagggcttgggcttcattatttagacataaattaaatatgggttttttagcctggcccattatagcctgcaacccacatagttttatggttttggaaaaatgaatgaaacggagataatgcacacatagtttcatttgatatcataaattgagaat

SEQ ID NO: 7722 - DNA, 1080 bp, Glycine max; identical to SEQ ID NO: 7721
  Gm_smallRNAprecursor_555

SEQ ID NO: 7723 - DNA, 1045 bp, Glycine max
  Gm_smallRNAprecursor_556
ttggttggtgtctcatctcattgaaaggttaattgagaatcctctctgtttctttcattactatggtttgttgtcgagtcaagatccttttcatttcttctatattatgtagaggtggcataatgggttggactagtcgggccgaccctaacccatccaatgaaagggtgttactaggtgcacccaacattattgctggtgcatccaacattttttaaaaatatcaaaattacccctgcattttttcgcatttgtgatggatgtgcgtgagggtggtccataaattatacagatcaacttgatccgtaaggttgatacggatcaagttgatccatatgttgatattaagcatacgaatcaacttgatccgtaaggttgatacggatcaagttgatccatatgttgatattaagcatacgaatcaacttgatccgtaagccttttacggatcaagttaatccgtaaggcttctacggaacaaattgatccatgttgttctataaaagacttacggatcaagttgattcgtaaaaggtttacggatcaacttgatctgtaagccttttacggaacaacacggatcaatttgatccgtagaagccttacggatcaagttgatctgtaagccttttacggatcaacttaaaaggcttacggataaagaatattttcgtcattttattttaagtgttgggtgtacctagcaacacctccaatgaaatataggacttgagaattaatttttcagcccaaattaaacatggactttttagcctgacccaaccacagcccaatgtgggctatgcctgcaaaacctgttaaaagcccacaaaaataggcttttaaagggcttgggcttcattatttagacataaattaaatatgggttttttagcctggcccattatagcctgcaacccacatagttttatggttttggaaaaatgaatgaaacggagataatgcacacatagtttcatttgatatcataaattgagaatttcacttaatgattagactcatggttaagagttaagactcaagt

SEQ ID NO: 7724 - DNA, 1110 bp, Glycine max
  Gm_smallRNAprecursor_557
ttggttggtgtctcatctcattgaaaggttaattgagaatcctctctgtttctttcattactatggtttgttgtcgagtcaagatccttttcatttcttctatattatgtagaggtggcataatgggttggactagtcgggccgaccctaacccatccaatgaaagggtgttactaggtgcacccaacattattgctggtgcatccaacattttttaaaaatatcaaaattacccctgcattttttcgcatttgtgatggatgtgcgtgagggtggtccataaattatacagatcaacttgatccgtaaggttgatacggatcaagttgatccatatgttgatattaagcatacgaatcaacttgatccgtaaggttgatacggatcaagttgatccatatgttgatattaagcatacgaatcaacttgatccgtaagccttttacggatcaagttaatccgtaaggcttctacggaacaaattgatccatgttgttctataaaagacttacggatcaagttgattcgtaaaaggtttacggatcaacttgatctgtaagccttttacggaacaacacggatcaatttgatccgtagaagccttacggatcaagttgatctgtaagccttttacggatcaacttaaaaggcttacggataaagaatattttcgtcattttattttaagtgttgggtgtacctagcaacacctccaatgaaatataggacttgagaattaatttttcagcccaaattaaacatggactttttagcctgacccaaccacagcccaatgtgggctatgcctgcaaaacctgttaaaagcccacaaaaataggcttttaaagggcttgggcttcattatttagacataaattaaatatgggttttttagcctggcccattatagcctgcaacccacatagttttatggttttggaaaaatgaatgaaacggagataatgcacacatagtttcatttgatatcataaattgagaatttcacttaatgattagactcatggttaagagttaagactcaagtgaaaactgttgaacaataatgtttattagtaataaattaataatcgtatttaaatcacattggtt

SEQ ID NO: 7725 - DNA, 1111 bp, Glycine max
  Gm_smallRNAprecursor_558
ttggttggtgtctcatctcattgaaaggttaattgagaatcctctctgtttctttcattactatggtttgttgtcgagtcaagatccttttcatttcttctatattatgtagaggtggcataatgggttggactagtcgggccgaccctaacccatccaatgaaagggtgttactaggtgcacccaacattattgctggtgcatccaacattttttaaaaatatcaaaattacccctgcattttttcgcatttgtgatggatgtgcgtgagggtggtccataaattatacagatcaacttgatccgtaaggttgatacggatcaagttgatccatatgttgatattaagcatacgaatcaacttgatccgtaaggttgatacggatcaagttgatccatatgttgatattaagcatacgaatcaacttgatccgtaagccttttacggatcaagttaatccgtaaggcttctacggaacaaattgatccatgttgttctataaaagacttacggatcaagttgattcgtaaaaggtttacggatcaacttgatctgtaagccttttacggaacaacacggatcaatttgatccgtagaagccttacggatcaagttgatctgtaagccttttacggatcaacttaaaaggcttacggataaagaatattttcgtcattttattttaagtgttgggtgtacctagcaacacctccaatgaaatataggacttgagaattaatttttcagcccaaattaaacatggactttttagcctgacccaaccacagcccaatgtgggctatgcctgcaaaacctgttaaaagcccacaaaaataggcttttaaagggcttgggcttcattatttagacataaattaaatatgggttttttagcctggcccattatagcctgcaacccacatagttttatggttttggaaaaatgaatgaaacggagataatgcacacatagtttcatttgatatcataaattgagaatttcacttaatgattagactcatggttaagagttaagactcaagtgaaaactgttgaacaataatgtttattagtaataaattaataatcgtatttaaatcacattggtta

SEQ ID NO: 7726 - DNA, 1041 bp, Glycine max
  Gm_smallRNAprecursor_559
ggttggtgtctcatctcattgaaaggttaattgagaatcctctctgtttctttcattactatggtttgttgtcgagtcaagatccttttcatttcttctatattatgtagaggtggcataatgggttggactagtcgggccgaccctaacccatccaatgaaagggtgttactaggtgcacccaacattattgctggtgcatccaacattttttaaaaatatcaaaattacccctgcattttttcgcatttgtgatggatgtgcgtgagggtggtccataaattatacagatcaacttgatccgtaaggttgatacggatcaagttgatccatatgttgatattaagcatacgaatcaacttgatccgtaaggttgatacggatcaagttgatccatatgttgatattaagcatacgaatcaacttgatccgtaagccttttacggatcaagttaatccgtaaggcttctacggaacaaattgatccatgttgttctataaaagacttacggatcaagttgattcgtaaaaggtttacggatcaacttgatctgtaagccttttacggaacaacacggatcaatttgatccgtagaagccttacggatcaagttgatctgtaagccttttacggatcaacttaaaaggcttacggataaagaatattttcgtcattttattttaagtgttgggtgtacctagcaacacctccaatgaaatataggacttgagaattaatttttcagcccaaattaaacatggactttttagcctgacccaaccacagcccaatgtgggctatgcctgcaaaacctgttaaaagcccacaaaaataggcttttaaagggcttgggcttcattatttagacataaattaaatatgggttttttagcctggcccattatagcctgcaacccacatagttttatggttttggaaaaatgaatgaaacggagataatgcacacatagtttcatttgatatcataaattgagaatttcacttaatgattagactcatggttaagagttaagactcaa

SEQ ID NO: 7727 - DNA, 1107 bp, Glycine max
  Gm_smallRNAprecursor_560
ggttggtgtctcatctcattgaaaggttaattgagaatcctctctgtttctttcattactatggtttgttgtcgagtcaagatccttttcatttcttctatattatgtagaggtggcataatgggttggactagtcgggccgaccctaacccatccaatgaaagggtgttactaggtgcacccaacattattgctggtgcatccaacattttttaaaaatatcaaaattacccctgcattttttcgcatttgtgatggatgtgcgtgagggtggtccataaattatacagatcaacttgatccgtaaggttgatacggatcaagttgatccatatgttgatattaagcatacgaatcaacttgatccgtaaggttgatacggatcaagttgatccatatgttgatattaagcatacgaatcaacttgatccgtaagccttttacggatcaagttaatccgtaaggcttctacggaacaaattgatccatgttgttctataaaagacttacggatcaagttgattcgtaaaaggtttacggatcaacttgatctgtaagccttttacggaacaacacggatcaatttgatccgtagaagccttacggatcaagttgatctgtaagccttttacggatcaacttaaaaggcttacggataaagaatattttcgtcattttattttaagtgttgggtgtacctagcaacacctccaatgaaatataggacttgagaattaatttttcagcccaaattaaacatggactttttagcctgacccaaccacagcccaatgtgggctatgcctgcaaaacctgttaaaagcccacaaaaataggcttttaaagggcttgggcttcattatttagacataaattaaatatgggttttttagcctggcccattatagcctgcaacccacatagttttatggttttggaaaaatgaatgaaacggagataatgcacacatagtttcatttgatatcataaattgagaatttcacttaatgattagactcatggttaagagttaagactcaagtgaaaactgttgaacaataatgtttattagtaataaattaataatcgtatttaaatcacattggt

SEQ ID NO: 7728 - DNA, 1031 bp, Glycine max
  Gm_smallRNAprecursor_561
accaagaacaagaggacgaccaaaagtcgatccaaccccctacatactcttctatggaaccttatgatgttatctgacaactttagcattgataaggaaacccttaggaaagatttttattctctggagaatgaacctcaaaggagatggtttttccaacattacaagggtacaaacagaaaacaaatccaagacaagttctacgaatttgtcgaacgagtcaaaattaatgtccttttctttaatttggttattggctctggtagagccaatggaacctcttttccttttgtactggatctccctctttaactgtttgggtatggaggtcagaccaaggaggcggatttttctttagcctatcatgcaatggcttgacaatattgtttaagtgggggacaaattctcctacataatttagacaacctagaaatctttgtaactgggttttgtctaagatctggttgggaaatttgctagcaaattctattgacctttcgattggaatgattgtaccttgataaatattgtgaccaaggaatcgaattcgagtttggaaaagattgatttttgatttggagactgccaaaccattttgtttgatgatatggatgaaggtttggagatgtttgaaatgttggtcaatgttttgggaaaagattaaaacatcatctatgtagacaatgacaaacttttaatatggattaaaaatatcattcataattttttgaaattctgaaggggcattcttcagtccgaatggcatcacattccattcatattgcccgaaaggtacagtaaacgttgttttgtacctatctgattcttggatttggatttgccaaaatccagatttcatatcaaattttgaaaatatttttgcagaatttaatctgttaagcaaatcttttttgtttggaataggatatctaatccattgtaatgcttgatttagtggtttgtaatttatgactaagcggggtgtcccacgctcaatctcagattgtttgttgacataaaaagccgcacaa

SEQ ID NO: 7729 - DNA, 1127 bp, Glycine max
  Gm_smallRNAprecursor_562
ggacaaattctcctacataatttagacaacctagaaatctttgtaactgggttttgtctaagatctggttgggaaatttgctagcaaattctattgacctttcgattggaatgattgtaccttgataaatattgtgaccaaggaatcgaattcgagtttggaaaagattgatttttgatttggagactgccaaaccattttgtttgatgatatggatgaaggtttggagatgtttgaaatgttggtcaatgttttgggaaaagattaaaacatcatctatgtagacaatgacaaacttttaatatggattaaaaatatcattcataattttttgaaattctgaaggggcattcttcagtccgaatggcatcacattccattcatattgcccgaaaggtacagtaaacgttgttttgtacctatctgattcttggatttggatttgccaaaatccagatttcatatcaaattttgaaaatatttttgcagaatttaatctgttaagcaaatcttttttgtttggaataggatatctaatccattgtaatgcttgatttagtggtttgtaatttatgactaagcggggtgtcccacgctcaatctcagattgtttgttgacataaaaagccgcacaagaccatgggcttttgcttttccggattaggcctttatcaagcaaatccttgatttctttttgacaatattggagaagttcttcattaatttggattggtctggccttggtgggaatttgtttttccctaaagtctttctcataggggagatcaacaatatgtttctttctgtcccaaaatgcatgtggcaattcagaacagacggtcgattcaatatgatttaataaagattgaattttttcttttacctggggtttttctagttgtatctgaatatttttaaaagatacttcttcttttaagaagttaatttgattaatcttattttctataagatttatatttctggaaattggtttagtagaaaaattaaatataatttttcttcctaaataatttgtggttattccttcattagatatttggatgggaaacagggctctaatgaagggcgttcctaagattacttcattcttaaggttttttaccaga

SEQ ID NO: 7730 - DNA, 1197 bp, Glycine max
  Gm_smallRNAprecursor_563
gttttaacaggattctagatgcacaagtattcatgaccttgtactggatcctataaattaaggctgctgggattgatccttctttcatgtcaaggccatgaaagtggatgtttaagaacagagagtcaagaatgtttctgtccatcagactcactgttttgtttggataacagttaaaatatattggaccttgtcataggctggtttcgactgttccaattagggagtcttcaaattgattatgcctaatgtctcttagacacattaaaactgctgcatctatgcccatatcaattaagggcttgatggctacttgtacacaaccgatgtgtagatatttatacttacgactatcttcataaattgaattttttgaaagtaaatgaaattcttcccctatatcttgtcctagaggaatattgttttctactgttttgattatgtaatcaaagttgtgtttgtcctttattgtttcaggaacgtatagttgatcccgagggatttctggaatgttccagtcatccatgttttgattgatatcttcgaatcggactttctcatagaagagatggtgttttggggcaacctcttgggtctggttatcttgatcatttaataaattggagtttcttaaagaagatgataaggaggagtttgagcgaaaagagatacgggaaaaagatcataatagtctagacatgattataatattctctaatatctttgccctcatttggttccatagaaatatctccgtaagtaaatatgtcacaaaatttttctggatctgaattatttttaagaaaaactctttttttttttttgaaaaatagcttgaacggcaatcctatagccaccagtatattatgtcttgatattttggttaaacagtacaccttagccttaccgccctttatgcatcacgggtcttactgctacagtactattcaactaaaatattagactgctgtacttccaggaagtactgttcaaacatttattgtacaaatcaaagtaaaatattacttgtactatacaaggttttagtttcagatccataaaatttgttaacatatgtccttacggatagtattcctacttccccatcaggctctgataccagagatcagcggaataagatcaaacggacagataggaagtaagaatgcagtatgataaataaaacgaaaatataaa

SEQ ID NO: 7731 - DNA, 1146 bp, Glycine max
  Gm_smallRNAprecursor_564
agatatcaagggcacaccgaaacggcttacaaacccaggtttttgaaaacaaagaaaccgaagcggcggcagagccacacaggatcggtgaggggagaagggagatatgaaaaatagaacttgaaatttattgaaaccgaaagaaaagcttacaaagagtttttccctaggcagagcttctctctctaaaaacctgattctgagactatctgaaagggtgcctcacaaagagaacgaggactcctttaaatagactcaatttttactgtttctacagtgtcggtaatgtttaccagaactgttacaaaacttttacaaattacattaataaaaccgaaaattagttacaataattcatgattactacaactaattaatcgtcgtctaatgatatgccaaaacattcatcttcattctggtagaatggatcatcttcttggtcatcattagtctcagatgattcggcttccttcttgggaggttcgtcttccacttcttgttgaagtagttggagaacttctttgagattctgagcaagactctctttagattttgagcttgctaagaatgctgctagttgcgacttctgatttagaaacaaagatgtctccggatcagcaggtttgaggaactcaggattgctctggaaccagttcttgacttgttctggagcagcctttgaagtatcgaattgtgaccaccattttacaaaggcgtgtctctgcaatggtggatattgtttgctgttttcagtttttccgtatctgtactgccatgaaaaaatccatgacaaggcaaaactggaaaagtattttaaatctgtcggaatacgtgattccttgctgttatagagcttgttgaattgttggaatccctgttggacttcttctgggaatatttgtggaattggtccaaagtagttccaccattggaggaaccaatttggaaaattatacacagtgttgtttttgaagtaaattagccatgaatgcttgaatttactattttgatgccagaacacattggtccaggcgtcaatgtaatcccaatagttatatcctgcagggtcaaatggtgcagacatttttttgtgttggtttaagtttgagccataatgtcgtggctgcataacctttaagatttgga

SEQ ID NO: 7732 - DNA, 1222 bp, Glycine max
  Gm_smallRNAprecursor_565
aagcttacaaagagtttttccctaggcagagcttctctctctaaaaacctgattctgagactatctgaaagggtgcctcacaaagagaacgaggactcctttaaatagactcaatttttactgtttctacagtgtcggtaatgtttaccagaactgttacaaaacttttacaaattacattaataaaaccgaaaattagttacaataattcatgattactacaactaattaatcgtcgtctaatgatatgccaaaacattcatcttcattctggtagaatggatcatcttcttggtcatcattagtctcagatgattcggcttccttcttgggaggttcgtcttccacttcttgttgaagtagttggagaacttctttgagattctgagcaagactctctttagattttgagcttgctaagaatgctgctagttgcgacttctgatttagaaacaaagatgtctccggatcagcaggtttgaggaactcaggattgctctggaaccagttcttgacttgttctggagcagcctttgaagtatcgaattgtgaccaccattttacaaaggcgtgtctctgcaatggtggatattgtttgctgttttcagtttttccgtatctgtactgccatgaaaaaatccatgacaaggcaaaactggaaaagtattttaaatctgtcggaatacgtgattccttgctgttatagagcttgttgaattgttggaatccctgttggacttcttctgggaatatttgtggaattggtccaaagtagttccaccattggaggaaccaatttggaaaattatacacagtgttgtttttgaagtaaattagccatgaatgcttgaatttactattttgatgccagaacacattggtccaggcgtcaatgtaatcccaatagttatatcctgcagggtcaaatggtgcagacatttttttgtgttggtttaagtttgagccataatgtcgtggctgcataacctttaagatttggattgtggaatgggtatttagatttggatctttggggtctttgaagtgtttaatagatactgagtttgtatctattagaatgaattcgtagaatttgcgggttttgtttgtggctgttggcctgtaatggaatcctggggggaatactttggcagttgctttgaaaggattcttgtcccagtattctggttccatttgtgagacattgaaatttttttttttt

SEQ ID NO: 7733 - DNA, 1213 bp, Glycine max
  Gm_smallRNAprecursor_566
aatgtttaccagaactgttacaaaacttttacaaattacattaataaaaccgaaaattagttacaataattcatgattactacaactaattaatcgtcgtctaatgatatgccaaaacattcatcttcattctggtagaatggatcatcttcttggtcatcattagtctcagatgattcggcttccttcttgggaggttcgtcttccacttcttgttgaagtagttggagaacttctttgagattctgagcaagactctctttagattttgagcttgctaagaatgctgctagttgcgacttctgatttagaaacaaagatgtctccggatcagcaggtttgaggaactcaggattgctctggaaccagttcttgacttgttctggagcagcctttgaagtatcgaattgtgaccaccattttacaaaggcgtgtctctgcaatggtggatattgtttgctgttttcagtttttccgtatctgtactgccatgaaaaaatccatgacaaggcaaaactggaaaagtattttaaatctgtcggaatacgtgattccttgctgttatagagcttgttgaattgttggaatccctgttggacttcttctgggaatatttgtggaattggtccaaagtagttccaccattggaggaaccaatttggaaaattatacacagtgttgtttttgaagtaaattagccatgaatgcttgaatttactattttgatgccagaacacattggtccaggcgtcaatgtaatcccaatagttatatcctgcagggtcaaatggtgcagacatttttttgtgttggtttaagtttgagccataatgtcgtggctgcataacctttaagatttggattgtggaatgggtatttagatttggatctttggggtctttgaagtgtttaatagatactgagtttgtatctattagaatgaattcgtagaatttgcgggttttgtttgtggctgttggcctgtaatggaatcctggggggaatactttggcagttgctttgaaaggattcttgtcccagtattctggttccatttgtgagacattgaaattttttttttttgcaatataactgttgctgggttgtggcgttgattcttgttgagtcaatgattgtattggtttttggttacagacagttttggtctgtttggccttttggatttgtttttgcagatctgtttcaaaatcat

SEQ ID NO: 7734 - DNA, 1057 bp, Glycine max
  Gm_smallRNAprecursor_567
ttgagcttgctaagaatgctgctagttgcgacttctgatttagaaacaaagatgtctccggatcagcaggtttgaggaactcaggattgctctggaaccagttcttgacttgttctggagcagcctttgaagtatcgaattgtgaccaccattttacaaaggcgtgtctctgcaatggtggatattgtttgctgttttcagtttttccgtatctgtactgccatgaaaaaatccatgacaaggcaaaactggaaaagtattttaaatctgtcggaatacgtgattccttgctgttatagagcttgttgaattgttggaatccctgttggacttcttctgggaatatttgtggaattggtccaaagtagttccaccattggaggaaccaatttggaaaattatacacagtgttgtttttgaagtaaattagccatgaatgcttgaatttactattttgatgccagaacacattggtccaggcgtcaatgtaatcccaatagttatatcctgcagggtcaaatggtgcagacatttttttgtgttggtttaagtttgagccataatgtcgtggctgcataacctttaagatttggattgtggaatgggtatttagatttggatctttggggtctttgaagtgtttaatagatactgagtttgtatctattagaatgaattcgtagaatttgcgggttttgtttgtggctgttggcctgtaatggaatcctggggggaatactttggcagttgctttgaaaggattcttgtcccagtattctggttccatttgtgagacattgaaattttttttttttgcaatataactgttgctgggttgtggcgttgattcttgttgagtcaatgattgtattggtttttggttacagacagttttggtctgtttggccttttggatttgtttttgcagatctgtttcaaaatcatcgtctgattctgaggccatttctgcccaggtctttttagccaattttggtactttggtgaggcctatatcttctaaggccaagagagtttgtattgaccaggcatagtcagc

SEQ ID NO: 7735 - DNA, 1118 bp, Glycine max
  Gm_smallRNAprecursor_568
ttctgactttgcaatggctcaaaggaaaagtcattctcctagtaagaaacttttaccatatgacaaatacaaataccatactatttttttatgtattagtgttataattcagaattctaactctgaagttatgctcttggttggtaattggtattgcagcatattggtggcgaatgtttgggtcacaaactccaaatttgcaaaagctagctattaaaaattttgagtttgacttgcaatgctttaggatgtgaaagaaattggagtgtgtttgagcaagtaattgtgacaaaactctaactatactttttaattttatttaattttgatgatcaagttttatttggagtatatttgagattgaaatcaacatttattttttatgttgtagattcattccaaaaaaagaaataggcttgagcacaagaggttgcatgatttggtgtttgtcaaatacaaccaacaattgaagcaaagatataatgcaagagatgaaattgatccaatttctcttaatgatattgatgtgtgcaatgaatggctcgtggaagagatggatcaagatgatgataatgatttggtatttgaagatgatgatgctctaaattgggcaactgtgtatcaggcttcgggggttggagagtgtaggatgtatactaggcgaaaaaagcaaaaaacaacaagtgttgctgctgcccaaacttctaaaaaacaggcaatggttgttggatcttcatcaaggaagcaaaaagcagtccaagaaaatgatgaagatctagattttgaggagaatattgatcttgaatctgaagaagaagaaatcatgatcaattttgaggcgtctgatggggaagagggagagggagatgatccattaccatatgataacaacgaagatgattatgttgggattggagaagatgattagagcctcaaccttttctttgcactttgcattatgtttttatcattttcttattttgaactctttaatgagtttatttggtattggtacttgattattatatgaactcatgaaacttttttagtttatttaaatgcaatcctttgtttttttcaatttcaatgagtttatatatatgtatttttttcttttt

SEQ ID NO: 7736 - DNA, 1164 bp, Glycine max
  Gm_smallRNAprecursor_569
attttgctcaaattggatcctacaagtcctaaatcatgtataaatcgtatttaaaccaaaaacaagcttcagttcaaggtaaatccaaatctagatatcaaaaacccatcaattgagtgaattttcaaggtttgagaagtgaaaatgagaatggggtaattttggagtaaactctcatctcaaaaaagtctataacattaatttagacttgctcaaactgattttaaggtgaaaactccgccgattcaagatttgacccctcaacacccaatttaccctagaaatgactcttgctttcacatttatcactcattttttttctcatttgctctgcccaagctttcctacaagtcctaattgacattttaaactaggatcaactcactttagactccaattaccactaaccccaaatttagcttttcaaaccctcaaaatctcacacttttccactcacatcactatcattctcacatttaaccctaggttaactctccccatcatctctaccagttttctaccaacaatttcagcacacaaacatcacaaagcatcatcataaaatcctaaaacagaatgggtagctttactcacatcaaacatgtcaagtttagcatgctttcaacaaattccttcacaaataactaccataaggcataaacctagtagaactacccatcatatctcccaaaaacccaatacccacgaatttcatgtgaaaagaagtccacccatacctgaaattcgaagccccacaacgtagaggtgtgcttcacgactccgaaaatggcttccttttgcaatttagagtagaagtgatgagcaattttggagctttaatggaggcttcaatggagaggaagaagaagagaaaagcaacgtgggaaggtgaggaaaagcttctgaattttgctgaatgaagagagagaatgtggcttttattttaaaaagattttctctttcctttttctaaaagctatgccacatgtctcattttgagtggagcaaaaggggcccactttttctcttgatgtgacttcatactcagccacaaggagagaaaaatttgaccttttgaatgctaaaatcctgcctcggtttgcgtgccgcttctctggttccggttcctcgcgtttctctgcacccgtcggggtccgtttttga

SEQ ID NO: 7737 - DNA, 1080 bp, Glycine max
  Gm_smallRNAprecursor_570
ccatagccatggcggtcgtggcagttatggcggggtggcggaaaatggcgtccctcccgcaccccacacgcgcacccagccgcgacacccgcagccgcacgcgcatgcagccgcgacgacctccggcagcgacgcaccggcacaaacagcggcgacgagctccggcagcgacgcatctgtcacgaacggcggcctgcagcgaggagttctcgcggagaagacgaaactgctgtcgcgaagaagaagaaggcgtaggttttagttttatttttgctgtttgacaccccctgttttctgtctgcagcttttttttttccttttgctatttgacacccctttttacttttaacagtcccatttttttttttcgtatttgacaccacaatttttttttttttctattcagtcctcttttaaatggctgagtttatttgaactctttaatgagtttatttggtgttggtacttgattattgtatgaactcataaaacttttttagtttatttgaatgcaatcctttgtttttttcaatttcaatgagtttatatatatgtttttttttttttttggtccgccatgacatccgccattttccgctacgccatccgccatatttttatggcgaattttttactttccgccatgaaccgccatccgccattaacaacattggttctgaaagaaaattaaataagtaatgctttttcaatgttctcccttatatgcaaagcttttgagggaatgaacatagaaaccagagcggctttttgaactctaaaaacagatgaacagatgaagtgtgtgtttcatgtttgtttagagtattttacacataaaagataattatgcaaaaactattatgttaaattttttgaagtttgctaggttttagcgtctagtaaaatcctttgagctttgttaactactgtttttcttttcagggttgttagaatacgaagaatgcgtgaagtaaatcaggaagcagttcttcttgcaatgtgctccaaaacttttacttccaaagtcatcatcttcaggttttcatttcatcatctacaagtctttttatttcagatttt

SEQ ID NO: 7738 - DNA, 1182 bp, Glycine max
  Gm_smallRNAprecursor_571
caaatggctcaaaattaaaaattaattttaagctatcaaatgcaatcattgaaaaccaaggtcttaggatcaacacaaactttcttctggtaaaaaaccttaagaatgaagtaatcttaggaacgcccttcattagagccctgtttcccatccaaatatctaatgaaggaataaccacaaattatttaggaagaaagattatatttaatttttctactaaaccaatttccagaaatataaatttcatagaaaataagattaatcaaattaacttcttaaaagaagaagtatcttttaataatattcagatacaactaggaaaaccccaagtaaaagataaaattcaatctttactaaatcatattgaatcaactgtctgttctgatttgccacatgcattttgggacagaaagaaacatattgttgatctcccctatgagaaagactttagggaaaaacaaattcccacaaaagccagaccgatccaaatgaatgaagaacttcttcaatactgtcaaaaggaaatcaaggatttgcttgataaaggcctaatccggaaaagcaaaagcccatggtcttgtgcagctttttatgtcaacaaacaatctgagattgggcgtggaacaccccgcttagtcataaattacaaaccactaaatcaagcattacaatggattagatatcctattccaaacaaaagagatttgcttaacagattaaattctgcaaagatattttcaaagtttgatatgaaatctggattttggcaaatccaaatccaagaatcagataggtacaaaacagcgtttactgtacctttcgggcaatatgagtggaacgtaatgccattcggactgaagaatgccccttcagaatttcaaaaaattatgaatgatatttttaatccctattcaaaattcgttaaacagtacaccttagccttactgccctttatccaacacgggtcttactgctacagtaccattcaactaaaatattagactgctgtacttccaggaagtactgttcaaacgcttactgtacaaatcaaagtaaaatattaaatgtactatacaaaatttttagtttcagatccatataattcgcaaacatatgtccttacggacagtattcctacttccccatcaggctctgataccagtgatcagcggagtaagatca

SEQ ID NO: 7739 - DNA, 1036 bp, Glycine max
  Gm_smallRNAprecursor_572
tttggatattaattaaacgttaactacaattagtgtacacacacataaaatatatataagtagaacttttatttaaatcacgtaccttaacaacaatccacctagcagcagccttggatttcggttgtggagtatcatcaagtcctttcaaagcactagtgttgaatataaggaacattaaaatattgatgttgttgagttatgccaatgaaaatgtattgaaaacaatactgacctgttaattattcccttaaggtagttgtctggcctgttatgcaaagaacaaaaccagacaactaggttttccttaggtagaatgacgaccatttgccagtgtccactgcagtagagacgaatatagtttattgtagtagtatagattatttaaattcaattattgtgtttgacttacctattcagataggctccaaggtaaacatctcgttttgaactctgtatccaactcttgatgtaactttcggattcaaattgtgattgtccagatctctgaatggactgtggctcgaggaatccatacacatcagaattccccgctcgcacacttgtctcagtcagatggctgtgttgttaagtcaaagttaattatgtatgaatttaaaacaattactttggtaattaatagtaatctaaaatgacttacagaatccacaactgtataactgatatgctgagacattgaccaccatgtgcaatttcagagagatcttcgtgctttatatacaacgggaagttttgattaaacaccccgaatatggtagcatcccacataacctggagcggcttcaaaaacagttgtgggatggtcaatgtcatcaggtacaggggatcatcgacctcttcatccgggctttctggaggttttgctggagacacagctgcctattgataaaacatagttaattagcaagttttgattacagtgaacaaattaattgaaaaaaataaacatataatcagagtaaaatacctgttctgataaacgcttcacaagatgtgttggccaagcaaggaaagt

SEQ ID NO: 7740 - DNA, 1083 bp, Glycine max
  Gm_smallRNAprecursor_573
tatgatttggcgtttgttgaacgtccaagttttctcttccaaaaattgcgttgaacgtgtcaaggagtgtaatttgtgtaaaacacacacccgtggttgattttattgggatgcccacggcattggataccataggtagagtacattttgctagagccttgctgcagaattttacgataagaactgtaggtatccccaacaacattcttctcataaatacaagtgtatagtagtaagctcagaatagaatagaagaggaattgtcatgatgaaattgatggtaggtatgctgtatcctagcgacccgtataatgcccatttaagttaagatgtttagttttgggaacaaaaataacatgggtgttgctaggtgtactcaacattattgctggtgcactcaacacttaaggtaaaatgacaaaaatacccttgatccgtaagtcatttaagttgatccgtaaaagacttatgaaccaacttgatctgtagaagccttacggatcaacttgatctgtaagccttttacggatcaagttgatttgtaaggtttctatggatcaagttgatccgtattgtttcgtaaaaggcttacggatcaagttgatccgttagcattttatgaatcaacttgatccgtaagtcttttacggaacaatacgaatcaacttgatccgtagaaaccttatagatcaacttgatccgtatcaaccttatggatcaacttgattcgtacgatttatggaccaccctcacacacacccatcacaaatgcgaaataagcgcatggataattttggtattttaaaaaaatgttgggtgcatcagcaataatgttgggtgcacctagcaacacccaaataacactcaaagaaatataattgattgaaggctaatttgtccttaacactttgtacttagagaacataaacaaatgagtcttaagagtttaagccacttaaataataaatttcataaatgtgcagaaaaaaggtgaacaacaattcaaactggttaaaatacttgaaagctgcaggttgtagggtatctttatatatatatgagaggtaaattgagataattgat

SEQ ID NO: 7741 - DNA, 1077 bp, Glycine max
  Gm_smallRNAprecursor_574
acaaccttccatctaagagagaacccaaccgcgagcctcccctgcaccagccgcgtccctcccgcaccccacacgcgcacccagccgcgacacccgcagccgcacgcgcacgcagccgcgacgacctccggcagcgacgcaccggcacaaacggcggcgacgagctccggcagcgacgcacctgtcacgaacggcggcctgcagcgagaagttctcgcggagaagacgaagctgtcgcgaagaagaagaagacgcaggttttcttagttttatttttgctgtttgacaccccctgttttctgtttgcagcttttttttttccttttgctatgtgacacccctttttacttttaacagtcccattttttttttcgtatttgacaccacaatttttttttttgttcagtcctcttttaaatggctgagtttatttgaactctttaatgagtttatttggtgttgatacttgattattgtatgaactcatgaaacttttttagtttatttgaatgcaatcctttgtttttttcaatttcaatgagtttatatatatgttttttttttttggtccgccatgacatccgccattttccgctacgccatccgccatatttttatggcggattttttactttccgccatgaaccgccatccgccattaacaacattgtgagagaatgagttggtaaaggagaaaacctaggaggaacaagaggaacaaaagctgtatcagcaggtgacatttgagctgtttgagggatagaagtgacagaaggtggagaaagattaggattgagactaaagtaggaatcacagctagtgattaaactagtggaagagagaaacaaatcagaatagggaaatcttaattcattgaacaaaacatctttagaaacatacactctacgagaaaaggataagcatttgtatcccttgtgagaagaagaatgccctagaaataaacattcttgagatcgaaaattcagtttatgtgtgtggtatggtctcaataaaggaaaacaggcacatccaaatgttttaataaagtgataatcaggatcctttttaaacaaaata

SEQ ID NO: 7742 - DNA, 1221 bp, Glycine max
  Gm_smallRNAprecursor_575
gtgagggtaggaggtactttttagagataaatgctgcaatctcgcttacattctcttgattttccccaagcattttgctcttagatttcagttttctttgtatttttgcaggaggactctgagcacctttgttttctatctttcctctcttttataattcttttttgaggaaagatcttttactgaggaatctgtcatttagactgtttgattttgcattacaaggacaccatctagtttgcactagtttaatgtcaattaagaatgccatgtagaaagtatagagaagagataagggatttatatattgctttgagaaaatattacaaaagccactgtaatctcttacaagagcagtatttataccgttgagtttcagttgtaacagaaatctaactaaacacaactgtcaactaactctagttataaagcttgttaagaatagtcccacatcgggtaattcatgaacatgataagtgcttatatagctgggtagaccacccccttatgaaccggtttttaaggggacctttcggatgccttggttgcactataaaatttaatatggtatcagagccatcttctacttctgtccagtgggtgccgccagccctcgctttgtggtgacgagccctggctcgagggggcgtgttaagaatagtcccacatcgggtaattcatgaacatgataagtgcttatatagctgggtagaccacccccttatgaaccggtttttaaggggacctttcggatgccttggttgcactataaaatttaataaagctaactagagttatttactcatatacacttacacccccctgcaaactcaatggggctgagaaaccaaaggtagcacagcacattgagtttggaactcaaataggcaaacctagtaggagacaagggcttagtaagtaaaactgcccattggtctgtcccaggtatatgctgaaccactaactgtttagttaagactttttttccttatgaaaaactcatccaactccatgtgtttggttccagcatgcagaactggattgtgggctaactgcactgcacttgaattatcacaaagaactaagggtgtagtgtgaggaactgcaagttcctgaactagagtctgaatctagataatatctgctgtggcagcagctaaacttctatattctgcttctgtgctggacctggaaactactttctgcttacgagaccaccaa

SEQ ID NO: 7743 - DNA, 1213 bp, Glycine max
  Gm_smallRNAprecursor_576
gggtaggaggtactttttagagataaatgctgcaatctcgcttacattctcttgattttccccaagcattttgctcttagatttcagttttctttgtatttttgcaggaggactctgagcacctttgttttctatctttcctctcttttataattcttttttgaggaaagatcttttactgaggaatctgtcatttagactgtttgattttgcattacaaggacaccatctagtttgcactagtttaatgtcaattaagaatgccatgtagaaagtatagagaagagataagggatttatatattgctttgagaaaatattacaaaagccactgtaatctcttacaagagcagtatttataccgttgagtttcagttgtaacagaaatctaactaaacacaactgtcaactaactctagttataaagcttgttaagaatagtcccacatcgggtaattcatgaacatgataagtgcttatatagctgggtagaccacccccttatgaaccggtttttaaggggacctttcggatgccttggttgcactataaaatttaatatggtatcagagccatcttctacttctgtccagtgggtgccgccagccctcgctttgtggtgacgagccctggctcgagggggcgtgttaagaatagtcccacatcgggtaattcatgaacatgataagtgcttatatagctgggtagaccacccccttatgaaccggtttttaaggggacctttcggatgccttggttgcactataaaatttaataaagctaactagagttatttactcatatacacttacacccccctgcaaactcaatggggctgagaaaccaaaggtagcacagcacattgagtttggaactcaaataggcaaacctagtaggagacaagggcttagtaagtaaaactgcccattggtctgtcccaggtatatgctgaaccactaactgtttagttaagactttttttccttatgaaaaactcatccaactccatgtgtttggttccagcatgcagaactggattgtgggctaactgcactgcacttgaattatcacaaagaactaagggtgtagtgtgaggaactgcaagttcctgaactagagtctgaatctagataatatctgctgtggcagcagctaaacttctatattctgcttctgtgctggacctggaaactactttctgcttacgagacca

SEQ ID NO: 7744 - DNA, 1031 bp, Glycine max
  Gm_smallRNAprecursor_577
aattagggaaatgtatgattttatcttatcttttgtttaatagtagataattgctggatttagaggctatctcttattttttagttgaaagagagaatttttttattttcttatttaaatctgtcatattctttgaatctaagtagcctacttggtcggttcttgagtgtggaggcctcctgagtccccagaaggacattgttatcttttaaattcatgagaattttgtgagattatattctattggtaactaaaaatatatagcatttattgtatttatcttgtattttatgttgttgtatgaatgggtattgaaactatatgtttggtatgaccaaggaggcggatttttctttagtctatcatgcaatggtttgacaatattatttaagtaggggacaaattctcctacgtaatttagacaacctagaaatctttgtaattgggttttgtctaagatttggttgggaattttgctagcaaactctattgacctgtcgattggaatgattgtaccttgataaatattgtgaccaaggaatcgaattcgagtttggaaaagattaatttttgatttggagactgccaaaccattttgtttaatgatatggatgaaggtttggaggtgtttgaaatgttggtcaatgttttgggaaaagattaaatcatcatctatgtagacaatgacaaattttgaataaggattaaaaatatcattcataattttttgaaattctgaaggggcattcttcagtccgaatggcatcacattccattcatattgcccgaaaggtacagtaaacgttgttttgtacctatctgattcttggatttggattttccaaaatccagatttcatatcaaattttgaaaatatctttgcagaatttaatctgttaagcaaatcctttttgtttggaataggatatctaatccattgtaatgcttgatttagtggtttgtaatttatgactaagcggggtgttcctcgctcaatctcagattgtttgttgacataaaaagccgcacaa

SEQ ID NO: 7745 - DNA, 1159 bp, Glycine max
  Gm_smallRNAprecursor_578
cccatctttcgggaagagttacctcatcccattttatttttctcgggagagaaacgttagcctttgtcatatcagtgataaacaaggttgtttctcctttttgaggttttaacaggactctagatgcacaagtattcatgaccttgtactggatcctataaattaaggctgctgggattgatccttctttcatgtcaaggccatgaaagtggatgtttaagaacagagagtcaagaatgtttatgtccatcagactcactgttttgtttggataacagttaaaatatattggaccttgtcctaggctggtttcgactgttccaattagggagtcttcaaattgattatgcctaatgtctcttagacacattaaaaccgctgcatctatgcccatatcaattaagggcttgatggctacttgtaacacaaccgatgtgtagatatttatacttacggctatgttcataaattgaattttttgaaagtaaatgaaattcttcccctatatcttgtcctagaggaatattgttttctactgttttgattatgtaatcaaagttgtgtttgtcttttattgtttcaggaacgtatagttgatcctgagggatttctagaatgttccagtcatccatgttttgattgatatcttcgaatcggacttcctcatcgaagagattgtgttttggggcgacctcttgggtctggttatcttgatcatttaataaattggagtttcttgaggaagatgatgaggaggagtttgagcgaaaagagatacgggaaaaagatcgtaaaagtctagacatgattacaatattctctaatatctttgccctcatttggttccatagaaatatctccgtaagtaaatatgtcacaaaatttttctggatctgaattatttttaagaaaaactctttttttttttttgaaaaacagtttgaacggcaatcctatagccaccagtgtattatgtcttgatattttggttaaacagtacaccttagccttaccgccctttatccaacatgggtcttactgctacagtactattcaactaaaatattagactgttgtacttccaggaagtactgttcaaacacttactgtacaaatcaaagtaaaatattacttgtactatacaagactttagttccag

SEQ ID NO: 7746 - DNA, 1061 bp, Glycine max
  Gm_smallRNAprecursor_579
ttccgtaacgttacgaaactttacgaatttcgtaacgatacttattttctttccgtaaggctacgaaaccttacggatcatgtatttactcttttttagctttcgaagaagttacggaaactcacggattacgtaacaatacttccttttggtttccgctacattacagaatttcacggatcgcgtaaccatgctttcttttgattttcggcgcgtctcgggacttcacatattgtgcaacaaagggtgctaagtactttgaagcgatcaatcaaaggctcagctcgcccaggcgagctaacctgccaatttttttttctttttatttttttattttttttaggggaaacataaccatgcccccccccttacaggttagcgtttgcctactcgaacctacttaagttagaatcaggcatcgattacttatttaacacaaacaatagtaataaatactgtgaattcaaaggatactgggctaccttgcaacgactttctctgcttgtccagcgccgggaagggacaacgatcgatcagttgtgaccctatcccccatttgcatccgtccctaagtacctgcaagtaggaaacaaaaaatgtgtggccaatcgtgaccgggtcatcgtcttacctttgttgatttttgtcgtcaacttgtctcgacttctgaccatggcctaagacgattctgcccctattaccacaagatatgcatgtgtacgtgcatgcatgaatgtttttaatgcaatgattttcttagtgaaggctggttaggttcagttttaatttaagcgtttggggcaccccatgaaccgagcgaagagggctcaggttattacaaactaacacaaggtttaaaaccaaagtgaggactgaagcctcatccatctcctcatcttttaaagcaacgagacaattacagcgaatgggaatccctagaggaaaccaagaagaacaaaaaaactcaaaaataaaagaacatgcaacggtcctctcaattgccctagacttcaagcgtaatatcgcttaacgacatcggagttcacgggcgagggtagctc

SEQ ID NO: 7747 - DNA, 1061 bp, Glycine max
  Gm_smallRNAprecursor_580
aacaacgtggatgatcttggagatgacaaagagggatgaataggtgctgtgggtgcttcagatggtccgtggcgacgatgggcaatagcagcagcggtggaggatgatccctttctcttcttcgatggttctgccatttgatgaagttttagtggatttcaatcagtggaagtgaaagaggagtgaaagagaggaagattgggctttacgggacgtgttttggtgaagatttgagtaagatacgaaggtttgaagatttagggatggaggaggcacgaggagaggccttggctgtgcagcaacactggtttcgtgggtatttatagacgaggacgagttgtaatcgattacaaggcttggtaatcgattacaggagtaataagccttctggtaatcgattacaggatgttgtaatcgattacaggctgcctgttcttgtgtaatcgattacactggatggtaatcgattaccagagcataaactaggctagtttctaaaaaattacctatgtctatgctaaatacatctaatattattaattatcactactaatgcacttaattcaagcattcaaatataaaacacacaggaattcataaattctatcataataacaagaatttaaacaaaatcaatcaaagtaacatacttaacataaacaatcaatcataagagtaaattaatcaatcaatccttatttttctaaatcactaacatctaagaggcctaattcccttctaatagagataaatgcttctttggggagaggttttgtgaaaatatcagcaagttgattcttagtatcaacaaactctaatacacaatctccctttaggacatgatctctaagaaaatggtgcctaatttctatatgtttagttctagagtgttgaactggattcttggagagattaattgcacttgtattatcacatctaataggtatatggtcaagaaggattccataatcagaaagttgttgcttcatccataagatttgagcacaacaactgccggcagaaatatattccgcttctgcagtggataaagcaacactatt

SEQ ID NO: 7748 - DNA, 1043 bp, Glycine max
  Gm_smallRNAprecursor_581
atatttgatcgagatattgtctgtttaggtgcttaatggatcatcacaatcaaggttatcaaactcgagagtttacgcagactcatgagagttccataaactcgactcgtagactcataagagtctacttcatataaaaataataacaaaatatctataaataacatactaattaaacatttcaacaatataataattcaaaactgtaaatcataaagttcaaaatatttaaataaccaagtctagtaataatacagcactactagacaataacttgtagaggttatagtagtgatagatcattctcatcgagggtttgatgttattaaagaataagagtttgttattattaaaggtgagaattttgtatttgagaataacactgtaaatgaaggtacgttgaatgctaaacagacagaaaacagtctaaaatgacttacattttggtctaatttttttaacttgctaactcgttgacttggtggtaaactcgagagtctaccgagtttacttagagtttacccagagtctactaaaaaaagagtttactcaagagtcaactcgcagaggacaagtggactcctaaactagtaagagttagcgagttaactcgagagtttgataactatgatcgcaattttttcattagtaaaaggcacctaagagagctagggtgtttataaacgacacttggccttgactcctaagcaatgtgaaactttatggttatcggaacaagcccctcggtcgaggctaaaggacgagagtggcttaggccttccttctagccccaatgttccaacctcaagtccatttccatctttagggtccctgtatctgagatattgcttgattaggtgctcggtcgaccatcacagttttgccttagtaaaaggcttcttgatgggttgaaaggagagggtgttcataaatgatccttggtctcaactcctaagcgatgtgattctttggacataccagatcatatatgaaccaaggatctgttcacttttgagggatatataatcatatatactttccta

SEQ ID NO: 7749 - DNA, 1200 bp, Glycine max
  Gm_smallRNAprecursor_582
ttgttcatcagcaacacaatgtacaaccaccagtcggtgtactcgaggttggcatgaccttcgatgacaaatcacaatgtattcgagcaatcaaagaatacaacatcagaaatccttttgattgcagaacaatttactctgaccaaagaaggctacacttcgtctgcaagttacatgaaaatggttgtacatggagcttgggcacatgcaattcaaagaggcataacaaatggattatcaagagtatcagaggtcatcacacttgtctcgtgccaatgctcagacaagatcatcgccaactcgacaaacacgtcatagcacagatcatccaaccaattgtcaaaacaaacccaactgtctccatcaagacattgattgcagagatcaaaacgttcatgaattataccccatcctacaagaagacatggttagcaaagcaaaaagcattggagatgattcatggaaactgggaagaatcatatgccaaattgccaaaacttttcggagctttgcaatcttgtgttcccgggactgtggtcgctgctcaaacagaatccttgtatgaggggggagaaatagtatcgggcaaaagattgtttaaacgtgtcttttggtcatttggtccatgcattaatggttttgcatattgcaaacccattgtacaagtagatggtacatgactttacggaaagtatactggcacactgttgatagctaccgcacaagatggagctaaccatatcttcccgattgcctatgccattgtagaaggggagacaacttcagcttgggggttttttctaaagaatttgagaagacatgttcaccgcaaattaacatttctcttatttcagaccgacacccctcaattataagtgcctacaacaacccaagtaacttatgggtccaggacacatcccatttcttttgtctgcgccacattgcacaaaactttcttcgtggtaactcaaactgcaaacatttaaagaaaccacttatgttggctggtgagaatctattttatttattcgttataattttctttcaatcaaattttataacataatacattgattaaatatttacagggtacgcatacacggagaagatgcactggcgacatcttggggatattcgtgcgaataagccaagtgcagctgaatggcttgatcaattatccaaacaaaaatgggtacaatg

SEQ ID NO: 7750 - DNA, 1113 bp, Glycine max
  Gm_smallRNAprecursor_583
ggaaatttggtcagacccatgtcttgaagggcctgaagggtttcaattggccaagcatagtcggccgatgtttgtttggcggttgccggtttgggagattcctgagtggatggctcaggtttgattgaggcaatctgggttgatgacccttctaaattggttttctgggtagatgacccagcctgggttggtgacccagaagaggtagatgatttcttcatggttggttctggaagagccagcctggctcctttgcctgtactccttcctccccgtagggagattcccgatgccttaggaggcattaccacttttctgtaagaattcacgggtaaggtagtcaggtagtgaatttgaggtgcccttgatgtattctatgtcaaaatcaaagacacttaaaattgcttgccatcgtgcaaaaatttgttttgaggcaaggttttttacatctttttgtaaaatatctttggctgatttacaatcaaccctgattaaaaatttttggtttaataaatccgattgaaatttggaaatgcacaaaacaattgctaaaacttcttttttaacagttgaatattttaattgtgcaggattccaatgttttgatgtatatgcaatgacatgatcttggccatggactctttgtttgaggatgccaccataacctatgtctgaagcatcagtttcgacaattttaaatgcctgtggaataggaagatacagacatttaatggattggactttgactttgatttctttaaccgtttgtgtatggaggtcagaccaaggaggcggatttttcttcagcctatcatgtaatggcttgacaatattatttaaataggggacaaattctcctacgtaatttagacaacctagaaatctttgtaactgagttttgtctaagatttggttggggaatttgctagcaaactctattgacctttcgattggaatgattgtaccttgatatatattgtgaccaaggaatcgaattcgagtttggaaaagattgatttttgatttggagactgccaaaccattttgtttgatgatatgtatgaaggtttggagatgtttgaaatgttggtcaatgttttgggaaaacatcat

SEQ ID NO: 7751 - DNA, 1113 bp, Glycine max; identical to SEQ ID NO: 7750
  Gm_smallRNAprecursor_584

SEQ ID NO: 7752 - DNA, 1114 bp, Glycine max
  Gm_smallRNAprecursor_585
ggaaatttggtcagacccatgtcttgaagggcctgaagggtttcaattggccaagcatagtcggccgatgtttgtttggcggttgccggtttgggagattcctgagtggatggctcaggtttgattgaggcaatctgggttgatgacccttctaaattggttttctgggtagatgacccagcctgggttggtgacccagaagaggtagatgatttcttcatggttggttctggaagagccagcctggctcctttgcctgtactccttcctccccgtagggagattcccgatgccttaggaggcattaccacttttctgtaagaattcacgggtaaggtagtcaggtagtgaatttgaggtgcccttgatgtattctatgtcaaaatcaaagacacttaaaattgcttgccatcgtgcaaaaatttgttttgaggcaaggttttttacatctttttgtaaaatatctttggctgatttacaatcaaccctgattaaaaatttttggtttaataaatccgattgaaatttggaaatgcacaaaacaattgctaaaacttcttttttaacagttgaatattttaattgtgcaggattccaatgttttgatgtatatgcaatgacatgatcttggccatggactctttgtttgaggatgccaccataacctatgtctgaagcatcagtttcgacaattttaaatgcctgtggaataggaagatacagacatttaatggattggactttgactttgatttctttaaccgtttgtgtatggaggtcagaccaaggaggcggatttttcttcagcctatcatgtaatggcttgacaatattatttaaataggggacaaattctcctacgtaatttagacaacctagaaatctttgtaactgagttttgtctaagatttggttggggaatttgctagcaaactctattgacctttcgattggaatgattgtaccttgatatatattgtgaccaaggaatcgaattcgagtttggaaaagattgatttttgatttggagactgccaaaccattttgtttgatgatatgtatgaaggtttggagatgtttgaaatgttggtcaatgttttgggaaaacatcatc

SEQ ID NO: 7753 - DNA, 1207 bp, Glycine max
  Gm_smallRNAprecursor_586
ggaaatttggtcagacccatgtcttgaagggcctgaagggtttcaattggccaagcatagtcggccgatgtttgtttggcggttgccggtttgggagattcctgagtggatggctcaggtttgattgaggcaatctgggttgatgacccttctaaattggttttctgggtagatgacccagcctgggttggtgacccagaagaggtagatgatttcttcatggttggttctggaagagccagcctggctcctttgcctgtactccttcctccccgtagggagattcccgatgccttaggaggcattaccacttttctgtaagaattcacgggtaaggtagtcaggtagtgaatttgaggtgcccttgatgtattctatgtcaaaatcaaagacacttaaaattgcttgccatcgtgcaaaaatttgttttgaggcaaggttttttacatctttttgtaaaatatctttggctgatttacaatcaaccctgattaaaaatttttggtttaataaatccgattgaaatttggaaatgcacaaaacaattgctaaaacttcttttttaacagttgaatattttaattgtgcaggattccaatgttttgatgtatatgcaatgacatgatcttggccatggactctttgtttgaggatgccaccataacctatgtctgaagcatcagtttcgacaattttaaatgcctgtggaataggaagatacagacatttaatggattggactttgactttgatttctttaaccgtttgtgtatggaggtcagaccaaggaggcggatttttcttcagcctatcatgtaatggcttgacaatattatttaaataggggacaaattctcctacgtaatttagacaacctagaaatctttgtaactgagttttgtctaagatttggttggggaatttgctagcaaactctattgacctttcgattggaatgattgtaccttgatatatattgtgaccaaggaatcgaattcgagtttggaaaagattgatttttgatttggagactgccaaaccattttgtttgatgatatgtatgaaggtttggagatgtttgaaatgttggtcaatgttttgggaaaacatcatctatgtagacaatgacaaattttgaataaggattaaaaatatcattcataattttttgaaattctgaaggggcattcttcagcccgaatggcat

SEQ ID NO: 7754 - DNA, 1035 bp, Glycine max
  Gm_smallRNAprecursor_587
gcggttgccggtttgggagattcctgagtggatggctcaggtttgattgaggcaatctgggttgatgacccttctaaattggttttctgggtagatgacccagcctgggttggtgacccagaagaggtagatgatttcttcatggttggttctggaagagccagcctggctcctttgcctgtactccttcctccccgtagggagattcccgatgccttaggaggcattaccacttttctgtaagaattcacgggtaaggtagtcaggtagtgaatttgaggtgcccttgatgtattctatgtcaaaatcaaagacacttaaaattgcttgccatcgtgcaaaaatttgttttgaggcaaggttttttacatctttttgtaaaatatctttggctgatttacaatcaaccctgattaaaaatttttggtttaataaatccgattgaaatttggaaatgcacaaaacaattgctaaaacttcttttttaacagttgaatattttaattgtgcaggattccaatgttttgatgtatatgcaatgacatgatcttggccatggactctttgtttgaggatgccaccataacctatgtctgaagcatcagtttcgacaattttaaatgcctgtggaataggaagatacagacatttaatggattggactttgactttgatttctttaaccgtttgtgtatggaggtcagaccaaggaggcggatttttcttcagcctatcatgtaatggcttgacaatattatttaaataggggacaaattctcctacgtaatttagacaacctagaaatctttgtaactgagttttgtctaagatttggttggggaatttgctagcaaactctattgacctttcgattggaatgattgtaccttgatatatattgtgaccaaggaatcgaattcgagtttggaaaagattgatttttgatttggagactgccaaaccattttgtttgatgatatgtatgaaggtttggagatgtttgaaatgttggtcaatgttttgggaaaacatcat

SEQ ID NO: 7755 - DNA, 1247 bp, Glycine max
  Gm_smallRNAprecursor_588
agatgatttcttcatggttggttctggaagagccagcctggctcctttgcctgtactccttcctccccgtagggagattcccgatgccttaggaggcattaccacttttctgtaagaattcacgggtaaggtagtcaggtagtgaatttgaggtgcccttgatgtattctatgtcaaaatcaaagacacttaaaattgcttgccatcgtgcaaaaatttgttttgaggcaaggttttttacatctttttgtaaaatatctttggctgatttacaatcaaccctgattaaaaatttttggtttaataaatccgattgaaatttggaaatgcacaaaacaattgctaaaacttcttttttaacagttgaatattttaattgtgcaggattccaatgttttgatgtatatgcaatgacatgatcttggccatggactctttgtttgaggatgccaccataacctatgtctgaagcatcagtttcgacaattttaaatgcctgtggaataggaagatacagacatttaatggattggactttgactttgatttctttaaccgtttgtgtatggaggtcagaccaaggaggcggatttttcttcagcctatcatgtaatggcttgacaatattatttaaataggggacaaattctcctacgtaatttagacaacctagaaatctttgtaactgagttttgtctaagatttggttggggaatttgctagcaaactctattgacctttcgattggaatgattgtaccttgatatatattgtgaccaaggaatcgaattcgagtttggaaaagattgatttttgatttggagactgccaaaccattttgtttgatgatatgtatgaaggtttggagatgtttgaaatgttggtcaatgttttgggaaaacatcatctatgtagacaatgacaaattttgaataaggattaaaaatatcattcataattttttgaaattctgaaggggcattcttcagcccgaatggcatcacgttccattcatattgcccgaaaggtacagtaaacgctgttttgtacctgtctgattcttggatttggatttgccaaaatccagatttcatatcaaattttgaaaatatcttcgcagaatttaatctgttaagcaaatcttttttgtttggaataggatatctaatccattgtaatgcttgatttaatggtttgtaatttatgactaagcggggtgttccacgctcaatctccgattgtttgtt

SEQ ID NO: 7756 - DNA, 1246 bp, Glycine max
  Gm_smallRNAprecursor_589
gatgatttcttcatggttggttctggaagagccagcctggctcctttgcctgtactccttcctccccgtagggagattcccgatgccttaggaggcattaccacttttctgtaagaattcacgggtaaggtagtcaggtagtgaatttgaggtgcccttgatgtattctatgtcaaaatcaaagacacttaaaattgcttgccatcgtgcaaaaatttgttttgaggcaaggttttttacatctttttgtaaaatatctttggctgatttacaatcaaccctgattaaaaatttttggtttaataaatccgattgaaatttggaaatgcacaaaacaattgctaaaacttcttttttaacagttgaatattttaattgtgcaggattccaatgttttgatgtatatgcaatgacatgatcttggccatggactctttgtttgaggatgccaccataacctatgtctgaagcatcagtttcgacaattttaaatgcctgtggaataggaagatacagacatttaatggattggactttgactttgatttctttaaccgtttgtgtatggaggtcagaccaaggaggcggatttttcttcagcctatcatgtaatggcttgacaatattatttaaataggggacaaattctcctacgtaatttagacaacctagaaatctttgtaactgagttttgtctaagatttggttggggaatttgctagcaaactctattgacctttcgattggaatgattgtaccttgatatatattgtgaccaaggaatcgaattcgagtttggaaaagattgatttttgatttggagactgccaaaccattttgtttgatgatatgtatgaaggtttggagatgtttgaaatgttggtcaatgttttgggaaaacatcatctatgtagacaatgacaaattttgaataaggattaaaaatatcattcataattttttgaaattctgaaggggcattcttcagcccgaatggcatcacgttccattcatattgcccgaaaggtacagtaaacgctgttttgtacctgtctgattcttggatttggatttgccaaaatccagatttcatatcaaattttgaaaatatcttcgcagaatttaatctgttaagcaaatcttttttgtttggaataggatatctaatccattgtaatgcttgatttaatggtttgtaatttatgactaagcggggtgttccacgctcaatctccgattgtttgtt

SEQ ID NO: 7757 - DNA, 1031 bp, Glycine max
  Gm_smallRNAprecursor_590
ctttttgtaaaatatctttggctgatttacaatcaaccctgattaaaaatttttggtttaataaatccgattgaaatttggaaatgcacaaaacaattgctaaaacttcttttttaacagttgaatattttaattgtgcaggattccaatgttttgatgtatatgcaatgacatgatcttggccatggactctttgtttgaggatgccaccataacctatgtctgaagcatcagtttcgacaattttaaatgcctgtggaataggaagatacagacatttaatggattggactttgactttgatttctttaaccgtttgtgtatggaggtcagaccaaggaggcggatttttcttcagcctatcatgtaatggcttgacaatattatttaaataggggacaaattctcctacgtaatttagacaacctagaaatctttgtaactgagttttgtctaagatttggttggggaatttgctagcaaactctattgacctttcgattggaatgattgtaccttgatatatattgtgaccaaggaatcgaattcgagtttggaaaagattgatttttgatttggagactgccaaaccattttgtttgatgatatgtatgaaggtttggagatgtttgaaatgttggtcaatgttttgggaaaacatcatctatgtagacaatgacaaattttgaataaggattaaaaatatcattcataattttttgaaattctgaaggggcattcttcagcccgaatggcatcacgttccattcatattgcccgaaaggtacagtaaacgctgttttgtacctgtctgattcttggatttggatttgccaaaatccagatttcatatcaaattttgaaaatatcttcgcagaatttaatctgttaagcaaatcttttttgtttggaataggatatctaatccattgtaatgcttgatttaatggtttgtaatttatgactaagcggggtgttccacgctcaatctccgattgtttgttaacataaaaagccgcacaagaccatgg

SEQ ID NO: 7758 - DNA, 1226 bp, Glycine max
  Gm_smallRNAprecursor_591
aatcaaccctgattaaaaatttttggtttaataaatccgattgaaatttggaaatgcacaaaacaattgctaaaacttcttttttaacagttgaatattttaattgtgcaggattccaatgttttgatgtatatgcaatgacatgatcttggccatggactctttgtttgaggatgccaccataacctatgtctgaagcatcagtttcgacaattttaaatgcctgtggaataggaagatacagacatttaatggattggactttgactttgatttctttaaccgtttgtgtatggaggtcagaccaaggaggcggatttttcttcagcctatcatgtaatggcttgacaatattatttaaataggggacaaattctcctacgtaatttagacaacctagaaatctttgtaactgagttttgtctaagatttggttggggaatttgctagcaaactctattgacctttcgattggaatgattgtaccttgatatatattgtgaccaaggaatcgaattcgagtttggaaaagattgatttttgatttggagactgccaaaccattttgtttgatgatatgtatgaaggtttggagatgtttgaaatgttggtcaatgttttgggaaaacatcatctatgtagacaatgacaaattttgaataaggattaaaaatatcattcataattttttgaaattctgaaggggcattcttcagcccgaatggcatcacgttccattcatattgcccgaaaggtacagtaaacgctgttttgtacctgtctgattcttggatttggatttgccaaaatccagatttcatatcaaattttgaaaatatcttcgcagaatttaatctgttaagcaaatcttttttgtttggaataggatatctaatccattgtaatgcttgatttaatggtttgtaatttatgactaagcggggtgttccacgctcaatctccgattgtttgttaacataaaaagccgcacaagaccatgggcttttgcttttccggattaggcctttatcaagcaaatccttgatttccttttgacagtattgaagaagttcttcattcatttggattggtctggcttttgtgggaatttgtttttccctaaagtctttctcataagggagatcgacaatatgtttctttctgtcccaaaatgcatgtggcaattcagaacaaacggttgattcaatatgatttaataaagattg

SEQ ID NO: 7759 - DNA, 1061 bp, Glycine max
  Gm_smallRNAprecursor_592
gacaatattatttaaataggggacaaattctcctacgtaatttagacaacctagaaatctttgtaactgagttttgtctaagatttggttggggaatttgctagcaaactctattgacctttcgattggaatgattgtaccttgatatatattgtgaccaaggaatcgaattcgagtttggaaaagattgatttttgatttggagactgccaaaccattttgtttgatgatatgtatgaaggtttggagatgtttgaaatgttggtcaatgttttgggaaaacatcatctatgtagacaatgacaaattttgaataaggattaaaaatatcattcataattttttgaaattctgaaggggcattcttcagcccgaatggcatcacgttccattcatattgcccgaaaggtacagtaaacgctgttttgtacctgtctgattcttggatttggatttgccaaaatccagatttcatatcaaattttgaaaatatcttcgcagaatttaatctgttaagcaaatcttttttgtttggaataggatatctaatccattgtaatgcttgatttaatggtttgtaatttatgactaagcggggtgttccacgctcaatctccgattgtttgttaacataaaaagccgcacaagaccatgggcttttgcttttccggattaggcctttatcaagcaaatccttgatttccttttgacagtattgaagaagttcttcattcatttggattggtctggcttttgtgggaatttgtttttccctaaagtctttctcataagggagatcgacaatatgtttctttctgtcccaaaatgcatgtggcaattcagaacaaacggttgattcaatatgatttaataaagattgaattctttcttttacttgggttttcccagttgtatctgaatattattaaaagatacttcttcttttaagaagttaatttgattaatcttattttctataagatttatatttctggaaattggtttagtagaaaaattaaataaaatttttcttcctaaataattagtggttattccttcat

SEQ ID NO: 7760 - DNA, 1127 bp, Glycine max
  Gm_smallRNAprecursor_593
taaataggggacaaattctcctacgtaatttagacaacctagaaatctttgtaactgagttttgtctaagatttggttggggaatttgctagcaaactctattgacctttcgattggaatgattgtaccttgatatatattgtgaccaaggaatcgaattcgagtttggaaaagattgatttttgatttggagactgccaaaccattttgtttgatgatatgtatgaaggtttggagatgtttgaaatgttggtcaatgttttgggaaaacatcatctatgtagacaatgacaaattttgaataaggattaaaaatatcattcataattttttgaaattctgaaggggcattcttcagcccgaatggcatcacgttccattcatattgcccgaaaggtacagtaaacgctgttttgtacctgtctgattcttggatttggatttgccaaaatccagatttcatatcaaattttgaaaatatcttcgcagaatttaatctgttaagcaaatcttttttgtttggaataggatatctaatccattgtaatgcttgatttaatggtttgtaatttatgactaagcggggtgttccacgctcaatctccgattgtttgttaacataaaaagccgcacaagaccatgggcttttgcttttccggattaggcctttatcaagcaaatccttgatttccttttgacagtattgaagaagttcttcattcatttggattggtctggcttttgtgggaatttgtttttccctaaagtctttctcataagggagatcgacaatatgtttctttctgtcccaaaatgcatgtggcaattcagaacaaacggttgattcaatatgatttaataaagattgaattctttcttttacttgggttttcccagttgtatctgaatattattaaaagatacttcttcttttaagaagttaatttgattaatcttattttctataagatttatatttctggaaattggtttagtagaaaaattaaataaaatttttcttcctaaataattagtggttattccttcattagatatttggatgggaaacagggctctaatgaagggccttcctaagattacttcattcttaaggttttttaccagaa

SEQ ID NO: 7761 - DNA, 1159 bp, Glycine max
  Gm_smallRNAprecursor_594
acccatctttcgggaagagttacttcatcccattttatttttctcgggagagacacgttagcctttgtcatatcagtgataaacaaggttgtttctcctttttgaggttttaacaggactctagatgcacaagtattcatgaccttgtactggatcctataaattaaggctgctgggattgatccttctttcatgtcaaggccatgaaagtggatgtttaagaacagagagtcaaaaatgtttctgtccatcagactcactgttttgtttggataacaattaaaatatattggaccttgtcctaggctggtttcgactgttccaattagggagtcttcaaattgattatgcctaatatctcttagacacattaaaactgctgcatctatgcccatatcaattaagggcttgatggctacttgtacacaaccgatgtgtaaatatttatacttacggcaatgctcataaattgaattttttgaaagtagatgaaattcttcccctatatcttgtcctagaggaatattgttttctactgttttgattatgtaatcaaagttgtgtttgtctttaattgtttcaggaacgtatagttgatcctgagggatttctggaatgttccagtcatccatgttttgattaatatcttcgaatcggacttcctcatcgaagagattgtgttttggggcgacctcttgggtctggttatcttgatcatttaagagattggtgtttcttgaagaagatgaagaggaggaattcgagcgaaaagaaatacgggaaaaggatcgcaataatctagacataattaaaacattctctaatatctttgccttcatttggttccataggaatctttccataaggctatatgttacagaacttcttggatctgaataaatggaaaagaagattttttttttttttaatacagacaatatagtttgaacattactcctatagccaccagtatattatgtctcaatattttatttgaacaatacaccttagccttactgccctttctcatccacgggacttactgctacagtatcattcaactaaaatatcagactgctgtgcttccagaaaatactgttcaaacacatactgtttaaattaaaattactgtacatgcttcagatccataagttcagtt

SEQ ID NO: 7762 - DNA, 1224 bp, Glycine max
  Gm_smallRNAprecursor_595
gcaatgctcataaattgaattttttgaaagtagatgaaattcttcccctatatcttgtcctagaggaatattgttttctactgttttgattatgtaatcaaagttgtgtttgtctttaattgtttcaggaacgtatagttgatcctgagggatttctggaatgttccagtcatccatgttttgattaatatcttcgaatcggacttcctcatcgaagagattgtgttttggggcgacctcttgggtctggttatcttgatcatttaagagattggtgtttcttgaagaagatgaagaggaggaattcgagcgaaaagaaatacgggaaaaggatcgcaataatctagacataattaaaacattctctaatatctttgccttcatttggttccataggaatctttccataaggctatatgttacagaacttcttggatctgaataaatggaaaagaagattttttttttttttaatacagacaatatagtttgaacattactcctatagccaccagtatattatgtctcaatattttatttgaacaatacaccttagccttactgccctttctcatccacgggacttactgctacagtatcattcaactaaaatatcagactgctgtgcttccagaaaatactgttcaaacacatactgtttaaattaaaattactgtacatgcttcagatccataagttcagttaacatatgcccttacggacactattcctacttccccatcaggctctgataccagaggtcagcggagtaggatctaacggacagataggaagtaagaatgcagtatgatgaatgaaatgaaaatataaatttgaaaacagatatcaaggtcacaccggagaccggcttacaaaacccaggttttcataaacaaagaaaccgaagcgacggcagagccgcacaggatcggtgaagggagaagagagaaagatgaaaaatagaaatttatatatatatatatatatattgtgctgttagcttagtgcgatagctaggtcccttaacttacagacctatttgtttgcttagtgataagtatgtaaatctattaatccttttttgtgatatgtctattaattcataagtttattggtttatctaataaaagattcattagtctatttaaatcctaaatattaagctaaaaatttaagtatgtaaatctattaatccgtttttgtgatatgtctattaatccataa

SEQ ID NO: 7763 - DNA, 1092 bp, Glycine max
  Gm_smallRNAprecursor_596
ggaaaatgatcaatagacacccaaaactataaacctcccaatgttgttaatggcggatggcggttcatggaggaaagtaaaaaattcgtcataaaaatatggcggatggcgtagtgaaaaatgacggatgttatggcggacaaaaaaaataaaaaataaataaataaataaatatatatatatatatatatatatatatatatatatatatatatatatatatatatatatatataaattcattgaaattgaaaaaaataaaggattgcattcaaataaactaaaaaagtttcatgagttcatataataatcaagtaccaacaccaaataaactcattaaagagttcaaaataagaaaatgataaaaatataatgaaaagtgcaaagtgaaggttgaggctctaatcatcttctccaattccaacataatcattttcgttgttatcatatggtaatggagcatctccctctccctcttccccatcagacgcctcaaaattgaccatgatttcttcttcttcagattcaacatcaatattctcctcaacatctagatcctcatcattttcttggattgctttttgcttccttgatgaagatccaacaaccattgcctgtgttttagaagtttgggcagcagcaacacttgttttttgctttttccgcctagtatacatcctacactctccaacccctgaagcctgatacacagttgcccaatttagagtatcatcatcttcaaataccaaatcatttccagcatcattatcatcttcttgatccatctcccacgagccattcattgcatacatcaatatcattaagagaaattggatcaatttcatctcttgcattatatctttgcttcaattgttggttgtatttgacaaacaccaaatcatgcaacctcttgtgctcaagcctatttctttttttggaatgaatctacaacataacaaataaatgttgatttcaattgcaaatatactcaaaataaaacttgatcatcaaaattaaataaaattaaaaagtatagttagagttttgtcacaattacttgctcaaacacactccaatttctttcacatcatg

SEQ ID NO: 7764 - DNA, 1035 bp, Glycine max
  Gm_smallRNAprecursor_597
aatgtagccgtctttgcattttctgggtcaacaaacatctttgtctttcgcctataccagaccatgtagtccgagttaaagctcaataggccttcttgtcggggataagcgtcgaccctaaatgcatggcgattattccactaatgaatcattggggcgaacaattgcccccaattttcgtcatgtttcccttttaatgttatgccatgaatgtttaagggttgtgaaggagactctggaactggttgctgcatcccaaattgtctcaacactctgtccggttggtgccactcaataacttggaaacaaattagtggcaccaccgcgtaccacgcgagacttccgactaaacaaacgggaggcaacaatgatataactgttgatgggtaaagctcctacacaaactgcatataacaacatagttgtgaacattgtagtaaaataagacatataattttttattttacaaatacaatagcatggttcttacctcatgaagtttcataatatccaacttgcgacgaaaaactttcacatcatcattgccgatatgttggtttccacgtcgcagccacctacaaagaataaaatttaatataccctaaaaccatttattctattgaaatgaaagacgctgttaaaaatgactgacctgtgcgccagtggtgtattttctacttgggaaggagtcatctttggagccaaggttggacatcgttcccatgcccacaattgtagtaagatgcacatacctccgattgatttagttttataatcggtggcactgcacatctctctgtatagaaaaccaagtacggcagctccccatgcatatctgccacattcttcaaagtcacgtaaaaattgaaggtactttagcgaaactctgttactggttttgtcaatgaataagacacctccaatgaatctcagtatccatgcacgggcaaaccttcgtacttgttcttcgtcgtcgtcattatttatttgtgcaaaatggtgagccagccaacttaatttaaccacattaccttt

SEQ ID NO: 7765 - DNA, 1079 bp, Glycine max
  Gm_smallRNAprecursor_598
aattttaatttggaacagttaattacagagaaacttatctcgttagaattgaaataaaaaattgaaaaagaaaaggtttagtcatcctaactttctaaaagagacacaatgccatgagaaccttaacccccaattgacaaccttctcacatcctcacggcctccccgccaaatacgccatgcgcttcgtggtaccgggtggcaattgttagtaaatatttattttataatttaaaatttataaatatatattatttatattaattttactttataaaataaaatatttattttaaaatctgttatgtaaaattagattttttttaattttttaagattttgttttaatgggtcaatgcaatttaatacgtttgttttgataccagtaaattagtttctaacggttaacagtcatatttttgttgttgcataaaagggtctatgcctatatatatatatatatatatatatatatcagagcctgatggggaaagtaggaatagtgtccgtaagggcatatgttaactgaacttatggatctgaaccatgtacagtaattttaatttaaatagtatgtgtttgaacagtattttctggaagcacagcagtctgatattttagttgaatgatactgtagcagtaagtcccgtggttgagaaaggacagtaaggctaaggtgtattgttcaaataaaatattgagacataatatactggtgactataggagtaatgttcaaactatattgtctgttgtaaaacaaaaaaatctttttcatttattcagatccaagaagttctgtaacatatagccttatggaaatatttctatgaaaccaaatgaaggcaaagatattagagaatgaaataatcatgtctagactattacgatctttttcccgtatctcttttcgatcaaattcctcctcatcatcttcttcaagaaactccaatttattaaatgatcaagataaccagacccaagaggtcgcccatctcttcgatgaggaagtccgattcgaagatatcaatcaaaacatggatgactggaacattccagaaatgcctcaggatcaactata

SEQ ID NO: 7766 - DNA, 1080 bp, Glycine max
  Gm_smallRNAprecursor_599
aattttaatttggaacagttaattacagagaaacttatctcgttagaattgaaataaaaaattgaaaaagaaaaggtttagtcatcctaactttctaaaagagacacaatgccatgagaaccttaacccccaattgacaaccttctcacatcctcacggcctccccgccaaatacgccatgcgcttcgtggtaccgggtggcaattgttagtaaatatttattttataatttaaaatttataaatatatattatttatattaattttactttataaaataaaatatttattttaaaatctgttatgtaaaattagattttttttaattttttaagattttgttttaatgggtcaatgcaatttaatacgtttgttttgataccagtaaattagtttctaacggttaacagtcatatttttgttgttgcataaaagggtctatgcctatatatatatatatatatatatatatatcagagcctgatggggaaagtaggaatagtgtccgtaagggcatatgttaactgaacttatggatctgaaccatgtacagtaattttaatttaaatagtatgtgtttgaacagtattttctggaagcacagcagtctgatattttagttgaatgatactgtagcagtaagtcccgtggttgagaaaggacagtaaggctaaggtgtattgttcaaataaaatattgagacataatatactggtgactataggagtaatgttcaaactatattgtctgttgtaaaacaaaaaaatctttttcatttattcagatccaagaagttctgtaacatatagccttatggaaatatttctatgaaaccaaatgaaggcaaagatattagagaatgaaataatcatgtctagactattacgatctttttcccgtatctcttttcgatcaaattcctcctcatcatcttcttcaagaaactccaatttattaaatgatcaagataaccagacccaagaggtcgcccatctcttcgatgaggaagtccgattcgaagatatcaatcaaaacatggatgactggaacattccagaaatgcctcaggatcaactatac

SEQ ID NO: 7767 - DNA, 1080 bp, Glycine max
  Gm_smallRNAprecursor_600
tgatttcgttttagaaacaatggccctatttgacacaggggctgattcaaactgcattttagaaggattaattcctacaaaattctttgagaaaacctcagaaaaattaagtacggcaaacggctcaaaattaaaaattaattttaagctatcaaatgcaatcattgaaaaccaaggtcttaagattaacacaaactttcttctggtaaaaaaccttaagaatgaagtaatcttaggaacgcccttcattagagccctgtttcccatccaaatatctaatgaaggaataaccacaaattatttaggaagaaaaattatatttaatttttctactaaaccaatttccagaaatataaatcttatagaaaataagattaatcaaattaacttcttaaaagaagaagtatcttttaataatattcagatacaactgggaaaaccccaagtaaaagaaaaaaattcaatctttattaaatcatattgaatcgaccgtctgttttgaattgccacatgcattttgggacataaagaaacatattgttgatctcccttatgagaaagactttaggaaaaaacaaattcccacaaaagccagaccaatccaaatgaatgaagaacttcttcaatactgtcaaaaggaaatcaaggatttgcttgataaaggcctaatccggaaaagcaaaagcccatggtcttgtgcggctttttatgtcaataaacaatctgagattgagcgtggaacaccccgcttagtcataaattacaaaccactaaatcaagcattacaatggattagatatcctattccaaacaaaaaagatttgcttaatagattaaattctgcaaagatattttcaaaatttgatatgaaatctggattttggcaaatccaaatccaagaatcagataggtacaaaacagcgtttactgtaccttttgggcaatatgaatggaacgtgatgccattcggactggagaatgccccttcagaatttcaaaaaattatgaacgatatttttaatccctattcaaaatttgtcattgtctacatagatgatgttttaatcttttcccaaaaca

SEQ ID NO: 7768 - DNA, 1234 bp, Glycine max
  Gm_smallRNAprecursor_601
acataaagaaacatattgttgatctcccttatgagaaagactttaggaaaaaacaaattcccacaaaagccagaccaatccaaatgaatgaagaacttcttcaatactgtcaaaaggaaatcaaggatttgcttgataaaggcctaatccggaaaagcaaaagcccatggtcttgtgcggctttttatgtcaataaacaatctgagattgagcgtggaacaccccgcttagtcataaattacaaaccactaaatcaagcattacaatggattagatatcctattccaaacaaaaaagatttgcttaatagattaaattctgcaaagatattttcaaaatttgatatgaaatctggattttggcaaatccaaatccaagaatcagataggtacaaaacagcgtttactgtaccttttgggcaatatgaatggaacgtgatgccattcggactggagaatgccccttcagaatttcaaaaaattatgaacgatatttttaatccctattcaaaatttgtcattgtctacatagatgatgttttaatcttttcccaaaacattgaccaacatttcaaacatctccaaaccttcatccatatcatcaaacaaaatggtttggcagtctccaaatcaaaaatcaatcttttccaaactcgaattcgattccttggtcacaatatatatcaaggtacaatcattccaatcgaaagatcaatagagtttgctaacaaattccccaaccaaatcttagacaaaacccagttacaaagatttctaggttgtctaaattacgtaggagaatttgtcccctatttaaacaatattgtcaagccattgcatgataggctgaagaaaaatccgcctccttggtctgacctccatacacaaacagttaaagaaatcaaagtcaaagtccaatccattaaatgtatgtatcttcctattccacaggcatttaaaatcgtcgaaactgatgcttcagacataggttatggtggcatcctcaaacaaagagtccatggccaagatcatgtcattgcatatacatcaaaacattggaatcctgcacaattaaaatattcaactgttaaaaaagaagttttagcaattgttttgtgcatttccaaatttcaatcggatttattaaaccaaaaatttctaatcagggttgattgtaaatcaaccaaagatattttacaaaaagatgttaaaaaccttgcctcaaaacaaatttt

SEQ ID NO: 7769 - DNA, 1218 bp, Glycine max
  Gm_smallRNAprecursor_602
ttaatagattaaattctgcaaagatattttcaaaatttgatatgaaatctggattttggcaaatccaaatccaagaatcagataggtacaaaacagcgtttactgtaccttttgggcaatatgaatggaacgtgatgccattcggactggagaatgccccttcagaatttcaaaaaattatgaacgatatttttaatccctattcaaaatttgtcattgtctacatagatgatgttttaatcttttcccaaaacattgaccaacatttcaaacatctccaaaccttcatccatatcatcaaacaaaatggtttggcagtctccaaatcaaaaatcaatcttttccaaactcgaattcgattccttggtcacaatatatatcaaggtacaatcattccaatcgaaagatcaatagagtttgctaacaaattccccaaccaaatcttagacaaaacccagttacaaagatttctaggttgtctaaattacgtaggagaatttgtcccctatttaaacaatattgtcaagccattgcatgataggctgaagaaaaatccgcctccttggtctgacctccatacacaaacagttaaagaaatcaaagtcaaagtccaatccattaaatgtatgtatcttcctattccacaggcatttaaaatcgtcgaaactgatgcttcagacataggttatggtggcatcctcaaacaaagagtccatggccaagatcatgtcattgcatatacatcaaaacattggaatcctgcacaattaaaatattcaactgttaaaaaagaagttttagcaattgttttgtgcatttccaaatttcaatcggatttattaaaccaaaaatttctaatcagggttgattgtaaatcaaccaaagatattttacaaaaagatgttaaaaaccttgcctcaaaacaaatttttgcaagatggcaagcaattctaagtgtctttgattttgacatagaatacatcaagagcacctcaaactcattacctgactaccttacccgtgaattcttacagaaaagtggtaatgccttctaaggcatcaggaatctccctaaggggaggaaggagtacaggcaaaggagccagactggctcttccagagccaaccatcaagaaatcatcaacctcttctgggtcaccaacccaggctgggtcatctacccagaaaaccaatttagaagggtcatcaacccagatt

SEQ ID NO: 7770 - DNA, 1073 bp, Glycine max
  Gm_smallRNAprecursor_603
tgtaccttttgggcaatatgaatggaacgtgatgccattcggactggagaatgccccttcagaatttcaaaaaattatgaacgatatttttaatccctattcaaaatttgtcattgtctacatagatgatgttttaatcttttcccaaaacattgaccaacatttcaaacatctccaaaccttcatccatatcatcaaacaaaatggtttggcagtctccaaatcaaaaatcaatcttttccaaactcgaattcgattccttggtcacaatatatatcaaggtacaatcattccaatcgaaagatcaatagagtttgctaacaaattccccaaccaaatcttagacaaaacccagttacaaagatttctaggttgtctaaattacgtaggagaatttgtcccctatttaaacaatattgtcaagccattgcatgataggctgaagaaaaatccgcctccttggtctgacctccatacacaaacagttaaagaaatcaaagtcaaagtccaatccattaaatgtatgtatcttcctattccacaggcatttaaaatcgtcgaaactgatgcttcagacataggttatggtggcatcctcaaacaaagagtccatggccaagatcatgtcattgcatatacatcaaaacattggaatcctgcacaattaaaatattcaactgttaaaaaagaagttttagcaattgttttgtgcatttccaaatttcaatcggatttattaaaccaaaaatttctaatcagggttgattgtaaatcaaccaaagatattttacaaaaagatgttaaaaaccttgcctcaaaacaaatttttgcaagatggcaagcaattctaagtgtctttgattttgacatagaatacatcaagagcacctcaaactcattacctgactaccttacccgtgaattcttacagaaaagtggtaatgccttctaaggcatcaggaatctccctaaggggaggaaggagtacaggcaaaggagccagactggctcttccagagccaaccatcaagaaatcatcaacctcttctgggtcaccaacccaggctgggtca

SEQ ID NO: 7771 - DNA, 1115 bp, Glycine max
  Gm_smallRNAprecursor_604
tcaatagagtttgctaacaaattccccaaccaaatcttagacaaaacccagttacaaagatttctaggttgtctaaattacgtaggagaatttgtcccctatttaaacaatattgtcaagccattgcatgataggctgaagaaaaatccgcctccttggtctgacctccatacacaaacagttaaagaaatcaaagtcaaagtccaatccattaaatgtatgtatcttcctattccacaggcatttaaaatcgtcgaaactgatgcttcagacataggttatggtggcatcctcaaacaaagagtccatggccaagatcatgtcattgcatatacatcaaaacattggaatcctgcacaattaaaatattcaactgttaaaaaagaagttttagcaattgttttgtgcatttccaaatttcaatcggatttattaaaccaaaaatttctaatcagggttgattgtaaatcaaccaaagatattttacaaaaagatgttaaaaaccttgcctcaaaacaaatttttgcaagatggcaagcaattctaagtgtctttgattttgacatagaatacatcaagagcacctcaaactcattacctgactaccttacccgtgaattcttacagaaaagtggtaatgccttctaaggcatcaggaatctccctaaggggaggaaggagtacaggcaaaggagccagactggctcttccagagccaaccatcaagaaatcatcaacctcttctgggtcaccaacccaggctgggtcatctacccagaaaaccaatttagaagggtcatcaacccagattgcctcaatcaaacctgagtcatccactcaggaatctcccaaaccggcaaccgccaaacaaacatcggccgactatgcatggccaattgaaacccttcaggcccttcaagacatgggtctgaccaaatttccaaaaataatcaaaaaatcttgggcagacattgcctcagaatctgaatcaaatttacaaacaatgatccaaaaatgcgtcaatgaccaaaacagccaccaatactaaaggaaaactacctttagccaaagctcaaacaccacataccaaacaaactaacaattatatttataaa

SEQ ID NO: 7772 - DNA, 1143 bp, Glycine max
  Gm_smallRNAprecursor_605
tccttggtctgacctccatacacaaacagttaaagaaatcaaagtcaaagtccaatccattaaatgtatgtatcttcctattccacaggcatttaaaatcgtcgaaactgatgcttcagacataggttatggtggcatcctcaaacaaagagtccatggccaagatcatgtcattgcatatacatcaaaacattggaatcctgcacaattaaaatattcaactgttaaaaaagaagttttagcaattgttttgtgcatttccaaatttcaatcggatttattaaaccaaaaatttctaatcagggttgattgtaaatcaaccaaagatattttacaaaaagatgttaaaaaccttgcctcaaaacaaatttttgcaagatggcaagcaattctaagtgtctttgattttgacatagaatacatcaagagcacctcaaactcattacctgactaccttacccgtgaattcttacagaaaagtggtaatgccttctaaggcatcaggaatctccctaaggggaggaaggagtacaggcaaaggagccagactggctcttccagagccaaccatcaagaaatcatcaacctcttctgggtcaccaacccaggctgggtcatctacccagaaaaccaatttagaagggtcatcaacccagattgcctcaatcaaacctgagtcatccactcaggaatctcccaaaccggcaaccgccaaacaaacatcggccgactatgcatggccaattgaaacccttcaggcccttcaagacatgggtctgaccaaatttccaaaaataatcaaaaaatcttgggcagacattgcctcagaatctgaatcaaatttacaaacaatgatccaaaaatgcgtcaatgaccaaaacagccaccaatactaaaggaaaactacctttagccaaagctcaaacaccacataccaaacaaactaacaattatatttataaaaataaattgttaactgttttgcagatggaacctgaattttgggacaaaaatcccttcaaggcgatggccaaggctttcccaccaggatttcactacaaaccaaccatcatcctgaagacaagaactttttatgaattgattttggtagattcaaactcagtatctatcaaacatttcaaa

SEQ ID NO: 7773 - DNA, 1247 bp, Glycine max
  Gm_smallRNAprecursor_606
aacccttcaggcccttcaagacatgggtctgaccaaatttccaaaaataatcaaaaaatcttgggcagacattgcctcagaatctgaatcaaatttacaaacaatgatccaaaaatgcgtcaatgaccaaaacagccaccaatactaaaggaaaactacctttagccaaagctcaaacaccacataccaaacaaactaacaattatatttataaaaataaattgttaactgttttgcagatggaacctgaattttgggacaaaaatcccttcaaggcgatggccaaggctttcccaccaggatttcactacaaaccaaccatcatcctgaagacaagaactttttatgaattgattttggtagattcaaactcagtatctatcaaacatttcaaagatccaaaagatcaaacattaaacacccacccgacaatccaaatactaaaagttcttcaaccaagacactttggttcggacttgaacaaaggaaagagattttcagttccatttgatccggtaggttatacctattgggattacgttgattcttggactaaggtgttttggcaccaaaatacccgcttcaagcattcatggctgatatatttcaagaccaacacaatttacaattttcccaattggtttttgcaatggtgggacttctttggaccaatcccagagatattcccagaaacagtccaacaaggatttgcccaatttaagaaacaatacaattcgcaggaatcacgaattccagcagatcttaaatacttttcaagctttgcactgtcatggatattctcatggcaatatcgttacagcatgactgaaaagacaaaccaatatccatcactacaaagacacgcatttgtaaaatggtggacacaatttgactcatccaaagcggatccagaacaagtaaaactctggttccaatcccatccagaattcctcaaagcagctgatccatgaacttctgtgtttttgaaccaaaagtctcatctggcagcatttttagcaggatcaacatcaaaggaggtcttagctaaaaatctgaaggaagttctgcaaatgttacagcaggaagaagaagcttcatcctcaaagaaggaagaaacaagttctgctgaagaagaagaagaagatcccttttaccaaaacgaagatgattgttttggtatctgtttagattaaatttaatttcggtcacaaaaccatctgtttgtaattaatgtataattaatgctg

SEQ ID NO: 7774 - DNA, 1248 bp, Glycine max
  Gm_smallRNAprecursor_607
aacccttcaggcccttcaagacatgggtctgaccaaatttccaaaaataatcaaaaaatcttgggcagacattgcctcagaatctgaatcaaatttacaaacaatgatccaaaaatgcgtcaatgaccaaaacagccaccaatactaaaggaaaactacctttagccaaagctcaaacaccacataccaaacaaactaacaattatatttataaaaataaattgttaactgttttgcagatggaacctgaattttgggacaaaaatcccttcaaggcgatggccaaggctttcccaccaggatttcactacaaaccaaccatcatcctgaagacaagaactttttatgaattgattttggtagattcaaactcagtatctatcaaacatttcaaagatccaaaagatcaaacattaaacacccacccgacaatccaaatactaaaagttcttcaaccaagacactttggttcggacttgaacaaaggaaagagattttcagttccatttgatccggtaggttatacctattgggattacgttgattcttggactaaggtgttttggcaccaaaatacccgcttcaagcattcatggctgatatatttcaagaccaacacaatttacaattttcccaattggtttttgcaatggtgggacttctttggaccaatcccagagatattcccagaaacagtccaacaaggatttgcccaatttaagaaacaatacaattcgcaggaatcacgaattccagcagatcttaaatacttttcaagctttgcactgtcatggatattctcatggcaatatcgttacagcatgactgaaaagacaaaccaatatccatcactacaaagacacgcatttgtaaaatggtggacacaatttgactcatccaaagcggatccagaacaagtaaaactctggttccaatcccatccagaattcctcaaagcagctgatccatgaacttctgtgtttttgaaccaaaagtctcatctggcagcatttttagcaggatcaacatcaaaggaggtcttagctaaaaatctgaaggaagttctgcaaatgttacagcaggaagaagaagcttcatcctcaaagaaggaagaaacaagttctgctgaagaagaagaagaagatcccttttaccaaaacgaagatgattgttttggtatctgtttagattaaatttaatttcggtcacaaaaccatctgtttgtaattaatgtataattaatgctgg

SEQ ID NO: 7775 - DNA, 1146 bp, Glycine max
  Gm_smallRNAprecursor_608
caatgatccaaaaatgcgtcaatgaccaaaacagccaccaatactaaaggaaaactacctttagccaaagctcaaacaccacataccaaacaaactaacaattatatttataaaaataaattgttaactgttttgcagatggaacctgaattttgggacaaaaatcccttcaaggcgatggccaaggctttcccaccaggatttcactacaaaccaaccatcatcctgaagacaagaactttttatgaattgattttggtagattcaaactcagtatctatcaaacatttcaaagatccaaaagatcaaacattaaacacccacccgacaatccaaatactaaaagttcttcaaccaagacactttggttcggacttgaacaaaggaaagagattttcagttccatttgatccggtaggttatacctattgggattacgttgattcttggactaaggtgttttggcaccaaaatacccgcttcaagcattcatggctgatatatttcaagaccaacacaatttacaattttcccaattggtttttgcaatggtgggacttctttggaccaatcccagagatattcccagaaacagtccaacaaggatttgcccaatttaagaaacaatacaattcgcaggaatcacgaattccagcagatcttaaatacttttcaagctttgcactgtcatggatattctcatggcaatatcgttacagcatgactgaaaagacaaaccaatatccatcactacaaagacacgcatttgtaaaatggtggacacaatttgactcatccaaagcggatccagaacaagtaaaactctggttccaatcccatccagaattcctcaaagcagctgatccatgaacttctgtgtttttgaaccaaaagtctcatctggcagcatttttagcaggatcaacatcaaaggaggtcttagctaaaaatctgaaggaagttctgcaaatgttacagcaggaagaagaagcttcatcctcaaagaaggaagaaacaagttctgctgaagaagaagaagaagatcccttttaccaaaacgaagatgattgttttggtatctgtttagattaaatttaatttcggtcacaaaaccatctgtttgtaattaatgtataattaatgctg

SEQ ID NO: 7776 - DNA, 1146 bp, Glycine max; identical to SEQ ID NO: 7775
  Gm_smallRNAprecursor_609

SEQ ID NO: 7777 - DNA, 1147 bp, Glycine max
  Gm_smallRNAprecursor_610
caatgatccaaaaatgcgtcaatgaccaaaacagccaccaatactaaaggaaaactacctttagccaaagctcaaacaccacataccaaacaaactaacaattatatttataaaaataaattgttaactgttttgcagatggaacctgaattttgggacaaaaatcccttcaaggcgatggccaaggctttcccaccaggatttcactacaaaccaaccatcatcctgaagacaagaactttttatgaattgattttggtagattcaaactcagtatctatcaaacatttcaaagatccaaaagatcaaacattaaacacccacccgacaatccaaatactaaaagttcttcaaccaagacactttggttcggacttgaacaaaggaaagagattttcagttccatttgatccggtaggttatacctattgggattacgttgattcttggactaaggtgttttggcaccaaaatacccgcttcaagcattcatggctgatatatttcaagaccaacacaatttacaattttcccaattggtttttgcaatggtgggacttctttggaccaatcccagagatattcccagaaacagtccaacaaggatttgcccaatttaagaaacaatacaattcgcaggaatcacgaattccagcagatcttaaatacttttcaagctttgcactgtcatggatattctcatggcaatatcgttacagcatgactgaaaagacaaaccaatatccatcactacaaagacacgcatttgtaaaatggtggacacaatttgactcatccaaagcggatccagaacaagtaaaactctggttccaatcccatccagaattcctcaaagcagctgatccatgaacttctgtgtttttgaaccaaaagtctcatctggcagcatttttagcaggatcaacatcaaaggaggtcttagctaaaaatctgaaggaagttctgcaaatgttacagcaggaagaagaagcttcatcctcaaagaaggaagaaacaagttctgctgaagaagaagaagaagatcccttttaccaaaacgaagatgattgttttggtatctgtttagattaaatttaatttcggtcacaaaaccatctgtttgtaattaatgtataattaatgctgg

SEQ ID NO: 7778 - DNA, 1189 bp, Glycine max
  Gm_smallRNAprecursor_611
gacaatccaaatactaaaagttcttcaaccaagacactttggttcggacttgaacaaaggaaagagattttcagttccatttgatccggtaggttatacctattgggattacgttgattcttggactaaggtgttttggcaccaaaatacccgcttcaagcattcatggctgatatatttcaagaccaacacaatttacaattttcccaattggtttttgcaatggtgggacttctttggaccaatcccagagatattcccagaaacagtccaacaaggatttgcccaatttaagaaacaatacaattcgcaggaatcacgaattccagcagatcttaaatacttttcaagctttgcactgtcatggatattctcatggcaatatcgttacagcatgactgaaaagacaaaccaatatccatcactacaaagacacgcatttgtaaaatggtggacacaatttgactcatccaaagcggatccagaacaagtaaaactctggttccaatcccatccagaattcctcaaagcagctgatccatgaacttctgtgtttttgaaccaaaagtctcatctggcagcatttttagcaggatcaacatcaaaggaggtcttagctaaaaatctgaaggaagttctgcaaatgttacagcaggaagaagaagcttcatcctcaaagaaggaagaaacaagttctgctgaagaagaagaagaagatcccttttaccaaaacgaagatgattgttttggtatctgtttagattaaatttaatttcggtcacaaaaccatctgtttgtaattaatgtataattaatgctggacaatactacttgtcctgtagccattaaagtcccggtcaaaactacttgtcttgtaacaaacagtcaaatagtcccggtcaaaactactggcaactaccggtcttagatttatggctatataaggagtcctcaagtatgttgtgaggcaccttttcatttagcaatttttcaggtttctgaagagaggtgctctgaaacaagatttttgtaagcgcttctttctagattcaataaatttctatttttcatccttttctcttctcccttcaccgatcctatgcggctctgccgccgcttcggtttctttgtttatgaaaacctggggtttgtaagccggtctccggtgtgcccttgatatctgtttttc

SEQ ID NO: 7779 - DNA, 1046 bp, Glycine max
  Gm_smallRNAprecursor_612
tcaagaccaacacaatttacaattttcccaattggtttttgcaatggtgggacttctttggaccaatcccagagatattcccagaaacagtccaacaaggatttgcccaatttaagaaacaatacaattcgcaggaatcacgaattccagcagatcttaaatacttttcaagctttgcactgtcatggatattctcatggcaatatcgttacagcatgactgaaaagacaaaccaatatccatcactacaaagacacgcatttgtaaaatggtggacacaatttgactcatccaaagcggatccagaacaagtaaaactctggttccaatcccatccagaattcctcaaagcagctgatccatgaacttctgtgtttttgaaccaaaagtctcatctggcagcatttttagcaggatcaacatcaaaggaggtcttagctaaaaatctgaaggaagttctgcaaatgttacagcaggaagaagaagcttcatcctcaaagaaggaagaaacaagttctgctgaagaagaagaagaagatcccttttaccaaaacgaagatgattgttttggtatctgtttagattaaatttaatttcggtcacaaaaccatctgtttgtaattaatgtataattaatgctggacaatactacttgtcctgtagccattaaagtcccggtcaaaactacttgtcttgtaacaaacagtcaaatagtcccggtcaaaactactggcaactaccggtcttagatttatggctatataaggagtcctcaagtatgttgtgaggcaccttttcatttagcaatttttcaggtttctgaagagaggtgctctgaaacaagatttttgtaagcgcttctttctagattcaataaatttctatttttcatccttttctcttctcccttcaccgatcctatgcggctctgccgccgcttcggtttctttgtttatgaaaacctggggtttgtaagccggtctccggtgtgcccttgatatctgtttttcaagtttcaagtttatattttcatttcatttatcata

SEQ ID NO: 7780 - DNA, 1184 bp, Glycine max
  Gm_smallRNAprecursor_613
caactaattaatcgtcgtccaatgatataccaaaacagtcatcttcattctggtagaatggatcgtcttcttggtcatcattagtctctgatgattcagcttccttcttggaaggttcttcttccacttcctgttgaagtagttggagaacttctttgagattctgagcaagactctctttagattttgagcttgctaagaatgctgctagttgcgacttttgatttagaaacaaagatgtctccggatcagcaggtttaaggaactcaggattgctctggaaccagttcttgacttgatctggagcagtctttgaagtatcgaattgtgaccaccattttacaaaggcgtgtctctgtaacggtggatattgcttgttgttttcagtttttccgtatctgtattgccatgaaaagatccatgacaaggcaaaactggaaaagtactttaaatctaccggaatacgtgattccttgctattatagagcctgttgaattgttggaatccctgttggacttcttctggaaatatttgtggaattggtccgaagtagttccaccattggaggaaccagtttggaaaattatacgtagtattattttttaagtaaatcagccatgaatgcttgaatttactattttgatgctagaacacattagtccaggcgtcaatgtaatcccaataattatatcctgcagggtcaaatggtgcagaaaattttttgggttgatttaagtttgagccataatgtcatggctgcataaccttcaagatttggattgtggaatgggtatttagatttggatctttggggtctttgaagtgtttaatagatactgagtttgtatctattagaatgaattcgtagaatttgcgggttttgtttgtggctattggcctgtaatggaatcccggggggaatactttggcggttgctttgaaaggattcttgtcccagtattctggttccatttgtaaaacattgaaaaatttgttttttgaaatgtaactgttaccgggttgtggtgttgattcttgttgagtcaacgattggcttggtttttggttacagacagttttggtctgtttggctttttggatttgtttttgtaggtctgtttcagaatcatcgtctgattctgaggccatttctgcccaggtctttttggctaattttggtatt

SEQ ID NO: 7781 - DNA, 1127 bp, Glycine max
  Gm_smallRNAprecursor_614
ggacaaattcacctacgtaatttagacaacctagaaatctctgtaactgggttttgtctaagatttggttggggaatttgctagcaaactctattgacctttcgattggaacgattgtaccttgataaatattgtgaccaaggaatcgaattcgtgtttggaaaagattgatttttgatttggagactgccaaaccattttgtttgatgatatggatgaaggtttggagatgtttgaaatgttggtcaatgttttgggaaaagattaaaacatcatctatgtagacaatgacaaattttgaatagggattaaaaatatcattcataattttttgaaattctgaaggggcatttttcagtccgaatgacattacatttcattcatattgcccgaaaggtacagtgaatgctgttttgtacctatctgattcttggatttggatttgccaaaatccagatttcatatcaaattttgaaaatatctttgcagaatttaatttgttaagcaaatcttttttgtttggaataggatatctaatccattgtaatgcttgatttagtggtttgtaatttatgactaagcggggtgttccacgctcaatctcagattgtttgttgacataaaaagccgcacaagaccatgggcttttgcttttccggattaggcctttatcaagcaaatctttgatttccttttgacagtattgaagaagttcttcattcatttggattggtctggcttttgtgggaatttgtttttccctaaagtccttctcgtaggggagatcaacaatatgtttctttctgtcccaaaatgcatgtggcaatttagagcagacagttgattcaatatgatttaataaagattgaattttttcttttacttgaggttttcctagttgtatctgaatattattaaaagatacttcttcttttaagaagttaatttgattaatcttattttctataagatttatatttctggaaattggtttagtagaaaaattaaatataatctttcttcctaaataatttgtggttattccttcattagatatttggatgggaaacagggctctaatgaagggcgttcctaagattacttcattcttaaggttttttaccaga

SEQ ID NO: 7782 - DNA, 1250 bp, Glycine max
  Gm_smallRNAprecursor_615
gaagggataggatgggggcataggaaagggaggaggggtatgcaagtaattttgcaattgttgcgagtgagaatagccactccaaaggtgtgtttcttgaattgttttaagcccaacccatatttttattgacttatttttcatgttggacttgtacgttctcaagttacctcaaaggttatagagtgttgctaggtgcacctagcattattgctagtgcacccaacattctaaaaaaatggcaaaattgtccttgtttggtttttctcttacggatcaacttgatccgtaacttccggatcaacttgatctgaaagagacttccggatcaacttacggatcaacttgattcgtaagaggaaaaataaaatttttgttaattatacaagatatttaaagatatttattccattaattataatataattaaatttatttatttattttattaattataatatatttataaatattgatttattataaataattaatgctaatcaatcataatcataattcatgctaatcaatcaatcatgctaataaatcataatgctaggtgcaaatttcagaatcaaaaactacattttttaaaattgctaactctgaattttgtgtgttttttactctgaaatttgcatgattgattgatagattatgattgattagcatgattgattgattgattgacataaattatgattatgattgattgattagcataaattatgattatgattgattgattagcatgaattatgattatgattatttataataaattaatatttataaatatattataattaataaaataaataaatatatttaattatattataattaatgaaataaatatctttaaatgtataaactatattataaaataaatatattgtataattaacaaattttttatttttcctcttacggatcaagttgatccagaagtctcttctaaactatattataaaataaatatattgtataattaacaaattttttatttttttaaaatgttgggtgcacctagcaacactcaaggttatataggggtttattacttttgtttatctagagtagtgttttatgaaattttagagacccaattattttggttttcttcttttttttgttgttggcttattcttcatgttgtgcttgtcataagaatctcagccacctcaggttagagatttattttttgttagttctatttttattttttttttgtctagactaattaagct

SEQ ID NO: 7783 - DNA, 1112 bp, Glycine max
  Gm_smallRNAprecursor_616
cccgagtgtccttcgcaaccattgaatttccatggcataacgttgaaaggcaaacaagatgaaaattggttccaattgttggccccgatgatcagtcaatggaacaatcgagctgagtttatggtcgacgtttatcctcgacaggagggtctattgagttttaactctgactacatggtctggtataggcgaaaaacgaagatgtttgtcgacccgaacaatgcaaacacaactacattggtatttatttctttttgaatatttaacttcaaattattttttaaagcatcaacattaatttcctcaccctaataattgcaggctgaagttgcggagacattacagtatatggtgtcaccacaagggaggaacacatggacatagttgatgatctcgtgtcttatgtggagaagataatgattttatccgaagagcaagagagaatcactgagcctgtggcacatggtcctgcatcagagcgtcgatttccaccacaagagtttcacatgcttcagtcaagtgttgaaactcggggttttggcagacgaagggaggttgttgaagcggaagaattttcccaacaaatggaggagcgtgaccatggaatgtattacacgccaccaacattttctcagtatccttcacagatgtatcagtatcctttcgaaggtcatgacactgatatgtcaacaagcgaacattcatttggtagtattgtggaaacacatcctcatttttcatggccgactatgaccctttcacagcaacatgatgcctcaatggcaacacctaatgccccattagctccacaatggaatgtgcccggagcaatacttgatatgggtgacttattaggtgttgatttgagtcaggagttttctgctgcggctgagcaagtagaagcggggagacatcatggcagaagaaatcctgatcgttaagcgcgaagatgggatcgaccatgtggcacatcctcatgtcatcacggacatcttaatgaatgattttcatgtctctgtttaaatttgttgttgtatgtttgccatttgaatttgacacttaatctatcgtatctcatttattaagccttactcatggatatagtttatgtc

SEQ ID NO: 7784 - DNA, 1112 bp, Glycine max
  Gm_smallRNAprecursor_617
attcccaagtgtccttcgcaaccactgaatatccatgacataacgctgaaaggcaaacaagctgaaaattggggacaattattcaccccaatgatcagtcaatggaacaatcgagctgagtttagggtcgacgtttatccctgacaagagggcctattgagttttaactccgactacatggtctggtataggcgaaaaacgaagatgtttgtcgactcgaagaatgcaaacacagctacattggtatttatttgtttttgaatatttaacttcaatttatttttaaagcatcggcattaatttcctcatcctaataattgcagggtgaagttgcggagacattacagtatatggtgtcaccacaagggaggaacacatggatagttgatgatctcgtgtcttatgtggagaagataacgattttatccgaagagaaagagagaatcgctgagcctgtggcacatggtccagcaacagagcgtcgatttacaccacaagagtttcacatgcttcagtcaagtgttgaaattcggggttttggcagacgatgggaggctgttgaagcggaagaattttcccaacaaatggagaagcatggccatggaatgtattacacgccaccaacattttctcaatatccttcacagatgtatcaatatccttttgaaggtcatcacactgatatgtctgcaagcgaacattcgctcggtggtgttgtggaaacacatcctcatttttcatgtccgactatgaccccttcacagcaacatgatgccccaatggcaacaccccattagctccacaatggaatgtacccggagcaatacctgatatgggtgacttagtaggtattgatttgcgtcatgaattttctgctgaggctgagcaagtagaagcggggagacatcgcggcagaagaaatcctgatcgtcaagcgcaaagataggattgaccatgtggcacatcctcacgtcgtcacggacatcataatgaatgattttcatgtctctgtttaactttgttgtgtatgtttgtcatttgaatttgtcacttaatctatcgtatctcatttattaaggcttactaatggatacagtttatgtcgcgcatca

SEQ ID NO: 7785 - DNA, 1046 bp, Glycine max
  Gm_smallRNAprecursor_618
taatgaccgttaaaaccacaaagtgttagcgctatttggaatttaacatagatatgcaaaaatatattgcaagatttttaaaagtgagtataaaatgtcacaaaatagtttattaggaacaaaacttgacaaataataaaaagtaggaataaaaagtacaattaaatctgttaaataagtgtataaattttgtacacaaaacattgatttccatttggtctaaaatataaatcaaatcatgctaatttagggtgtgtttggtttgcatttttattttctgtttttattttttgaaaactgttttcatttttaaaatattagaattctgaaagcatgtttgatttgatttcttattttttgttttcaagaaataaaaacgagtgaataggcaatttagtccttgaaattgtacctattttgcatattagtcccatacttaatattaaatttaaaatagtccctatctttgcataagtgttgcaaaatagtcattccgttaaattttaaagtaacgccgttagtgaggtcaattttagtgccacgtggactatccacgtggcactaaaggatgacgtggcatgacacgtggacgtgcctgatgccacgtcatttgatgataacaaaacgagtaaatagacaatttagtccctgactttgtacccctgttgcatattagtccctaacttaatgaaaaattcaaaatagtccctatcttttacataagtattgcaaaatgtatttttagatttgcttaaaattacattcttgacaccacgttttcattttactcaaaatgagattattggtttcaactgaaaacaaaattttagttttcagattttggttcgtttgagaaaatattttcactgaaaatgaaaacagaaatccaaccaaacatattttcatcattattttctatttttagtgaaaataaaaacagaaaacaacaaaaccaaacacctttttaatgattcaaagttataaatataattacaacttgaactagtttcaagacaatttgaattctaaagtgaaagaaaaatgaa

SEQ ID NO: 7786 - DNA, 1045 bp, Glycine max
  Gm_smallRNAprecursor_619
aatgaccgttaaaaccacaaagtgttagcgctatttggaatttaacatagatatgcaaaaatatattgcaagatttttaaaagtgagtataaaatgtcacaaaatagtttattaggaacaaaacttgacaaataataaaaagtaggaataaaaagtacaattaaatctgttaaataagtgtataaattttgtacacaaaacattgatttccatttggtctaaaatataaatcaaatcatgctaatttagggtgtgtttggtttgcatttttattttctgtttttattttttgaaaactgttttcatttttaaaatattagaattctgaaagcatgtttgatttgatttcttattttttgttttcaagaaataaaaacgagtgaataggcaatttagtccttgaaattgtacctattttgcatattagtcccatacttaatattaaatttaaaatagtccctatctttgcataagtgttgcaaaatagtcattccgttaaattttaaagtaacgccgttagtgaggtcaattttagtgccacgtggactatccacgtggcactaaaggatgacgtggcatgacacgtggacgtgcctgatgccacgtcatttgatgataacaaaacgagtaaatagacaatttagtccctgactttgtacccctgttgcatattagtccctaacttaatgaaaaattcaaaatagtccctatcttttacataagtattgcaaaatgtatttttagatttgcttaaaattacattcttgacaccacgttttcattttactcaaaatgagattattggtttcaactgaaaacaaaattttagttttcagattttggttcgtttgagaaaatattttcactgaaaatgaaaacagaaatccaaccaaacatattttcatcattattttctatttttagtgaaaataaaaacagaaaacaacaaaaccaaacacctttttaatgattcaaagttataaatataattacaacttgaactagtttcaagacaatttgaattctaaagtgaaagaaaaatgaa

SEQ ID NO: 7787 - DNA, 1074 bp, Glycine max
  Gm_smallRNAprecursor_620
ctattaatcactaactaaatcattgttttggcggagttcaaaaaaatgacattattcttttggtggattgtcgaaatacgttacataccaattttatgtgaagattaataatgatgcaagagaagtcaattttaatagcaaagaaaactaatgaattcattggtttctcctcaagtctggaatagccaaactcaaaaaggcataatactatacgcaatgaatcaggaaaaatcacagctcaatttgaagtgcacaaattcaagtcagtcacatgatcacagtttcttcatagaaagacaaatgaaaatacaacacgagtacacagcctaaaaagagcaccctaacaaacatcctaatcttatactaaaaaatgaaattaacagctataaatgatgctaagccacctaaaaaaattgctagggttgtaaacgtaagactatgaaacacggacactccagtcctttgtcatgttcagtgttcgacacgcgtccgtgtcagtatccgacaccgacacgacacctgtactatgttctatattttggacattacaggtgtccacgtgtctgtgtcgtgtccggtgtccgtatcggtgtcgatgtttcatagcatatgagtctttcatggttttttcattttttttttctccgtgcttcttcagtcttggccatctctatgtcattctcagtgactatagaaacatagtcttggccatctctattcatctctatagaaacaccatcattgcagttccaactattgtcaacccttccatggctttcctaattgactcgaggagcaactcccttttttcatccttttcattctacaaattaaaaatcattagtaaataatatgatattggctaaaatatttttcatctttataaatatgaaaatgtttgaaattttaggtatgtttccattcttgcaaaattataacatatttaaagtgataaaaaaaattaattatataatttgtactctacataatataacacacggtacagttgcaatgtatgtatgcttttcggttagttttggtcactgcatgtttttggttgctcggatatgtata

SEQ ID NO: 7788 - DNA, 1044 bp, Glycine max
  Gm_smallRNAprecursor_621
ccatttgtgaaatcttgcagcattgtcagttggctttccatctccatatctaccatgtcaggtccaaatgcatcaagggtgatgctaggtgcaccagcattattgcttgtgcacccagcaattgtttttaattccctaaatgcccctggtgtcttcttccttttgaagttggttgcagtgttattttttctcttacgcctccattgtttttttcttcgctttctccctctgttgttggttcgtgttggtttttcattgttgagagagttgctgcttgggtcgagatgaaagtgttatgggtcggtggtgattgttgcggtggttgtttcgtcgtcgtcggcatttaaggtatgccattttactgcattttgctgggtgtgcatgagttgatccgtatgtgtaagttataagtacagatcaagttgatccgtatgatctgtacggatcaagttgatccgtatagatcatacggatcaagttgatctgtatgaaacatacgaatcaagttgatccgtatgagtcatacagatcaagttgatccatatgagtcatacggatcaacttgagtgaaggacatttttgcccattcacttaaaatgcagggtgcatcagcaataatgctgggtgcacctagcatcacccatgcatcaaatacaacatagatttcaaaataataataataatgatgatgaacttcaagtttccgaccattttttatgtgcataattcttatgtggccaacatgaaaaatgcaactgactctttcttcagcttctcttcatattgatcatcatccattgtatagtcatcctagatcaatttatatacatcaaatacttaagccacatccagttagctacattttaccttttggagtttctatagaataattccacgagtcactagtttggaagactttctgaaagtccccttaacaaaaacattttaaaaagtaccacattttccccactacaaccataacagagggattgccaaaatttcatcccaggccaacttaccaggtcaacaactttgacagctgtt

SEQ ID NO: 7789 - DNA, 1033 bp, Glycine max
  Gm_smallRNAprecursor_622
tcaactcggatgccagagaggatgaagtgttcgtagaaggaggagttatcgccggctctgagggaaggaacagagttgagtcgtgacatagcgaccgattcttgctgcgttagtctcagcatctctctcaccttctccatcctctttgtcttgcctttttccaacccaccaagacgaagacgatctataggggttgcttgttgctggttgctatctggatcgtgagttcacttgagcctaatgggcttttacattgtttaacttcttgagtgttgctaggtgcagccatcattattgttggtgcacccaatattttttgaaaatggtaaaattgttcctgttaatttcttcccttacgaatcaaattgatccgtaagttgatttttaagacttacagatcaagttgatccgtaaaaaacttacagatcaacttgatccgtaagttttaaaaatcaacttacgaatcaacttgatccgtaaaagatttacagatcaacttgatccataagtcttaaaaatcaacttacgaatcaacttgatccgtaaaagacttacggatcaagttaatctgtaagtcttaaaaattaacttatgaatcaacttgatccgtaagggatatttttgtctttttgtggttagtactaggtgcaccagcaataatgctgggtgcacctagcagcagtctaacttctctcaccaaatttgcataaaggccattcatatttacacctctcaattttactagtatatctccttatatatatatatatatatatatatatatatatatatatatatatatatatatattaccataaactgttttttttttcttcaaaatgttgaaaaatttgcgtttataaaaattttacatttggaatgtagtttctctggaagtggtaaaaatttagcacattacaaaaagtattttctggaagtcaattttcaaaaataaaataaaatgggcaccgattgcctttaagcattttcttttttgggtatttgctaagcgttgatatactcgttttcttgt

SEQ ID NO: 7790 - DNA, 1172 bp, Glycine max
  Gm_smallRNAprecursor_623
ttttgtttggataattgatcaagtcattcacctgcacttggcttatttgcacggatatccccaatatgtcgccagtgcatcttctcagtctatgcgtaatctgtaaatattcaatcaatctattacgttacaaattttaattgaaagtaaaatttaaagaatatataaaatagattctcacaagcatgagtggtttttttaaatgtttgcagtttgagttaccgcgaagaaagttttgtgcaatctggcgcaagcaaaagaaatgggatgtgtcctgaaccccataagttagttgaattgttgtaggcacttataattgaggggtgtctgtctgaaatgagagaaatgttaatttgcggagtaacatgtcttcacaaattctttagaaaaaatctcaagctgaagttgtctccccttctacaatggcgtaggcaatcgggaagatatggttagctccatcctgtgcggtagctatcaacagtgtgccagtatactccccgtaaagccatgtaccatctacttgtactatggatttgcaatatgcaaaacctttaatgcatggaccaaatgaccaaaagacacatttaaacattcttttgcctgatacaatttctcctccgtcgtttgagcagcaaccacattcccgtgaacaaaagattgcaaagctcccaaaagttttggcagtttggcatatgactcttcccagtttacatgaatcatcttcaacgctctttgctttgctaaccatgtcttcttgtaggatgagatataattcatgaacgttttgatctctgtagtcaacgtcttgatggagacgattgagtttattttgacaattggttggatgatctgtgctatgacgtgtttgtcaagttgccgatgatcgtatctaatcattggcgcgagacaagtgtgatgacctctaatactcttgataatccatttgttatgcctctttgaattgcatacgcctaagctccatgtacagccattttcatgtaatttacacacgaagtttagccttctctggtcagagtaaattattctacagtcaaaatgatttctgatgttgtattctttgaatgcttgaatacattgtgctttttcatcgaaggccatgccaacctcgagtgcacctgttggtggttgtacattatgttgatgttgttgaa

SEQ ID NO: 7791 - DNA, 1075 bp, Glycine max
  Gm_smallRNAprecursor_624
ttaccttggtgggatccagccccccccccccagactgaatttgtggatctattcaaccatggtcaacaagcatgaataaggtataatcattaagtctacttttgctaaatttaagagtataatatatggggtttttgaaacttgtttgacttaatagattgaaaagaagaagaaaaaaggaaaagaaaacaacaacaacgaaaacaaaagtcttatcctagtaactactgaagttggattcactacatgaatcacacgacgatcccatctagcacggttaataatcaaaaaaagaaataaaggaaagattaaagaaattagctttgtaagaccaaaagagcaataaaaaggtcaataatatgtacttacatgaattataccactctctttcatatgaagaatgcagtttctagtccataaactgtgtatgaagtatctgatgcagtaaaaagaggcaatccaccaaaacaatcatatatagtagaagccaccaaaggaggaatccaaagggatagcatgatcccaaatattgagaaggggagggaaagagaaaaatttataaatctgaaatttgggatcaatgcgatccctttggatgcctcctccagttgcagtggaatataataaccaaacttcgccttcttaattctttagtgtttcacataggtgtatataagtgcgtaacccttctctccttctctctctgcaggcttttgtgctgaaggaaagtggcaggatcatggatggctctgagtttgaggattgaaggagaggctttcaaagcaaaagagagagcaagtgcttatattaacaacaaaaactctctttccatcattgtttcttttatttcaaaaattgtccatgaattaattgattaatatatttattaagatttgcagaatatataatctgaaaatgttttttttcaagaaattatgatatttattgagatgtagaccccattccataataatccaggcaccccgaaagaaaatttacccgacaatgggtcagctatccattattggaaattctctacaagttgggctggcaatatatattagaattttattcc

SEQ ID NO: 7792 - DNA, 1050 bp, Glycine max
  Gm_smallRNAprecursor_625
aataatattaccgtatgcatgcggaataaagaaaagatgagacaaaataggaagagagaaaatataaatatcataagtagtcgtctatgtttttccatgtctgtatcactgccttgtggtagaaatggaaatggcttcaatttatatctaaaacatttgttcaacctatggtattttctggctgatccgagattcattgaagagactaatatcttttaacaaatgttttttttcctacaaatatgaatatcaaacttttaaacacatgttttaaaaaagtttatttgtcaatacaaacgaataactaaattgaatcggatgattttacctataataactattttttaatgttttggtaggggttgatattggattacaagtgtggtgaagtttcacataagttaaacataaatctgagtttaaggttttgagttaaagtataatgttaaatttttttatatgactgctgatgacttattgactatgaagcacggacacttcagtctcttgtcgtgtccggtgtccgacatgcgtccgtgtcaatgtccgacaccgacacgacacccgtattacgttctatattttggacattacaggtgttcacgtgtctgtgtccgtattgtgtcccgtgtccgtgttgatgcttcatagcttattagtgacagttaatagagtcatgtattatattataaattagaatatacaatttagagtgtgagattctcactctccactctcatacactaatttttttattagttaaaattgacatataaataagttaaaagcaactttttggataagataaatgattttaacttctccaaaaaaataattttggataagctaaataattttggactgagtgacaaatcacacttttagaaactttttaatcaatttattattttcaaaagaaactttttaatcaatttattattttcaaaaactaaattggcattgtcttacacttttttagaagaactagtcatttaccctctaacaaaatataaaaagttttaaaaataagaaaaataaatgtgattgatt

SEQ ID NO: 7793 - DNA, 1038 bp, Glycine max
  Gm_smallRNAprecursor_626
attaccgtatgcatgcggaataaagaaaagatgagacaaaataggaagagagaaaatataaatatcataagtagtcgtctatgtttttccatgtctgtatcactgccttgtggtagaaatggaaatggcttcaatttatatctaaaacatttgttcaacctatggtattttctggctgatccgagattcattgaagagactaatatcttttaacaaatgttttttttcctacaaatatgaatatcaaacttttaaacacatgttttaaaaaagtttatttgtcaatacaaacgaataactaaattgaatcggatgattttacctataataactattttttaatgttttggtaggggttgatattggattacaagtgtggtgaagtttcacataagttaaacataaatctgagtttaaggttttgagttaaagtataatgttaaatttttttatatgactgctgatgacttattgactatgaagcacggacacttcagtctcttgtcgtgtccggtgtccgacatgcgtccgtgtcaatgtccgacaccgacacgacacccgtattacgttctatattttggacattacaggtgttcacgtgtctgtgtccgtattgtgtcccgtgtccgtgttgatgcttcatagcttattagtgacagttaatagagtcatgtattatattataaattagaatatacaatttagagtgtgagattctcactctccactctcatacactaatttttttattagttaaaattgacatataaataagttaaaagcaactttttggataagataaatgattttaacttctccaaaaaaataattttggataagctaaataattttggactgagtgacaaatcacacttttagaaactttttaatcaatttattattttcaaaagaaactttttaatcaatttattattttcaaaaactaaattggcattgtcttacacttttttagaagaactagtcatttaccctctaacaaaatataaaaagttttaaaaataagaaaaataaatgtga

SEQ ID NO: 7794 - DNA, 1099 bp, Glycine max
  Gm_smallRNAprecursor_627
atttattataacgcatttatttacagaaataattcagaaaatgatattaaattatgtaaaaattataaaataaaatttacaagtaataaataaaattttaataatttcattatcggagcggataaaggtatgggtacaggacacataataacatctttattttagaccacgatctcgattaaaaaagtcgaataatccctgaatctgaatccatatccggtcaatttagatatttttcatcaaaattaaaatgggttcaaacggatactacaaatattggtttggttgccatttctactcgtgtggtccttaatagtgtatggtggcatgctatgatggtaatggcgatattttattattataacaaaccttgggctttgaaaaatgggcttctagcctagaattgcacttcatgtctcaagcaaggacgggtgttgccaggtgcacccagcacttaaggtgaaatgacaaaaatactcttaatctgtaagccatttaagttgatccgtaaaagtcttacggattaacttgatccgtaagctttttacggatcaacttgatccgtattgctccgtaaaaggcttggggatcaagttgatccgtatcaaccttacggatcaacttaatctatacgatttacggatcaccctcacacatattcatcacaaatacgaaaaaagtgcaggggtaattttagtatttttaaaaaatactggatgcaccaacaataatcctgagtgcacctagcaacacccagcaaggaccctttgctgtcactgaccatatcaagttatcaagaatcaaccctcatgttgatgacagtatgcttcaattttgatggaaaaaaaaatgtttgaattttcaatggatgaaatgaccaaggtcttgaaacctaaagaaaacaaggcaataaccaactctgcggacatcaattaagttcgtcgggaaaagttatccactggtgtccatagcaaggtagggagatgttgaaatgtaattaaattcaaaaggcggaagacaaaatccggttcttgccttgtgaaaaatatttgttgacttgctattgggcagtaagtcatgttacaagtaacgtctacat

SEQ ID NO: 7795 - DNA, 1188 bp, Glycine max
  Gm_smallRNAprecursor_628
aactctttgttgattggtcagtagtttgttctccgaaaaaagaatgggttttaggcctttttaatctcaaggactggaaccttgcgcttctttcccgtatcctgtgggactttcattgtaagaaggattctctatgggttcggtgggttcaccattactatttcagagggagcgatgtgtggaattacaatacttcttcatcagatccagttttgataaagaaaatcattcaaataaatgactttattatctctaaagaactaagtacggaagaggtcaaaaagaggattcaatcttggagcaccaatgaacaattgcttgttgacaaagtctatgaatatattagaggtgtcaagcctactgttagttggtgttctgttatatggaacccagcaatcccccctaagatgtctttcattttgtggcttgctaaaaggaatcggctgcttactcttgacaaagttgcttttttgaacaagggttctctctgccctttatgttcaaatgagtctgagtcaaatgctcatttgttcttttcttgcaggaaatctctccaagtttgagctcacattcgtgatttggctcctttccgcaggcgtttcacttctttacagcgcattactgactctttaattagggacagatccacatcaagtattcaaggaaaattacgttgtctggctatagcaattacagtctactgcatttgactgtctaggaacaagctgatttttgaagattatcaattttctgtcatagaggttattagcaagattaagtttcttatgtatagacaagcgcacctgttgcatttgttttaacatcttgatataggtcttattgtattaaggagacttttgattttctttaacggcggggtatgccccatttattattgtatcattttgggtttaatataatttacatttttgccaaaaaaaaaaagagttaccccttgatgatcagaactaaaaacattaacagataaaaaggtgaggaattaaaattagtccaaatttatttaaagactaaaaattaaaacctcaaaaaattcaaatatcaaaaacatagctaaccctaaaaaataatcacttgtttatattatcgataggtgaagaaggaaaatcaacctgccttatatagacaatgcaatacatacatgcataattagggtacatagatgttttt

SEQ ID NO: 7796 - DNA, 1036 bp, Glycine max
  Gm_smallRNAprecursor_629
ttcattgaggtaagtttgtctcctgatatttctcttttgtgaaatggtcaagaacttcgcactcactttcttcaagtttttacctaggggtatggtgaaatcatcatccctttctccaaacaactgcacgagctgctctcggattgtaagtttgcgagagcttccatcactttcataacctataaaccagaaatgttcaatctttgtaatccttttcccaatattaaagaaaaaaagaacaagcaaatacaagaaagaggttataaacagatatggctataaaatttctattctttcacataactcatgagacaaacatccatatcaagagtgatttataacacagagataaaagtcatgggagaatttcaaaagttagacaatgcaagatggggagaaataggcatatgatcataccaaaaatatggactttactcttctaaaatgagaaattatataagggtgcattcacaatctatgaagcacggacactccagtcccttgtcgtgtccggtgtccgacacgcgtccgtgtcagtgtccgacaccgacacgacacccgtattacgttctatattttggacattacaggtgtccacgtgtccgtgtccgtgttggtgtttcatagttcacaattgatttgagtcaaaataacttgtaaacatgagccactccaaactaaggataaatacatccttactttcccacttcacattttttctcaccttagaggagtcgaatttttagtcaattttcaaactttcatgctagctattttccacccatacaactactactgctaaacacattatcttggagaaacaaatcatattccaacgttattgtttctactctaaatttgtatactgtgcggtataagagggaaggataaggtaacatcaaaggcaagctctttcatagtatcattggtattttaatgatgtggcagcaatataatcactttgtaacttgtgatttcgaaggcactactcttgctttcaattttttccttcaagattctttttttcattaataat

SEQ ID NO: 7797 - DNA, 1037 bp, Glycine max
  Gm_smallRNAprecursor_630
ttcattgaggtaagtttgtctcctgatatttctcttttgtgaaatggtcaagaacttcgcactcactttcttcaagtttttacctaggggtatggtgaaatcatcatccctttctccaaacaactgcacgagctgctctcggattgtaagtttgcgagagcttccatcactttcataacctataaaccagaaatgttcaatctttgtaatccttttcccaatattaaagaaaaaaagaacaagcaaatacaagaaagaggttataaacagatatggctataaaatttctattctttcacataactcatgagacaaacatccatatcaagagtgatttataacacagagataaaagtcatgggagaatttcaaaagttagacaatgcaagatggggagaaataggcatatgatcataccaaaaatatggactttactcttctaaaatgagaaattatataagggtgcattcacaatctatgaagcacggacactccagtcccttgtcgtgtccggtgtccgacacgcgtccgtgtcagtgtccgacaccgacacgacacccgtattacgttctatattttggacattacaggtgtccacgtgtccgtgtccgtgttggtgtttcatagttcacaattgatttgagtcaaaataacttgtaaacatgagccactccaaactaaggataaatacatccttactttcccacttcacattttttctcaccttagaggagtcgaatttttagtcaattttcaaactttcatgctagctattttccacccatacaactactactgctaaacacattatcttggagaaacaaatcatattccaacgttattgtttctactctaaatttgtatactgtgcggtataagagggaaggataaggtaacatcaaaggcaagctctttcatagtatcattggtattttaatgatgtggcagcaatataatcactttgtaacttgtgatttcgaaggcactactcttgctttcaattttttccttcaagattctttttttcattaataata

SEQ ID NO: 7798 - DNA, 1038 bp, Glycine max
  Gm_smallRNAprecursor_631
ttcattgaggtaagtttgtctcctgatatttctcttttgtgaaatggtcaagaacttcgcactcactttcttcaagtttttacctaggggtatggtgaaatcatcatccctttctccaaacaactgcacgagctgctctcggattgtaagtttgcgagagcttccatcactttcataacctataaaccagaaatgttcaatctttgtaatccttttcccaatattaaagaaaaaaagaacaagcaaatacaagaaagaggttataaacagatatggctataaaatttctattctttcacataactcatgagacaaacatccatatcaagagtgatttataacacagagataaaagtcatgggagaatttcaaaagttagacaatgcaagatggggagaaataggcatatgatcataccaaaaatatggactttactcttctaaaatgagaaattatataagggtgcattcacaatctatgaagcacggacactccagtcccttgtcgtgtccggtgtccgacacgcgtccgtgtcagtgtccgacaccgacacgacacccgtattacgttctatattttggacattacaggtgtccacgtgtccgtgtccgtgttggtgtttcatagttcacaattgatttgagtcaaaataacttgtaaacatgagccactccaaactaaggataaatacatccttactttcccacttcacattttttctcaccttagaggagtcgaatttttagtcaattttcaaactttcatgctagctattttccacccatacaactactactgctaaacacattatcttggagaaacaaatcatattccaacgttattgtttctactctaaatttgtatactgtgcggtataagagggaaggataaggtaacatcaaaggcaagctctttcatagtatcattggtattttaatgatgtggcagcaatataatcactttgtaacttgtgatttcgaaggcactactcttgctttcaattttttccttcaagattctttttttcattaataatat

SEQ ID NO: 7799 - DNA, 1034 bp, Glycine max
  Gm_smallRNAprecursor_632
cattgaggtaagtttgtctcctgatatttctcttttgtgaaatggtcaagaacttcgcactcactttcttcaagtttttacctaggggtatggtgaaatcatcatccctttctccaaacaactgcacgagctgctctcggattgtaagtttgcgagagcttccatcactttcataacctataaaccagaaatgttcaatctttgtaatccttttcccaatattaaagaaaaaaagaacaagcaaatacaagaaagaggttataaacagatatggctataaaatttctattctttcacataactcatgagacaaacatccatatcaagagtgatttataacacagagataaaagtcatgggagaatttcaaaagttagacaatgcaagatggggagaaataggcatatgatcataccaaaaatatggactttactcttctaaaatgagaaattatataagggtgcattcacaatctatgaagcacggacactccagtcccttgtcgtgtccggtgtccgacacgcgtccgtgtcagtgtccgacaccgacacgacacccgtattacgttctatattttggacattacaggtgtccacgtgtccgtgtccgtgttggtgtttcatagttcacaattgatttgagtcaaaataacttgtaaacatgagccactccaaactaaggataaatacatccttactttcccacttcacattttttctcaccttagaggagtcgaatttttagtcaattttcaaactttcatgctagctattttccacccatacaactactactgctaaacacattatcttggagaaacaaatcatattccaacgttattgtttctactctaaatttgtatactgtgcggtataagagggaaggataaggtaacatcaaaggcaagctctttcatagtatcattggtattttaatgatgtggcagcaatataatcactttgtaacttgtgatttcgaaggcactactcttgctttcaattttttccttcaagattctttttttcattaataat

SEQ ID NO: 7800 - DNA, 1033 bp, Glycine max
  Gm_smallRNAprecursor_633
ggtaagtttgtctcctgatatttctcttttgtgaaatggtcaagaacttcgcactcactttcttcaagtttttacctaggggtatggtgaaatcatcatccctttctccaaacaactgcacgagctgctctcggattgtaagtttgcgagagcttccatcactttcataacctataaaccagaaatgttcaatctttgtaatccttttcccaatattaaagaaaaaaagaacaagcaaatacaagaaagaggttataaacagatatggctataaaatttctattctttcacataactcatgagacaaacatccatatcaagagtgatttataacacagagataaaagtcatgggagaatttcaaaagttagacaatgcaagatggggagaaataggcatatgatcataccaaaaatatggactttactcttctaaaatgagaaattatataagggtgcattcacaatctatgaagcacggacactccagtcccttgtcgtgtccggtgtccgacacgcgtccgtgtcagtgtccgacaccgacacgacacccgtattacgttctatattttggacattacaggtgtccacgtgtccgtgtccgtgttggtgtttcatagttcacaattgatttgagtcaaaataacttgtaaacatgagccactccaaactaaggataaatacatccttactttcccacttcacattttttctcaccttagaggagtcgaatttttagtcaattttcaaactttcatgctagctattttccacccatacaactactactgctaaacacattatcttggagaaacaaatcatattccaacgttattgtttctactctaaatttgtatactgtgcggtataagagggaaggataaggtaacatcaaaggcaagctctttcatagtatcattggtattttaatgatgtggcagcaatataatcactttgtaacttgtgatttcgaaggcactactcttgctttcaattttttccttcaagattctttttttcattaataatattag

SEQ ID NO: 7801 - DNA, 1032 bp, Glycine max
  Gm_smallRNAprecursor_634
gtaagtttgtctcctgatatttctcttttgtgaaatggtcaagaacttcgcactcactttcttcaagtttttacctaggggtatggtgaaatcatcatccctttctccaaacaactgcacgagctgctctcggattgtaagtttgcgagagcttccatcactttcataacctataaaccagaaatgttcaatctttgtaatccttttcccaatattaaagaaaaaaagaacaagcaaatacaagaaagaggttataaacagatatggctataaaatttctattctttcacataactcatgagacaaacatccatatcaagagtgatttataacacagagataaaagtcatgggagaatttcaaaagttagacaatgcaagatggggagaaataggcatatgatcataccaaaaatatggactttactcttctaaaatgagaaattatataagggtgcattcacaatctatgaagcacggacactccagtcccttgtcgtgtccggtgtccgacacgcgtccgtgtcagtgtccgacaccgacacgacacccgtattacgttctatattttggacattacaggtgtccacgtgtccgtgtccgtgttggtgtttcatagttcacaattgatttgagtcaaaataacttgtaaacatgagccactccaaactaaggataaatacatccttactttcccacttcacattttttctcaccttagaggagtcgaatttttagtcaattttcaaactttcatgctagctattttccacccatacaactactactgctaaacacattatcttggagaaacaaatcatattccaacgttattgtttctactctaaatttgtatactgtgcggtataagagggaaggataaggtaacatcaaaggcaagctctttcatagtatcattggtattttaatgatgtggcagcaatataatcactttgtaacttgtgatttcgaaggcactactcttgctttcaattttttccttcaagattctttttttcattaataatattag

SEQ ID NO: 7802 - DNA, 1081 bp, Glycine max
  Gm_smallRNAprecursor_635
gtaagtttgtctcctgatatttctcttttgtgaaatggtcaagaacttcgcactcactttcttcaagtttttacctaggggtatggtgaaatcatcatccctttctccaaacaactgcacgagctgctctcggattgtaagtttgcgagagcttccatcactttcataacctataaaccagaaatgttcaatctttgtaatccttttcccaatattaaagaaaaaaagaacaagcaaatacaagaaagaggttataaacagatatggctataaaatttctattctttcacataactcatgagacaaacatccatatcaagagtgatttataacacagagataaaagtcatgggagaatttcaaaagttagacaatgcaagatggggagaaataggcatatgatcataccaaaaatatggactttactcttctaaaatgagaaattatataagggtgcattcacaatctatgaagcacggacactccagtcccttgtcgtgtccggtgtccgacacgcgtccgtgtcagtgtccgacaccgacacgacacccgtattacgttctatattttggacattacaggtgtccacgtgtccgtgtccgtgttggtgtttcatagttcacaattgatttgagtcaaaataacttgtaaacatgagccactccaaactaaggataaatacatccttactttcccacttcacattttttctcaccttagaggagtcgaatttttagtcaattttcaaactttcatgctagctattttccacccatacaactactactgctaaacacattatcttggagaaacaaatcatattccaacgttattgtttctactctaaatttgtatactgtgcggtataagagggaaggataaggtaacatcaaaggcaagctctttcatagtatcattggtattttaatgatgtggcagcaatataatcactttgtaacttgtgatttcgaaggcactactcttgctttcaattttttccttcaagattctttttttcattaataatattagaacaagtacattctccagtgtatatcttcggcatatttcatttaaacta

SEQ ID NO: 7803 - DNA, 1082 bp, Glycine max
  Gm_smallRNAprecursor_636
gtaagtttgtctcctgatatttctcttttgtgaaatggtcaagaacttcgcactcactttcttcaagtttttacctaggggtatggtgaaatcatcatccctttctccaaacaactgcacgagctgctctcggattgtaagtttgcgagagcttccatcactttcataacctataaaccagaaatgttcaatctttgtaatccttttcccaatattaaagaaaaaaagaacaagcaaatacaagaaagaggttataaacagatatggctataaaatttctattctttcacataactcatgagacaaacatccatatcaagagtgatttataacacagagataaaagtcatgggagaatttcaaaagttagacaatgcaagatggggagaaataggcatatgatcataccaaaaatatggactttactcttctaaaatgagaaattatataagggtgcattcacaatctatgaagcacggacactccagtcccttgtcgtgtccggtgtccgacacgcgtccgtgtcagtgtccgacaccgacacgacacccgtattacgttctatattttggacattacaggtgtccacgtgtccgtgtccgtgttggtgtttcatagttcacaattgatttgagtcaaaataacttgtaaacatgagccactccaaactaaggataaatacatccttactttcccacttcacattttttctcaccttagaggagtcgaatttttagtcaattttcaaactttcatgctagctattttccacccatacaactactactgctaaacacattatcttggagaaacaaatcatattccaacgttattgtttctactctaaatttgtatactgtgcggtataagagggaaggataaggtaacatcaaaggcaagctctttcatagtatcattggtattttaatgatgtggcagcaatataatcactttgtaacttgtgatttcgaaggcactactcttgctttcaattttttccttcaagattctttttttcattaataatattagaacaagtacattctccagtgtatatcttcggcatatttcatttaaactaa

SEQ ID NO: 7804 - DNA, 1054 bp, Glycine max
  Gm_smallRNAprecursor_637
ttgtgaaatggtcaagaacttcgcactcactttcttcaagtttttacctaggggtatggtgaaatcatcatccctttctccaaacaactgcacgagctgctctcggattgtaagtttgcgagagcttccatcactttcataacctataaaccagaaatgttcaatctttgtaatccttttcccaatattaaagaaaaaaagaacaagcaaatacaagaaagaggttataaacagatatggctataaaatttctattctttcacataactcatgagacaaacatccatatcaagagtgatttataacacagagataaaagtcatgggagaatttcaaaagttagacaatgcaagatggggagaaataggcatatgatcataccaaaaatatggactttactcttctaaaatgagaaattatataagggtgcattcacaatctatgaagcacggacactccagtcccttgtcgtgtccggtgtccgacacgcgtccgtgtcagtgtccgacaccgacacgacacccgtattacgttctatattttggacattacaggtgtccacgtgtccgtgtccgtgttggtgtttcatagttcacaattgatttgagtcaaaataacttgtaaacatgagccactccaaactaaggataaatacatccttactttcccacttcacattttttctcaccttagaggagtcgaatttttagtcaattttcaaactttcatgctagctattttccacccatacaactactactgctaaacacattatcttggagaaacaaatcatattccaacgttattgtttctactctaaatttgtatactgtgcggtataagagggaaggataaggtaacatcaaaggcaagctctttcatagtatcattggtattttaatgatgtggcagcaatataatcactttgtaacttgtgatttcgaaggcactactcttgctttcaattttttccttcaagattctttttttcattaataatattagaacaagtacattctccagtgtatatcttcggcatatttcatttaaacta

SEQ ID NO: 7805 - DNA, 1093 bp, Glycine max
  Gm_smallRNAprecursor_638
attataatgtaacataattgctcatctgttacaaacggagtcaaaagttaagagaaaaccatcaaatactaaagttgaatgttgatgtaccgttcaaaattcggctagcaaaaggaaagcagtaccacagtactacaaaccaaaagaaagcagtacacttaacatctcacattccagaagttgttgtctgttgttttaattaaactatgacagtttgagctagctagtagtacactagtacccataagtgaaagtagtacagctaaattttcatagcactgacatcattcatgtactacaaagtacaaaacattacttcttctgggatcattatatagggattggattgaatcatacctgcattcaagagtgcattttgtgcgtaatgtagttaattagacaaatttctaatgtgagaatctttctgagaatgagatgttgctaaatatttcggatgttgtcgacaaggatgaggtaataatagttagagacaggacaaagcaggggaacaggcagagcatggatggagctatcaacacaatattgtcaagaaactgagagtgagaggagaaatatgttgtggttctgctcatgcactgcctcttccctggctctgtctccatttctccttcccttatttattttttgatttattgagtatgatctgttttcaaatgtgttcataggttcaacttattaaggtacgaacatactctgggcattgaaaactggtttgactcttgaacatattccgcaccactaatctttcttgtaatccaggctcacgcacgatcactataaggtcccacattcttagtggcctaatcgttggaaaatgctactttggcactacttgatgaattgtatggctgggatttttttccccttgcttgtagaatcctctcaatttatgtaaccatcgtgtactcatttacatgtcatcaaattttgaatgagatgtgatatacatagaacaatttgtatgacctcattttctgtgtttatttctctccatcaatatcattttctaaatctcaaaattctctcttttttcttagttgtagaagttattgtttaagtaacatttctcatt

SEQ ID NO: 7806 - DNA, 1090 bp, Glycine max
  Gm_smallRNAprecursor_639
ttataatgtaacataattgctcatctgttacaaacggagtcaaaagttaagagaaaaccatcaaatactaaagttgaatgttgatgtaccgttcaaaattcggctagcaaaaggaaagcagtaccacagtactacaaaccaaaagaaagcagtacacttaacatctcacattccagaagttgttgtctgttgttttaattaaactatgacagtttgagctagctagtagtacactagtacccataagtgaaagtagtacagctaaattttcatagcactgacatcattcatgtactacaaagtacaaaacattacttcttctgggatcattatatagggattggattgaatcatacctgcattcaagagtgcattttgtgcgtaatgtagttaattagacaaatttctaatgtgagaatctttctgagaatgagatgttgctaaatatttcggatgttgtcgacaaggatgaggtaataatagttagagacaggacaaagcaggggaacaggcagagcatggatggagctatcaacacaatattgtcaagaaactgagagtgagaggagaaatatgttgtggttctgctcatgcactgcctcttccctggctctgtctccatttctccttcccttatttattttttgatttattgagtatgatctgttttcaaatgtgttcataggttcaacttattaaggtacgaacatactctgggcattgaaaactggtttgactcttgaacatattccgcaccactaatctttcttgtaatccaggctcacgcacgatcactataaggtcccacattcttagtggcctaatcgttggaaaatgctactttggcactacttgatgaattgtatggctgggatttttttccccttgcttgtagaatcctctcaatttatgtaaccatcgtgtactcatttacatgtcatcaaattttgaatgagatgtgatatacatagaacaatttgtatgacctcattttctgtgtttatttctctccatcaatatcattttctaaatctcaaaattctctcttttttcttagttgtagaagttattgtttaagtaacatttctca

SEQ ID NO: 7807 - DNA, 1090 bp, Glycine max; identical to SEQ ID NO: 7806
  Gm_smallRNAprecursor_640

SEQ ID NO: 7808 - DNA, 1092 bp, Glycine max
  Gm_smallRNAprecursor_641
ttataatgtaacataattgctcatctgttacaaacggagtcaaaagttaagagaaaaccatcaaatactaaagttgaatgttgatgtaccgttcaaaattcggctagcaaaaggaaagcagtaccacagtactacaaaccaaaagaaagcagtacacttaacatctcacattccagaagttgttgtctgttgttttaattaaactatgacagtttgagctagctagtagtacactagtacccataagtgaaagtagtacagctaaattttcatagcactgacatcattcatgtactacaaagtacaaaacattacttcttctgggatcattatatagggattggattgaatcatacctgcattcaagagtgcattttgtgcgtaatgtagttaattagacaaatttctaatgtgagaatctttctgagaatgagatgttgctaaatatttcggatgttgtcgacaaggatgaggtaataatagttagagacaggacaaagcaggggaacaggcagagcatggatggagctatcaacacaatattgtcaagaaactgagagtgagaggagaaatatgttgtggttctgctcatgcactgcctcttccctggctctgtctccatttctccttcccttatttattttttgatttattgagtatgatctgttttcaaatgtgttcataggttcaacttattaaggtacgaacatactctgggcattgaaaactggtttgactcttgaacatattccgcaccactaatctttcttgtaatccaggctcacgcacgatcactataaggtcccacattcttagtggcctaatcgttggaaaatgctactttggcactacttgatgaattgtatggctgggatttttttccccttgcttgtagaatcctctcaatttatgtaaccatcgtgtactcatttacatgtcatcaaattttgaatgagatgtgatatacatagaacaatttgtatgacctcattttctgtgtttatttctctccatcaatatcattttctaaatctcaaaattctctcttttttcttagttgtagaagttattgtttaagtaacatttctcatt

SEQ ID NO: 7809 - DNA, 1092 bp, Glycine max; identical to SEQ ID NO: 7808
  Gm_smallRNAprecursor_642

SEQ ID NO: 7810 - DNA, 1092 bp, Glycine max; identical to SEQ ID NO: 7808
  Gm_smallRNAprecursor_643

SEQ ID NO: 7811 - DNA, 1092 bp, Glycine max; identical to SEQ ID NO: 7808
  Gm_smallRNAprecursor_644

SEQ ID NO: 7812 - DNA, 1093 bp, Glycine max
  Gm_smallRNAprecursor_645
ttataatgtaacataattgctcatctgttacaaacggagtcaaaagttaagagaaaaccatcaaatactaaagttgaatgttgatgtaccgttcaaaattcggctagcaaaaggaaagcagtaccacagtactacaaaccaaaagaaagcagtacacttaacatctcacattccagaagttgttgtctgttgttttaattaaactatgacagtttgagctagctagtagtacactagtacccataagtgaaagtagtacagctaaattttcatagcactgacatcattcatgtactacaaagtacaaaacattacttcttctgggatcattatatagggattggattgaatcatacctgcattcaagagtgcattttgtgcgtaatgtagttaattagacaaatttctaatgtgagaatctttctgagaatgagatgttgctaaatatttcggatgttgtcgacaaggatgaggtaataatagttagagacaggacaaagcaggggaacaggcagagcatggatggagctatcaacacaatattgtcaagaaactgagagtgagaggagaaatatgttgtggttctgctcatgcactgcctcttccctggctctgtctccatttctccttcccttatttattttttgatttattgagtatgatctgttttcaaatgtgttcataggttcaacttattaaggtacgaacatactctgggcattgaaaactggtttgactcttgaacatattccgcaccactaatctttcttgtaatccaggctcacgcacgatcactataaggtcccacattcttagtggcctaatcgttggaaaatgctactttggcactacttgatgaattgtatggctgggatttttttccccttgcttgtagaatcctctcaatttatgtaaccatcgtgtactcatttacatgtcatcaaattttgaatgagatgtgatatacatagaacaatttgtatgacctcattttctgtgtttatttctctccatcaatatcattttctaaatctcaaaattctctcttttttcttagttgtagaagttattgtttaagtaacatttctcattt

SEQ ID NO: 7813 - DNA, 1093 bp, Glycine max; identical to SEQ ID NO: 7812
  Gm_smallRNAprecursor_646

SEQ ID NO: 7814 - DNA, 1060 bp, Glycine max
  Gm_smallRNAprecursor_647
acctagggagcctctcccaactttgtcaaatacacatgccatactcaaaaacttgcagccaacacgcaaagcctacgtgcactcatacattattcttctccaaaggaaaaactaaaaaggcaagccaacatgggggagccacgtatgcatgtggggcccaacactctggatccaaagggctcggtcgtaccagtactctgcactgcagtgaacctcaaatgaacaaaggggttggtgacctttttatgaaattaaggcagacaagactccaatcgggtttccttcgatatcccttctttgaatttctgtgtatacgctgccatcatggcattccaaggcgtatatgactttcattttcagttcactcattgctcctgccacgctgcttacattaatctctctctctcaagttgctacctataaatactgagcctctgctaccaccctcgcatactcaaggcgtgcagtaatttttcttcactgggtgagaagctacttgttggagaagcagggcacgtgcaactctctcggctctctttaagcgccattgaaccctttgcacgtgctccccttctccaacacggcttcctcaccctccattccctctccttctcggttactccggcgagtcatgccacttcatgaaggtagttgctttccttccctctttgttaatttcccccgtaaatttagttccaaatctacatcatgactcttcttcttcttgctgctgttggaaacagtgtgaaggatgtcaatgttacattgtggtctccaacaaatgaaagattaattaccattttatctgaccaccctatgagcagtaatttcatttcatcactgagataacatatgccatgtgtatatataactctggatgtttaagaactatgaacacattttgcttttcttctgtggacggtgccaatcactactagtttctagtttgaaagtggacactataaattgtacgttcgcttctaagcagtagtttctgaagttgaggacatttagtttcaattcaattttttgagtctcggaatgcaaggtaattcaggca

SEQ ID NO: 7815 - DNA, 1051 bp, Glycine max
  Gm_smallRNAprecursor_648
caataatataataaaacaaaatactaaattataaatttaaaaatactaaaataattaaatctaataatatattattataggatgataacttactgatattatagtaatgatagatcattcttatcttaaatttaatatatgttaaactataataaacataaaataatctaaatgattaattgttgttattatgaatcattttcaatgaaaaatatgaatgatatcttttatcttcttagctttaatggtagttttatgtagttctagaataacctaacttttaaccctcttacaattgaaaaatagtaatatatagaggaaatgaggcttaacttgcgaacaatatatatttaaatacaataaagtataatcagcatttgtggtataaatctagtcggaatcatgtttgttttcttcatgcaggggcatatcatcatggttatcaaactctcaagttaactcgctaactcttacgagtttacgagtccacttgttctctgcgagttgactcttgagtaaactcttttcttagtagactcagtaaactctataaactctaagtaaactcggtagactctcgagtttaccaccgagtcaacgagttagcaagttaaaaaaattagacaaaaatgtaagtcattttttattgttttctgtctgtttagcattcaacataccttttaacatgttattctcaaatacaaaattctcacctttaataatatcaaactcttgttctctaataaaatcaaatactcgatgagaataatctaccactactataacctctacaagttattgtttagtggtgatgtattattattagacttggttatttaaatattctgaactttatgatttactgttttactttattatattgttaaaatgtttaattagtatgttatttatagatattttgttattatttttatatgaaatagactcttacgagtctacgagttgaatctacgagtcgagtctataaaactctcacgagttgcgtaaactgtcgagtttgataaccttgcataccattaggccttctaat

SEQ ID NO: 7816 - DNA, 1165 bp, Glycine max
  Gm_smallRNAprecursor_649
ttcagataaccctttgagtgttgctaggtgcatccagcattattgctggtgcacccagcattctaataaaatgacaaaattacccttgcttaattttcctcttccggatcaagttgatccgaaagtctcttccggatcaacttgatccataagagacttccggatcaacttgattcgtaacttccggatcaacttaatccggaaatctcttacggagcaagttgatccggaagaggaaaaataaaatttttgttaattatacaagatatttaaagatatttatttcattaattataatataattaaatatttttatttattttactaattataatatatttataaatattgatttatcataaataattaatgctaatcaatcataatcataattcatgctaatcaatcaatcatgctaatcaatcataattccctaaaagaggatataaataatttcagagttagcaattttcagaatcaatcaatcatgctaatcaatcaatcataatcataattcatgctaatcaatcaattatgttaatcaatcataattccctaaaagaggatataaataatttcagagttagcaatttcaaaaactacattatgattgctaactctgaaattatttatatcctcttttagagaattatgattgattagcatgaattatgattatgattgattagcattaattatttataataaatcaatatttataaatatattataattaataaaataaatatctttaaatatcttgtataattaacaaaatttttatttttcctcttccgaatcaagttgatccggaagtctcttccgaatcaacttgatctgtaagagacttccagattaagttgatccggttgatccgtaagagacttccgaatcaacttgatccagaagaggaaaatcaagtaagggcaatttcgtcatttttttagaatgctggatgcaccagcaataatgctgggtgcacctagcaacactctaaccctttacagccaaacattggatctaacaggtgacgaaatggcaaagatggcaaaatggaaggtcaccttttaatagatctatgatatcataggtcaaaatggaaggtcgctttgcctgtttatttcttaaaaaaggagaataacatgtatcttgttagggtaaatct

SEQ ID NO: 7817 - DNA, 1157 bp, Glycine max
  Gm_smallRNAprecursor_650
aagaccagtaaaacaactaccaagaagattcgcaccagaaatcatgtccaaaattaaggaagagatcgaaaggctgctgaggtgtaaattcatcaggtctgccaggtatgtcgaatggttagcaaatatagtccctgtcattaaaaagaatggaactctaagagtatgcatagattttagggatttaaacaatgctacacctaaagatgaatatgctatgccagtagcagaaatgttggtagattcagcagctggtttcgaatttttaagcatgttagatggttattctggttataaccaaatatttattgctgaaaatgatgtgtcaaaaacagcatttcgatgccctggtgctttaggcacttatgaatgggtggttatgccctttgggttgaaaaatgctggggccacttatcaaagggccatgaattccatgtttcatgattttattgacacatttatgcaagtttatattgatgatataatcatcaaatcctcttcagaagatagccatttggattaccttaggcaatctttcgaacgaatgaggaaacatggattaaaaatgaatccattaaagtgtgctttttgtgtgcgtgcaggagatttccttggttttgtggtgcataaaaaaggcattgagataaatcaaaacaagacaaaggctattcttgagacgaagcctccttcgactaaaaaacagcttcagtctttgctaggaaaaatcaacttcttgaagcgattcatttcgaatctaagtggcaaagctcaaattttttcgccattacttcgactcaagaaagatgaaccattcaaatggaatgaagagcatcaaaaggctttcgatgaaattaaagaatatctgatcaagcctcccgtgttaatgcctcctagtcgaaacaagactatgaagttgtatattgctgcgtctgacaagaccattggtagcatgttggctcaggaagatgatgatggcgtagagcatgcaatttattatcttagtcgtgtactaaatgatgcagaaactagatatactgccatagaaaaactttgtctttgtttgtatttctcttgtgcaaaacttaagcaatatataaagcctgttgatgtttatgtgtattctcattatgatattattaagcacatgttgtcaaaac

SEQ ID NO: 7818 - DNA, 1114 bp, Glycine max
  Gm_smallRNAprecursor_651
aatctaagtggcaaagctcaaattttttcgccattacttcgactcaagaaagatgaaccattcaaatggaatgaagagcatcaaaaggctttcgatgaaattaaagaatatctgatcaagcctcccgtgttaatgcctcctagtcgaaacaagactatgaagttgtatattgctgcgtctgacaagaccattggtagcatgttggctcaggaagatgatgatggcgtagagcatgcaatttattatcttagtcgtgtactaaatgatgcagaaactagatatactgccatagaaaaactttgtctttgtttgtatttctcttgtgcaaaacttaagcaatatataaagcctgttgatgtttatgtgtattctcattatgatattattaagcacatgttgtcaaaacctattttacacagtagaattggaaaatgggctttagcattaacagaatattctttaacgtacaagcctttgaaatctgttaagggtcaaattgtggcagattttattgtagatcactcagtaatcgagatgccgcaagactatgtcgatacagagccttggattttgtatttcgatggatcgaaacacaaacatggaactggaattggagttttaataatatcccccaataaagttccaactaagttcaaatataaaatcaaagggctttgttctaataatgaggctgagtatgaagctctaattacaggccttgaaattttaattagcctgggggcaagaaatgttaacataaggggtgattcagaattagtgttgaggcaattaacacaagaatacaaatgtgttaatgaacacttagcgaaatattttgttatagcaagttctcttctgaatcatttcgattatattaacattgagcatatacctcgacaagaaaaccaagaagcaaatgatttagcccaaatagcttcagggtacaaaatgtcgaaggaaaagttaactcagttgatcgaaataaaagataaactggtgttaccagagccattaagcactaaattgccaatgccaaaacttgtgggggcaagtataccacaaaataatgaagatgaaagcatgaatgatctccaggaaaaaattcaaattttgg

SEQ ID NO: 7819 - DNA, 1110 bp, Glycine max
  Gm_smallRNAprecursor_652
tattgtagatcactcagtaatcgagatgccgcaagactatgtcgatacagagccttggattttgtatttcgatggatcgaaacacaaacatggaactggaattggagttttaataatatcccccaataaagttccaactaagttcaaatataaaatcaaagggctttgttctaataatgaggctgagtatgaagctctaattacaggccttgaaattttaattagcctgggggcaagaaatgttaacataaggggtgattcagaattagtgttgaggcaattaacacaagaatacaaatgtgttaatgaacacttagcgaaatattttgttatagcaagttctcttctgaatcatttcgattatattaacattgagcatatacctcgacaagaaaaccaagaagcaaatgatttagcccaaatagcttcagggtacaaaatgtcgaaggaaaagttaactcagttgatcgaaataaaagataaactggtgttaccagagccattaagcactaaattgccaatgccaaaacttgtgggggcaagtataccacaaaataatgaagatgaaagcatgaatgatctccaggaaaaaattcaaattttggccattgacaatatgttagataatgattggagaaagtccattattgaatatttggaaaatccaataggcaatgtggctcgaaagatcaaatatagggctttaaattacgtgattatgggaaatgatttgtttaaaaagactgcagaaggagtgttgctgaaatgtctaagtgaatcagaagcatacttggcagtttcccatgttcacagtggggcttgtggatcacatcaagcaggccataaaatgaaatgacttttatttcgacaaggtttgtattggccttcgatgttaaaagactgcatagaatttgctaaaggctgtcaggaatgccaaaagcatgcagggatacagcatgtacctgctaatgagttacactccataatcaaaccttggcctttcagaggatgggctttggacttaattggtgaaatcaagcctgcttcttctaagaaccagcgttatattatagttggtatcgattactttacaaaatggatcgaagcagt

SEQ ID NO: 7820 - DNA, 1082 bp, Glycine max
  Gm_smallRNAprecursor_653
cagtaatcgagatgccgcaagactatgtcgatacagagccttggattttgtatttcgatggatcgaaacacaaacatggaactggaattggagttttaataatatcccccaataaagttccaactaagttcaaatataaaatcaaagggctttgttctaataatgaggctgagtatgaagctctaattacaggccttgaaattttaattagcctgggggcaagaaatgttaacataaggggtgattcagaattagtgttgaggcaattaacacaagaatacaaatgtgttaatgaacacttagcgaaatattttgttatagcaagttctcttctgaatcatttcgattatattaacattgagcatatacctcgacaagaaaaccaagaagcaaatgatttagcccaaatagcttcagggtacaaaatgtcgaaggaaaagttaactcagttgatcgaaataaaagataaactggtgttaccagagccattaagcactaaattgccaatgccaaaacttgtgggggcaagtataccacaaaataatgaagatgaaagcatgaatgatctccaggaaaaaattcaaattttggccattgacaatatgttagataatgattggagaaagtccattattgaatatttggaaaatccaataggcaatgtggctcgaaagatcaaatatagggctttaaattacgtgattatgggaaatgatttgtttaaaaagactgcagaaggagtgttgctgaaatgtctaagtgaatcagaagcatacttggcagtttcccatgttcacagtggggcttgtggatcacatcaagcaggccataaaatgaaatgacttttatttcgacaaggtttgtattggccttcgatgttaaaagactgcatagaatttgctaaaggctgtcaggaatgccaaaagcatgcagggatacagcatgtacctgctaatgagttacactccataatcaaaccttggcctttcagaggatgggctttggacttaattggtgaaatcaagcctgcttcttctaagaaccagcgttatattatagttggtatcgattactttacaaaa

SEQ ID NO: 7821 - DNA, 1086 bp, Glycine max
  Gm_smallRNAprecursor_654
gtttctgaatcgaattagcggccttctcctggagttccttgcgtttggcctgctccgtcacaattttttgccttagatcatcgacctgagacagcaaatccgtaatagttgcctcccaggaggagatgttatcatcacaggctttgatctcagaagatccttctttcgcctctttggtgagacgttcgacttcatgttgagcagctcgcgctttctcgagcagaaggatatgtgcctgtttctgggcatccagtctggcgccattttcgcgttttttctgcacagtacttgcaaattggtcaatgatggcctcgatttggataactttgcctagaatctcatcagaggtaagggggttgtgcaatttcttcaaaaagttcaggtgcccaaaggcagcagaggggttctcttcaatggatttaagcacatcttcccgtgcgtattccatggataacttcaagagcagagaatcttggcgtactgaagagtttatttcggcatcagatgaggacgaagcaccaggaatcttttcactagaggtgttggcttgacttgtggtcagcaggagtcgaagggctgcagcagggtcttcgtcttgcatttgaatgaatgtatcttctgcgatccctatgctagcggaaagcttagatgtcgaagacgccgagtaaatgttcgaacctccagcttcagcctcttctacggcctcttcatcggaaaagttttcttcggatgaacttttctgactcgatccatgaggactgctggatccaatgccttgaccttcaccctgttcctcaacattcactgcatccatctcaggagcgggagatgttcgagcatgtgagggtatttcttctatagaaacattttgttgtacctgattcgaattatcatggaaaaagcttaacaaatagtttcgtataagctatgatttaaaacacattaagaggatgatacctcgacggcaggttgttcttgtggtgagtccggttgatcgacagggttgcccatctcagcaacagaaggagtagcctctacttcagtgccgtcaatatcggtcgaaggtggttggacgtcaacaggttg

SEQ ID NO: 7822 - DNA, 1066 bp, Glycine max
  Gm_smallRNAprecursor_655
ttttttggcacattttaaaaaaatactttttaataatttttcaataattcctaatataacctattttattacttaaaatattgaatcccattgatttagaaattaaatttactagtacatttttagtagaattaatataaatttcacctaataaaaaaacaatcgtagcttgaaacaatgaaactgcagaatacagaataaaaaaaaatcgcaatattaaaatatactagtagtaacctagtttattggttccggaagtgcattatgacgtggaaccttctcagccgttcacgtgcgacggtaattacgaagattcgctggcttatcacatttcacgaggtgaggttcacggatttaaattagagccaaagatgcacaattgaattgactctctccttcaaataccagtggtgatattttccctttttcacttctcattttctcctctttttgccctaatcatatgaaggtgttaacacgttctctatgttggattttatggaagtggagggataggtaaaacaactacttctgtaaaagtaattgttatagttagttgttgttttacctattccaccaattccatctatcccttcccttcaagttttctgatttcttctgaagaaggcaagtatagtgggtttttactccggttttgtcttccaataaattgattttaagatttttaactgaagttttgtttggttatttgttgggaagttcacggatctgagtttatgttttgattgttctcggtttataatggagatctcagatctctgattatgatgtatttgttgccccgatttagtagatctgttatttcaaaattgtgagaataaattaaattaagtaaactagagaaacaaaacttaaattaggtttttttctctggttttctatgttagtatttaattttaagattgttaacagcaattttgtttgattttttgtttgtttgtttatttttccttttttttctctagaggttcatagatctgggagtctaagtttggaagttgttagtttatagctgagatatcagattttgttgtatttggcgtcc

SEQ ID NO: 7823 - DNA, 1052 bp, Glycine max
  Gm_smallRNAprecursor_656
gcacattttaaaaaaatactttttaataatttttcaataattcctaatataacctattttattacttaaaatattgaatcccattgatttagaaattaaatttactagtacatttttagtagaattaatataaatttcacctaataaaaaaacaatcgtagcttgaaacaatgaaactgcagaatacagaataaaaaaaaatcgcaatattaaaatatactagtagtaacctagtttattggttccggaagtgcattatgacgtggaaccttctcagccgttcacgtgcgacggtaattacgaagattcgctggcttatcacatttcacgaggtgaggttcacggatttaaattagagccaaagatgcacaattgaattgactctctccttcaaataccagtggtgatattttccctttttcacttctcattttctcctctttttgccctaatcatatgaaggtgttaacacgttctctatgttggattttatggaagtggagggataggtaaaacaactacttctgtaaaagtaattgttatagttagttgttgttttacctattccaccaattccatctatcccttcccttcaagttttctgatttcttctgaagaaggcaagtatagtgggtttttactccggttttgtcttccaataaattgattttaagatttttaactgaagttttgtttggttatttgttgggaagttcacggatctgagtttatgttttgattgttctcggtttataatggagatctcagatctctgattatgatgtatttgttgccccgatttagtagatctgttatttcaaaattgtgagaataaattaaattaagtaaactagagaaacaaaacttaaattaggtttttttctctggttttctatgttagtatttaattttaagattgttaacagcaattttgtttgattttttgtttgtttgtttatttttccttttttttctctagaggttcatagatctgggagtctaagtttggaagttgttagtttatagctgagatatcagattttgttgtattt

SEQ ID NO: 7824 - DNA, 1048 bp, Glycine max
  Gm_smallRNAprecursor_657
acattttaaaaaaatactttttaataatttttcaataattcctaatataacctattttattacttaaaatattgaatcccattgatttagaaattaaatttactagtacatttttagtagaattaatataaatttcacctaataaaaaaacaatcgtagcttgaaacaatgaaactgcagaatacagaataaaaaaaaatcgcaatattaaaatatactagtagtaacctagtttattggttccggaagtgcattatgacgtggaaccttctcagccgttcacgtgcgacggtaattacgaagattcgctggcttatcacatttcacgaggtgaggttcacggatttaaattagagccaaagatgcacaattgaattgactctctccttcaaataccagtggtgatattttccctttttcacttctcattttctcctctttttgccctaatcatatgaaggtgttaacacgttctctatgttggattttatggaagtggagggataggtaaaacaactacttctgtaaaagtaattgttatagttagttgttgttttacctattccaccaattccatctatcccttcccttcaagttttctgatttcttctgaagaaggcaagtatagtgggtttttactccggttttgtcttccaataaattgattttaagatttttaactgaagttttgtttggttatttgttgggaagttcacggatctgagtttatgttttgattgttctcggtttataatggagatctcagatctctgattatgatgtatttgttgccccgatttagtagatctgttatttcaaaattgtgagaataaattaaattaagtaaactagagaaacaaaacttaaattaggtttttttctctggttttctatgttagtatttaattttaagattgttaacagcaattttgtttgattttttgtttgtttgtttatttttccttttttttctctagaggttcatagatctgggagtctaagtttggaagttgttagtttatagctgagatatcagattttgttgtat

SEQ ID NO: 7825 - DNA, 1057 bp, Glycine max
  Gm_smallRNAprecursor_658
acattttaaaaaaatactttttaataatttttcaataattcctaatataacctattttattacttaaaatattgaatcccattgatttagaaattaaatttactagtacatttttagtagaattaatataaatttcacctaataaaaaaacaatcgtagcttgaaacaatgaaactgcagaatacagaataaaaaaaaatcgcaatattaaaatatactagtagtaacctagtttattggttccggaagtgcattatgacgtggaaccttctcagccgttcacgtgcgacggtaattacgaagattcgctggcttatcacatttcacgaggtgaggttcacggatttaaattagagccaaagatgcacaattgaattgactctctccttcaaataccagtggtgatattttccctttttcacttctcattttctcctctttttgccctaatcatatgaaggtgttaacacgttctctatgttggattttatggaagtggagggataggtaaaacaactacttctgtaaaagtaattgttatagttagttgttgttttacctattccaccaattccatctatcccttcccttcaagttttctgatttcttctgaagaaggcaagtatagtgggtttttactccggttttgtcttccaataaattgattttaagatttttaactgaagttttgtttggttatttgttgggaagttcacggatctgagtttatgttttgattgttctcggtttataatggagatctcagatctctgattatgatgtatttgttgccccgatttagtagatctgttatttcaaaattgtgagaataaattaaattaagtaaactagagaaacaaaacttaaattaggtttttttctctggttttctatgttagtatttaattttaagattgttaacagcaattttgtttgattttttgtttgtttgtttatttttccttttttttctctagaggttcatagatctgggagtctaagtttggaagttgttagtttatagctgagatatcagattttgttgtatttggcgtcc

SEQ ID NO: 7826 - DNA, 1114 bp, Glycine max
  Gm_smallRNAprecursor_659
ttaaacaatatgagaatttttacttaattttttttaccatgattaaatgtttagatgagcaaccatatcatgaaacttgacaccgcactttaactcaaaatcttaaagcttaggtttataggtcttctcctcacttatatgatattcaactttttcacttctattcgatatgaaatttcacttcactttagactcacttgggctttctctcccaccctctcctttggctaaagcaataactcttagctccttcagagattctctttatggttttgtgtcatggtggatttgaaagtagcgcaacaatttatttttggcaaaattgcatttttggtcccccagtttatctccagttttggatttggtctcccagtaatttaattcatgaattgagtcttcctattttgtaaaatatgcaatattggtccctcggaccacaattggacgttgaccgttagcaattgatgttgactgtcatgtgtcacgttcttattggatgatgactgtcacgtgtcatgttttgattggctgtcaactccatgatagatgaaatacattgttattttcattgaccaatcagaatatgacacgtgacagtcatcatctaataagaacgtgacatgtgacaatcaacatcacttactacctgtcaacgtccaattgtggtctaggggaccaacattgcacgattttacaaaatagcaggaccaaattcataaattaaattattgggggatcaaatccgaaactaaagataaactgagggactaaaaatgtaattttgtctttattttttgtgtggacaagtaggttattcaacgagtactcatttgttgggtttatgctttgtatgatatattgtttcagctatacaagagtagacatgacaatgggacacgaggtggggacaggtattgtctcctcaatccccgaccctaactccccaacatgtccccatacccgtacccgatatctgacgagttaaaatttattatctcattcccgtacccattggatatcaggtatccccgatcctgtcctgtatccgattcaaattagaaaaatattttttttttgtaaaggaaatattaaaaatttgattttagaaaaaata

SEQ ID NO: 7827 - DNA, 1052 bp, Glycine max
  Gm_smallRNAprecursor_660
atctctcgctttattggtaaaaagtggagaaatttgggaaccacgtttttaaaacgcaacgcaagtatccccgattggttccctggtaaagtggttcttcactttctttgattggcactcgttcgcgtggcatttgaacaaattcctcaactttttacgtcatatgtgagagtataacgtaggagttgggttgatatttgcaaataaataatcactccaacacatggaaaaaataaaataaaagagaatttcactagacaacaatatatatgaaaaaaaaagcagaatatatattgatggtgagtgtgaggtcactaattatctaggtgttggggaatcttacatgaagcctttgagcctttaactttaagtaaagcaatacttttaagagcgtggctgaggcatatatataaaggagttaatgtggatcactactcattcaattcacagagtgaatacgaagagctgggaacgggagattggagcaatcagaatttgtgggaatgggctgattgggaagcaatgtgtgctggtgcaatgcatttaatttcttcccaattccgcccattcctatgatttctgatgattctttcctttccttttgctttttgcaatacgcaatatgcatgtaccttatttttcattccatcctcattattctatgctaatggatagtacttccttcttctccatgtttcttttattgttataacaacacatgataaaattgtaatatgaaacataacttctgcagcctaatttgtttttttcgtgcatttgataaacggcgttggagaaggagtttatgttgtcataggaatagaggcgagcaactctcaaagagatcaatgacgaagcaactcaccgagttagaatcaagatctctgttgtgtgtgtgtgtgtgacgacggttagggttgtaaaattttaaggtttttaaaattttcttattgcttttgtttttggtattcctgttgtgtttgttggactgctagggttgtgcaggtgagggatagaggtgcagaaagctatggtagttttgtcctttaatt

SEQ ID NO: 7828 - DNA, 1052 bp, Glycine max; identical to SEQ ID NO: 7827
  Gm_smallRNAprecursor_661

SEQ ID NO: 7829 - DNA, 1053 bp, Glycine max
  Gm_smallRNAprecursor_662
atctctcgctttattggtaaaaagtggagaaatttgggaaccacgtttttaaaacgcaacgcaagtatccccgattggttccctggtaaagtggttcttcactttctttgattggcactcgttcgcgtggcatttgaacaaattcctcaactttttacgtcatatgtgagagtataacgtaggagttgggttgatatttgcaaataaataatcactccaacacatggaaaaaataaaataaaagagaatttcactagacaacaatatatatgaaaaaaaaagcagaatatatattgatggtgagtgtgaggtcactaattatctaggtgttggggaatcttacatgaagcctttgagcctttaactttaagtaaagcaatacttttaagagcgtggctgaggcatatatataaaggagttaatgtggatcactactcattcaattcacagagtgaatacgaagagctgggaacgggagattggagcaatcagaatttgtgggaatgggctgattgggaagcaatgtgtgctggtgcaatgcatttaatttcttcccaattccgcccattcctatgatttctgatgattctttcctttccttttgctttttgcaatacgcaatatgcatgtaccttatttttcattccatcctcattattctatgctaatggatagtacttccttcttctccatgtttcttttattgttataacaacacatgataaaattgtaatatgaaacataacttctgcagcctaatttgtttttttcgtgcatttgataaacggcgttggagaaggagtttatgttgtcataggaatagaggcgagcaactctcaaagagatcaatgacgaagcaactcaccgagttagaatcaagatctctgttgtgtgtgtgtgtgtgacgacggttagggttgtaaaattttaaggtttttaaaattttcttattgcttttgtttttggtattcctgttgtgtttgttggactgctagggttgtgcaggtgagggatagaggtgcagaaagctatggtagttttgtcctttaatta

SEQ ID NO: 7830 - DNA, 1053 bp, Glycine max; identical to SEQ ID NO: 7829
  Gm_smallRNAprecursor_663

SEQ ID NO: 7831 - DNA, 1051 bp, Glycine max
  Gm_smallRNAprecursor_664
tctctcgctttattggtaaaaagtggagaaatttgggaaccacgtttttaaaacgcaacgcaagtatccccgattggttccctggtaaagtggttcttcactttctttgattggcactcgttcgcgtggcatttgaacaaattcctcaactttttacgtcatatgtgagagtataacgtaggagttgggttgatatttgcaaataaataatcactccaacacatggaaaaaataaaataaaagagaatttcactagacaacaatatatatgaaaaaaaaagcagaatatatattgatggtgagtgtgaggtcactaattatctaggtgttggggaatcttacatgaagcctttgagcctttaactttaagtaaagcaatacttttaagagcgtggctgaggcatatatataaaggagttaatgtggatcactactcattcaattcacagagtgaatacgaagagctgggaacgggagattggagcaatcagaatttgtgggaatgggctgattgggaagcaatgtgtgctggtgcaatgcatttaatttcttcccaattccgcccattcctatgatttctgatgattctttcctttccttttgctttttgcaatacgcaatatgcatgtaccttatttttcattccatcctcattattctatgctaatggatagtacttccttcttctccatgtttcttttattgttataacaacacatgataaaattgtaatatgaaacataacttctgcagcctaatttgtttttttcgtgcatttgataaacggcgttggagaaggagtttatgttgtcataggaatagaggcgagcaactctcaaagagatcaatgacgaagcaactcaccgagttagaatcaagatctctgttgtgtgtgtgtgtgtgacgacggttagggttgtaaaattttaaggtttttaaaattttcttattgcttttgtttttggtattcctgttgtgtttgttggactgctagggttgtgcaggtgagggatagaggtgcagaaagctatggtagttttgtcctttaatt

SEQ ID NO: 7832 - DNA, 1051 bp, Glycine max; identical to SEQ ID NO: 7831
  Gm_smallRNAprecursor_665

SEQ ID NO: 7833 - DNA, 1052 bp, Glycine max
  Gm_smallRNAprecursor_666
tctctcgctttattggtaaaaagtggagaaatttgggaaccacgtttttaaaacgcaacgcaagtatccccgattggttccctggtaaagtggttcttcactttctttgattggcactcgttcgcgtggcatttgaacaaattcctcaactttttacgtcatatgtgagagtataacgtaggagttgggttgatatttgcaaataaataatcactccaacacatggaaaaaataaaataaaagagaatttcactagacaacaatatatatgaaaaaaaaagcagaatatatattgatggtgagtgtgaggtcactaattatctaggtgttggggaatcttacatgaagcctttgagcctttaactttaagtaaagcaatacttttaagagcgtggctgaggcatatatataaaggagttaatgtggatcactactcattcaattcacagagtgaatacgaagagctgggaacgggagattggagcaatcagaatttgtgggaatgggctgattgggaagcaatgtgtgctggtgcaatgcatttaatttcttcccaattccgcccattcctatgatttctgatgattctttcctttccttttgctttttgcaatacgcaatatgcatgtaccttatttttcattccatcctcattattctatgctaatggatagtacttccttcttctccatgtttcttttattgttataacaacacatgataaaattgtaatatgaaacataacttctgcagcctaatttgtttttttcgtgcatttgataaacggcgttggagaaggagtttatgttgtcataggaatagaggcgagcaactctcaaagagatcaatgacgaagcaactcaccgagttagaatcaagatctctgttgtgtgtgtgtgtgtgacgacggttagggttgtaaaattttaaggtttttaaaattttcttattgcttttgtttttggtattcctgttgtgtttgttggactgctagggttgtgcaggtgagggatagaggtgcagaaagctatggtagttttgtcctttaatta

SEQ ID NO: 7834 - DNA, 1041 bp, Glycine max
  Gm_smallRNAprecursor_667
ttgagtctatcaagattcattctaggcaatggaacaatgtataaactagtaagagttatccattattaggatggataatgaatcctaaatcatgccttgggattaaatgaaaaaatcaagagcttttttggggtcggagaaggattggtgtaatataaataatgacaagaaagaaagagaaatttaatgaaaaggatagtagtagagattggaagaatttgtagtatatgccaaacacagataagataagtgtaaaagaaataaaatggtttacccctatggaataagaattgactaagattggcaatgtatccaagaatgtgtgaaagaaacaacttcattgggctttcagtcaggggcgtgggacacaatttggaaacgagtgttgctaggtgcacccaacattattgctggtacatccatcattatttgaaaatggcaaaattacccttattaatttctccccttacggatcaagttgatccataagtcttaaaaataaacttacggatcaacttgatccgtaaaagatttacggatcaacttgatccgtaagtcttaaaaattaacttacggatcaacttgatccgtaaggaatattttctgtctttttatggttagtgctggtgcaccagcaataatgctgggtgcacctagcagcactctttggaaacaaggaagatgctgaaacaagaacaattttgaaacctaaacgctaacacatgaaagtggacttggatcgtgaaatttgggtgttatgatgattatgaacccgaagcttgaagagttaaataaccaggccaatcttggtggttaaactacttgggttttgtgtgtaaaagggcaaagggcaatgtactacatgcatggacaagttttattcgatagaccaaccctttagaactatttgtattttggtgatgagtatgtcttatgttttatttaacatcaacaaattaaactttagcttataaaaaacacaatagtagttacaacatcacatcatcccatatcagatcaataaattttgttaaatattta

SEQ ID NO: 7835 - DNA, 1090 bp, Glycine max
  Gm_smallRNAprecursor_668
gcatgtggtcttcggtttccatttcaatgtctatctaagacgcatatttgtcatccttaagtttgaggattcttaatttcttaatctttattaaaaaataatatttggacactgaatatacttaatgagaaagataaaagagagaaaatatttatcgatccattataactgatataatgtgataaaaaaataataggggttaaaagtaagtgtttaaaaaaagatgtctaaatatcattctctttattattgttcatttgctcaagtgttaacattcttattttttttatacttcgcttgcactggtgtgcatttgttatttgaaagggagtgtaatagcaattgttttgtcaatactaggtaacaaatatttttaatgcaaaatatattatttttttaacaacaaaagttgtggacccaatgaatcttgagctttggtggtgatggtacgtactttgtcacatcccacatgatgtaagcttcattggagcttgtaggcctaggatcttctttatcaatggattcctttatttcttggaagatgaatggcagcggaatggagaaggaagagagagaggagacaccacttcaaggagaagatgagtctaaaagaagctcaccaccataggaggccatggataaaagcttggaggaagaaggagatgaatgaagggagggggagagaagagcacaaaattttgtgctctaaaagagttctgaaatctgaagtttaatattcaaatgatcaaatttgaaaaaaatgcacacacatgacttctatttatagcctaagtgtcacacaagattggaggaaaattttgaatttcaattcaaaattcacttgaatttgaaattgaatttgtggagccaaactttggagtcaaaatttcactaattatgattagtgaattttagttatggtttagcccactaatccaagatcaatttcaagattctccactaagtgtgcttaggtgtcatgagacatgtaaagcatgaaggacatgcacaaagtatgactatatgatgtgacaatgaagtgtagtaagcaaatgctcacctccccctctaaaatttaattggattgggt

SEQ ID NO: 7836 - DNA, 1054 bp, Glycine max
  Gm_smallRNAprecursor_669
gtcaatggatttttttgtcactaacttactgtgtacttggtattagaggtggggatgataaaaattaaaaggataaaataataaaattatcaatttattctttttttataaatatttttccttacaccaaagatatctcctaactaataattatatctaccaactggaccttatcgttaatagactgaatatctaaattcaagattagatgtttaaaattcgttttagtccttaaaaataatctaaaattaaaacaaaggcctgactcatttgatccatggcccgggtaagtgagaaaattttgggcctataattaactttacccaatcagatttaagagtgctgctagtgcacccagcactaaccacgaagagatagaaatatcccttatggatcaagttgatccataagttaatttttaagatttatggatcaacttaatccgtaagtcttttacggataaagttgatccataagttaatttttaagatttactgatcaagttgatccgtaagtcttttacgaatcaacttgatccgtaaattaatttttaagacttacgaatcaagttgatccgtaaggggagaaattaacagggacagttttaccattttcaaagaatgctgggtgcatcaataataatactgggtgcaccaagcaacactccagatttaactatcttatacttctaatgaacctactcaagtgagtccacccaactcgcctttgtactctgtagagtgtaggaggagaaagcgaggggaaaaacgctgatactacactagtcgtaggtttgtgacatgttttgttaatgttttctttttttgtgtaaatcaaagcttcaaacatggcaatggcaagaggtatcgttaggaggatgaggaatacggttggtgctgttcttctactacgctcttcaacaacaacaactcattcacactccttccatttttataaagattctctctctccattggaatcccacctttgttccttctcctctactttccttcgctccttctctcaccatttcccaggttctttctctctccct

SEQ ID NO: 7837 - DNA, 1212 bp, Glycine max
  Gm_smallRNAprecursor_670
aactttatgatgaactatttgatacaggttaagaaatcatcatcatatctagataacttgtgtctaaaaattcaagaagtttgatgcatttggtcacttccttatcttagatcatgttgatgacacttgttttcttttataaagacatctagagtggtaggcgtagaggaatcaacactaatcaaaaccatggatctttatgttgcctcgtgccatattgcggcaaattgatcaaactaggccccttttagaaatttattcccaaaaaggggctgttttgaaactttttcctgggggagtctgtttttgaaggggactcgccaatggagatggcgagttggacacgtggcggcacctggtggactcgccagtggagttggcgagttgctgtccacgcggcgggtcccgtcattcgtactggcgaaatgtttttttacggaatttttttttaacttcaaacgggtataacttttgataggaatgtccgtttgagacccataatatgtcaaaatgctcgaaattgaatgaagaatctcttggcaaattcccgaaagggatttggtcaattcatgtttccaaaaaatggatttaagattcaaccatccatttttttaatcttaaatcctatttttgagctacttagaggtgttttttggaaaaatgagttgaccaaatcccctttggatatttgctaagggatttttcattcaatttcgagcattttgacatattatgggcctcaaacggacattcatatcaaaagttatactcgtttgaagttaaaaaaattttttccgtaaaaaaacatttcgctagtacgaatggcgggacccgccacgtggacagcaactcgccaactccattggcgagtccaccaggtgtcaccacgtgtccaactcgctatctccattggcgagtcccctccagaaacagacctccctaggaaaaagtttcaaaacaaccccctccctaggaaaaagtttcaaaacaacccccttttgggaataagtttctaaaaggggcttagtttggtcaatttgccattatgctgcttccaagtcctgctaaaccggtctacttgtcattgagacacgtgagaaccggttgtaacttgtaagtttatttgttatatattttttgatggaaagtttatttattacatattaaacctacgtatgtaggtaactcataaagttatataatttaagtaaa

SEQ ID NO: 7838 - DNA, 1212 bp, Glycine max; identical to SEQ ID NO: 7837
  Gm_smallRNAprecursor_671

SEQ ID NO: 7839 - DNA, 1213 bp, Glycine max
  Gm_smallRNAprecursor_672
aactttatgatgaactatttgatacaggttaagaaatcatcatcatatctagataacttgtgtctaaaaattcaagaagtttgatgcatttggtcacttccttatcttagatcatgttgatgacacttgttttcttttataaagacatctagagtggtaggcgtagaggaatcaacactaatcaaaaccatggatctttatgttgcctcgtgccatattgcggcaaattgatcaaactaggccccttttagaaatttattcccaaaaaggggctgttttgaaactttttcctgggggagtctgtttttgaaggggactcgccaatggagatggcgagttggacacgtggcggcacctggtggactcgccagtggagttggcgagttgctgtccacgcggcgggtcccgtcattcgtactggcgaaatgtttttttacggaatttttttttaacttcaaacgggtataacttttgataggaatgtccgtttgagacccataatatgtcaaaatgctcgaaattgaatgaagaatctcttggcaaattcccgaaagggatttggtcaattcatgtttccaaaaaatggatttaagattcaaccatccatttttttaatcttaaatcctatttttgagctacttagaggtgttttttggaaaaatgagttgaccaaatcccctttggatatttgctaagggatttttcattcaatttcgagcattttgacatattatgggcctcaaacggacattcatatcaaaagttatactcgtttgaagttaaaaaaattttttccgtaaaaaaacatttcgctagtacgaatggcgggacccgccacgtggacagcaactcgccaactccattggcgagtccaccaggtgtcaccacgtgtccaactcgctatctccattggcgagtcccctccagaaacagacctccctaggaaaaagtttcaaaacaaccccctccctaggaaaaagtttcaaaacaacccccttttgggaataagtttctaaaaggggcttagtttggtcaatttgccattatgctgcttccaagtcctgctaaaccggtctacttgtcattgagacacgtgagaaccggttgtaacttgtaagtttatttgttatatattttttgatggaaagtttatttattacatattaaacctacgtatgtaggtaactcataaagttatataatttaagtaaat

SEQ ID NO: 7840 - DNA, 1213 bp, Glycine max; identical to SEQ ID NO: 7839
  Gm_smallRNAprecursor_673

SEQ ID NO: 7841 - DNA, 1079 bp, Glycine max
  Gm_smallRNAprecursor_674
aatctaaaactatcatgatactaatctatcatgaaaactctagaaagacctaaagtaatgtagaaacgtttaccaccattgagaggttggtgacttgagcctataaataggcaattggtatgttgtaattgataaatccaagaaatcaatgatatagccttctttctaaaacaattctctaaaactatcaactatcaactatcatctaatcaactaccaacagtggcatcagagctacgttcggtcatacattgggcgtagttatattacctacctaccattccaaaatcctcccaactacttcaaaaatttcctttgtactattaacccactctaataatattttttctaagctatggataacactgttcaatcgtcaactatttctgttcctatcttcaatggtgaaaattatgatttctggcgtgttaaaatggaaacatatttttcatctcaagatttatgggacatagtagaagaaggcttcaccattcccgcagatacttcagctcttaatgcatctcaagaaaaagagttgaagaaaaataaacagaaaaattcaaaggcgttgttcaccttgcaacaagcggtgactgatccaattttcccaagaatcatgggagctaagactgccaaagaagcgtggaacacattgcaggaggagtttcaaggaagtgttaaggtacgtgccgttaaacttcaatctctaagaagagattttgaactattgaagatgaaggagtccgagacagttaaagattactattctaaagttaaaggaatagttaatcaaatgagagcttttggggaagatattcttgacaagaaaattgttgagaaaattctaattactatgccccaaaagtttgacccaatcgtgacaacgattgaggaaaccaaagatctgtccactctatcagagacaaaacttatgggctctcttgaagcatatgagcaaagactgtataggcataaagaagatacaattgaaaatgtcttccagtcgaagtttaaattttagccccaaaacaaagaaaatggaggaaagaaaaattatggagaaacttctagaagaagag

SEQ ID NO: 7842 - DNA, 1085 bp, Glycine max
  Gm_smallRNAprecursor_675
tgcaacaaacattgccatgaaggtacaagttgattattcatggctatggcatcgaagatttggccacttcaactcacatgccttgaagttgttacatgagaagaacatgatgagagatcttccaagcacaaaggagaacaatgaagtgtgtgaaggatatcttcttggtaagcaacaccgatttcctttctcaacaagcggagcatggagagcgaaagatctattggagctgatacatacagacgtttatggaccaatgaggacgccatcacatgggaacaataggtacttcatactcttcattgatgacttctctagaatgacatgggtatattttctaaaagaaaaatcagaagtctttggagtattcaaagagttcaaggcccttgttgaaaatcaaagtggaaaatggataaaagtactaagaagtgatcgtggcaaagagtacacctctcgcgagtttgaaagattttgtgaggatgaaggcattgagcaataacttacagtcgcatattctcctcaacaaaatggagtgttcgagagaaagaatcgcacagttatggagatggctagatcgatgctcaaggagaagggactacctaacacattctgggctgaagcagtctacactgctgtttacatactcaacagatgtccaactaagtctgtaaaagacaagactccaattgaagcttggaacgggaagaagccatcagcaaagcacctaagggtctttggatctatatgctacattcatattccagacgtgaagaggcacaagcttgaagacaagattatacgaggtatcttccttgggtatagcaatatctctaagggctaccgtgtctacaacttgcaaactaagaaactcgtcatcagtcgagatgttgaagttgatgaatatgcttcatagaattgggatgaagaaaaagtggagaagaacgttcttatacccgctcaactacctcaagaagaagatgaggaagaagacccaggtgaaccacttccacctccaccacaacaacaagatcaagaactatcatcaccagagtctactccaagacgagtaagatctttggtggaca

SEQ ID NO: 7843 - DNA, 1158 bp, Glycine max
  Gm_smallRNAprecursor_676
ataatgtataaattgttttgtgaatttattgtattatattttattttgcagtagcaatgacatcttcatcgtcatgtccatcacatattaaaattaagtctggcccgatcgatggtgatgtattatggatgcaacctaagcatgtttcagaacatgtttggaatgtggaagaagatcgtaaattacatatcagactagttgtccccacgtatcaaggggaagaagaaattccagagcaatttcctttccttcgacaatctggtttttactggattatgaagatgggatacttaaaaataaatgtctcattctttgatagaaagatggaggccgaaaacacatacgtttcacatgagatgcggagagtgtactattactcttcaagacgtctctgtattgttaggtctacgtgtggatagtttaccattaatcgatccaacaaatcttaattggactgatttatgtgagggattattgggagtcagaccacaagaaggtgaaattaaaggtagtgtggttaaattaagttggctggctcaccattttgcacaaataaataaccacgacgacaaagaacaagtacgaaggtttgcccgtgcatggatattgagattcattggaggtgtcttgttcgttgacaaaagcattaacaaagtttcgctaaggtaccttcaatttttacgtgactttggagactgtagcacatatgcatagggacctgccgtacttgcttttctatacaggcagatgtgcagtgccaccgattataaaactaaatcaatcggaggtatgtgcatcttactacaaatgtgggcatgtgaacgatgtccaaccttggctccaaagaggactccttcccaagtagtaaataaaccactggggcacaggttagtcatttttaaaagcgtctttcatttcaaaagaataaatggttttagggtatattaaattttaatctttgtaggtggttgcgacgtggaaaccaacatatcggcaatgatgatgtgagagtttttcgtcgcaagttggatattatgaaacgtcatgaggtaagaacatggtattgtatttgaaaaataaaaaatgatatgtgttattttactaaattgctgacaactacgttgttatatgttgtttatgtgtgagccttacacaaca

SEQ ID NO: 7844 - DNA, 1035 bp, Glycine max
  Gm_smallRNAprecursor_677
aatgtataaattgttttgtgaatttattgtattatattttattttgcagtagcaatgacatcttcatcgtcatgtccatcacatattaaaattaagtctggcccgatcgatggtgatgtattatggatgcaacctaagcatgtttcagaacatgtttggaatgtggaagaagatcgtaaattacatatcagactagttgtccccacgtatcaaggggaagaagaaattccagagcaatttcctttccttcgacaatctggtttttactggattatgaagatgggatacttaaaaataaatgtctcattctttgatagaaagatggaggccgaaaacacatacgtttcacatgagatgcggagagtgtactattactcttcaagacgtctctgtattgttaggtctacgtgtggatagtttaccattaatcgatccaacaaatcttaattggactgatttatgtgagggattattgggagtcagaccacaagaaggtgaaattaaaggtagtgtggttaaattaagttggctggctcaccattttgcacaaataaataaccacgacgacaaagaacaagtacgaaggtttgcccgtgcatggatattgagattcattggaggtgtcttgttcgttgacaaaagcattaacaaagtttcgctaaggtaccttcaatttttacgtgactttggagactgtagcacatatgcatagggacctgccgtacttgcttttctatacaggcagatgtgcagtgccaccgattataaaactaaatcaatcggaggtatgtgcatcttactacaaatgtgggcatgtgaacgatgtccaaccttggctccaaagaggactccttcccaagtagtaaataaaccactggggcacaggttagtcatttttaaaagcgtctttcatttcaaaagaataaatggttttagggtatattaaattttaatctttgtaggtggttgcgacgtggaaaccaacatatcggcaatgatgatgtgagagtttttcgtcgcaagttggatattatg

SEQ ID NO: 7845 - DNA, 1155 bp, Glycine max
  Gm_smallRNAprecursor_678
aatgtataaattgttttgtgaatttattgtattatattttattttgcagtagcaatgacatcttcatcgtcatgtccatcacatattaaaattaagtctggcccgatcgatggtgatgtattatggatgcaacctaagcatgtttcagaacatgtttggaatgtggaagaagatcgtaaattacatatcagactagttgtccccacgtatcaaggggaagaagaaattccagagcaatttcctttccttcgacaatctggtttttactggattatgaagatgggatacttaaaaataaatgtctcattctttgatagaaagatggaggccgaaaacacatacgtttcacatgagatgcggagagtgtactattactcttcaagacgtctctgtattgttaggtctacgtgtggatagtttaccattaatcgatccaacaaatcttaattggactgatttatgtgagggattattgggagtcagaccacaagaaggtgaaattaaaggtagtgtggttaaattaagttggctggctcaccattttgcacaaataaataaccacgacgacaaagaacaagtacgaaggtttgcccgtgcatggatattgagattcattggaggtgtcttgttcgttgacaaaagcattaacaaagtttcgctaaggtaccttcaatttttacgtgactttggagactgtagcacatatgcatagggacctgccgtacttgcttttctatacaggcagatgtgcagtgccaccgattataaaactaaatcaatcggaggtatgtgcatcttactacaaatgtgggcatgtgaacgatgtccaaccttggctccaaagaggactccttcccaagtagtaaataaaccactggggcacaggttagtcatttttaaaagcgtctttcatttcaaaagaataaatggttttagggtatattaaattttaatctttgtaggtggttgcgacgtggaaaccaacatatcggcaatgatgatgtgagagtttttcgtcgcaagttggatattatgaaacgtcatgaggtaagaacatggtattgtatttgaaaaataaaaaatgatatgtgttattttactaaattgctgacaactacgttgttatatgttgtttatgtgtgagccttacacaac

SEQ ID NO: 7846 - DNA, 1036 bp, Glycine max
  Gm_smallRNAprecursor_679
agaccacaagaaggtgaaattaaaggtagtgtggttaaattaagttggctggctcaccattttgcacaaataaataaccacgacgacaaagaacaagtacgaaggtttgcccgtgcatggatattgagattcattggaggtgtcttgttcgttgacaaaagcattaacaaagtttcgctaaggtaccttcaatttttacgtgactttggagactgtagcacatatgcatagggacctgccgtacttgcttttctatacaggcagatgtgcagtgccaccgattataaaactaaatcaatcggaggtatgtgcatcttactacaaatgtgggcatgtgaacgatgtccaaccttggctccaaagaggactccttcccaagtagtaaataaaccactggggcacaggttagtcatttttaaaagcgtctttcatttcaaaagaataaatggttttagggtatattaaattttaatctttgtaggtggttgcgacgtggaaaccaacatatcggcaatgatgatgtgagagtttttcgtcgcaagttggatattatgaaacgtcatgaggtaagaacatggtattgtatttgaaaaataaaaaatgatatgtgttattttactaaattgctgacaactacgttgttatatgttgtttatgtgtgagccttacacaacaactgttatatcattgttgcctcccatttgtgtagtcgaaagtgtcgcgtggtgcacggtggtgccactaatttgtttccaagttattgaatgacaccaaccggatagagtattgagacaatttggaatgcagcaaccaattccagagtctcattcgcaacccttgaatatttatggcataacactaaaagggaaacatgacgaaaattgggggcaattgttcgccccaatgattgatcagtggaacaatcaccatgcttttagggtcgacgcttatccccgacaagagggcctattgagctttaactcggactacatggtctggtataggcgaaagacaaagatgtttgttgacccacaaa

SEQ ID NO: 7847 - DNA, 1080 bp, Glycine max
  Gm_smallRNAprecursor_680
gggaataatcccatttagtatcatctttcttctggtcaattttaccctcaactattataaactactactattttaacttccaaaatagcagttacatctttaaaaaacaagttacaccaaactacatatataagtaacttccaagtttaggcacggagtgcctttttgcactagttatagttataaaagaccagttttttttttttaaagtggtgggagttgagggcgagccctggtgcagcggtaaagttgtgccttggtgacttgttggtcatgggttcgaatccggaaacagcctctttgcatatgcaagggtaaggctgcgtacaacatccctcccccataccttcgcatagcgaagagcctctgggcaatggggtacgaagttttaaagtggtgggagttggcttgtataagtggatatgcccaatgttgttaatggcggatggcggttcatggcggaaagtcaaaaatccgccataaaaatatggcggatggcgtagcggaaaatggcggatgtcatggcggacacaaaaaaaaaaaaaaacatatatataaactcattgaaattgaaaaaaacaaaggattgcattcaaataaactaaaaaagtttcatgagttcatacaataatcaagtaccaacaccaaataaactcattaaagagttcaaaataagaaaatgataaaaacataatgcaaagtgcaaagtgaaggttgaggctctaatcatcttctccaatcccaacataatcatcttcgttgttatcatatggtaatggagcatctccctctccctcttccccatcagacgcctcaaaattgaccatgatttcttcttcttcttcagattcaacatcaatattctcctcaacatctagatcctcatcattttcttggactgctttttgcttccttgatgaagatccaacaaccattgcctgttttttagaagtttgggcagcagcaacacttgttttttgctttttccgcctagtatacatcctacactctccaacccccgaagcctgatacacagttgcccaatttagagcatcatcatcttcaaataccaaatcattt

SEQ ID NO: 7848 - DNA, 1131 bp, Glycine max
  Gm_smallRNAprecursor_681
ggcggatgtcatggcggacacaaaaaaaaaaaaaaacatatatataaactcattgaaattgaaaaaaacaaaggattgcattcaaataaactaaaaaagtttcatgagttcatacaataatcaagtaccaacaccaaataaactcattaaagagttcaaaataagaaaatgataaaaacataatgcaaagtgcaaagtgaaggttgaggctctaatcatcttctccaatcccaacataatcatcttcgttgttatcatatggtaatggagcatctccctctccctcttccccatcagacgcctcaaaattgaccatgatttcttcttcttcttcagattcaacatcaatattctcctcaacatctagatcctcatcattttcttggactgctttttgcttccttgatgaagatccaacaaccattgcctgttttttagaagtttgggcagcagcaacacttgttttttgctttttccgcctagtatacatcctacactctccaacccccgaagcctgatacacagttgcccaatttagagcatcatcatcttcaaataccaaatcatttccagcatcattatcatcatcttgatccatctctcccacgagccattcattgcatacatcaatatcattaagagaaattggatcaatttcatctcttgcattatatctttgcttcaattgttggttgtatttgacaaacaccaaatcatgcaacctcttgtgctcaagcctatttctttttttggaatgaatctacaacataacaaataaatgttgatttcaatctcaaatatactccaaatataacttgatcatcaaaattaaataaaattaaaaagtatagttagagttttgtcacaattacttgctcaaacacactccaatttctttcacatcctgaagcactgcaagtcaaactcaaaatcttaatagccagcttctgcaaatttggagtttgtgacccaaacattcgccaccaatatgctgcaataccaattaccaaccaagagcataacttagaattctgaattctaacactaatacataaaaaaaatagtatgataaaagtttcttactaggagaatgggttttcctttgagccattgcaaagtcggaaccaaagt

SEQ ID NO: 7849 - DNA, 1110 bp, Glycine max
  Gm_smallRNAprecursor_682
ggttggtgtctcatctcattgaaaggttaattgagaatcctctctgtttctttcattactatggtttgttgtcgagtcaagatccttttcatttcttctatattatgtagaggtggcataatgggttggactagtcgggccgaccctaacccatccaatgaaagggtgttactaggtgcacccaacattattgctggtgcatccaacattttttaaaaatatcaaaattacccctgcattttttcgcatttgtgatggatgtgcgtgagggtggtccataaattatacagatcaacttgatccgtaaggttgatacggatcaagttgatccatatgttgatattaagcatacgaatcaacttgatccgtaaggttgatacggatcaagttgatccatatgttgatattaagcatacgaatcaacttgatccgtaagccttttacggatcaagttaatccgtaaggcttctacggaacaaattgatccatgttgttctataaaagacttacggatcaagttgattcgtaaaaggtttacggatcaacttgatctgtaagccttttacggaacaacacggatcaatttgatccgtagaagccttacggatcaagttgatctgtaagccttttacggatcaacttaaaaggcttacggataaagaatattttcgtcattttattttaagtgttgggtgtacctagcaacacctccaatgaaatataggacttgagaattaatttttcagcccaaattaaacatggactttttagcctgacccaaccacagcccaatgtgggctatgcctgcaaaacctgttaaaagcccacaaaaataggcttttaaagggcttgggcttcattatttagacataaattaaatatgggttttttagcctggcccattatagcctgcaacccacatagttttatggttttggaaaaatgaatgaaacggagataatgcacacatagtttcatttgatatcataaattgagaatttcacttaatgattagactcatggttaagagttaagactcaagtgaaaactgttgaacaataatgtttattagtaataaattaataatcgtatttaaatcacattggttat

SEQ ID NO: 7850 - DNA, 1057 bp, Glycine max
  Gm_smallRNAprecursor_683
aatggctacataataaattctaaatgtcgtgaactgtttcagaaattcgtttgccgtcaaatcaattatttttttaaaacgaaagaagaggacaagtaaccattaaatccttgtccgttttcccagcaagtgcctgcaggagtgtagtttttcctgaccccggaggtcccaaaagcagagtcattctgtatagagatacaaagaaagtcaaaatctagttatcaaaactatcaattaggtactacgatggaacgattgatgcacttttagtaagtaatttttattataggaattattatttttacccgtgaaattaaaaaaggtaaaattgtatttttggtcccccagtttatcttctgttttggatttggtcacttaataatttaattcacgaatttagtcctcctattttgtaaaattgtacaatattgatttcccatgccacaattgaaagttaaccgtcaacaagtgatgtagacggtcacgtgtcacgtgattgtcatgtgtcatgttctgattggtcaatgaaaataacaatgcatttcatctttcatgtaatcagaacatgacacgtgacaatcgtcatttagtaagaacatgacacgtgaccgtcaacattacttgttaacgatcaacgttcaattgtggtctgagggaccaacattgcacgattttataaaataggaggatcaaattcgtaaattaaattaatgggggaccaaattcgaaactggagataaattggggatcagatttacaattttgccattaaaaaataacattaagaaatttataataactcacacattttatttaattgaattagattttcttcccctattataggaatttgtaaagcaataagcgtttttttatttatcaaatttgtaaagtttttaacaggtgggtcattatctatttaattgtttgtttatttgtaaggcaataaaatttgacaattatgtcattaaacacgtacttggtcgtctattagtacagcaataggcgtcatattatctatttctaatgcaataagcgtcaaattatcaaaatttaa

SEQ ID NO: 7851 - DNA, 1076 bp, Glycine max
  Gm_smallRNAprecursor_684
ccatcttacgggaagagttacttcatcccattttattttttttgggagagaaacgttagcctttgtcatatcagtgataaacaaggttgtttctcctttttgaggttttaacaggattctagatgcacaagtattcatgaccttgtactggatcctataaattaaggctgctgggattgatccttctttcatgtcaaggccatgaaagtggatgtttaagaacagagagtcaagaatgtttctgtccatcagactcactgttttgtttggataacagttaaaatatattggaccttgtcataggctggtttcgactgttccaattagggagtcttcaaattgattatgcctaatgtctcttagacacattaaaactgctgcatctatgcccatatcaattaagggcttgatggctacttgtacacaaccgatgtgtagatatttatacttacgactatcttcataaattgaattttttgaaagtaaatgaaattcttcccctatatcttgtcctagaggaatattgttttctactgttttgattatgtaatcaaagttgtgtttgtcctttattgtttcaggaacgtatagttgatcccgagggatttctggaatgttccagtcatccatgttttgattgatatcttcgaatcggactttctcatagaagagatggtgttttggggcaacctcttgggtctggttatcttgatcatttaataaattggagtttcttaaagaagatgataaggaggagtttgagcgaaaagagatacgggaaaaagatcataatagtctagacatgattataatattctctaatatctttgccctcatttggttccatagaaatatctccgtaagtaaatatgtcacaaaatttttctggatctgaattatttttaagaaaaactctttttttttttttgaaaaatagcttgaacggcaatcctatagccaccagtatattatgtcttgatattttggttaaacagtacaccttagccttaccgccctttatgcatcacgggtcttactgctacagtactattcaactaaaatattagactgctgta

SEQ ID NO: 7852 - DNA, 1105 bp, Glycine max
  Gm_smallRNAprecursor_685
ctgttttgtttggataacagttaaaatatattggaccttgtcataggctggtttcgactgttccaattagggagtcttcaaattgattatgcctaatgtctcttagacacattaaaactgctgcatctatgcccatatcaattaagggcttgatggctacttgtacacaaccgatgtgtagatatttatacttacgactatcttcataaattgaattttttgaaagtaaatgaaattcttcccctatatcttgtcctagaggaatattgttttctactgttttgattatgtaatcaaagttgtgtttgtcctttattgtttcaggaacgtatagttgatcccgagggatttctggaatgttccagtcatccatgttttgattgatatcttcgaatcggactttctcatagaagagatggtgttttggggcaacctcttgggtctggttatcttgatcatttaataaattggagtttcttaaagaagatgataaggaggagtttgagcgaaaagagatacgggaaaaagatcataatagtctagacatgattataatattctctaatatctttgccctcatttggttccatagaaatatctccgtaagtaaatatgtcacaaaatttttctggatctgaattatttttaagaaaaactctttttttttttttgaaaaatagcttgaacggcaatcctatagccaccagtatattatgtcttgatattttggttaaacagtacaccttagccttaccgccctttatgcatcacgggtcttactgctacagtactattcaactaaaatattagactgctgtacttccaggaagtactgttcaaacatttattgtacaaatcaaagtaaaatattacttgtactatacaaggttttagtttcagatccataaaatttgttaacatatgtccttacggatagtattcctacttccccatcaggctctgataccagagatcagcggaataagatcaaacggacagataggaagtaagaatgcagtatgataaataaaacgaaaatataaacttgtaaagcagatatcaagggcacaccgaaacggcttacaaacccaggtttttgaaaaca

SEQ ID NO: 7853 - DNA, 1200 bp, Glycine max
  Gm_smallRNAprecursor_686
agacacattaaaactgctgcatctatgcccatatcaattaagggcttgatggctacttgtacacaaccgatgtgtagatatttatacttacgactatcttcataaattgaattttttgaaagtaaatgaaattcttcccctatatcttgtcctagaggaatattgttttctactgttttgattatgtaatcaaagttgtgtttgtcctttattgtttcaggaacgtatagttgatcccgagggatttctggaatgttccagtcatccatgttttgattgatatcttcgaatcggactttctcatagaagagatggtgttttggggcaacctcttgggtctggttatcttgatcatttaataaattggagtttcttaaagaagatgataaggaggagtttgagcgaaaagagatacgggaaaaagatcataatagtctagacatgattataatattctctaatatctttgccctcatttggttccatagaaatatctccgtaagtaaatatgtcacaaaatttttctggatctgaattatttttaagaaaaactctttttttttttttgaaaaatagcttgaacggcaatcctatagccaccagtatattatgtcttgatattttggttaaacagtacaccttagccttaccgccctttatgcatcacgggtcttactgctacagtactattcaactaaaatattagactgctgtacttccaggaagtactgttcaaacatttattgtacaaatcaaagtaaaatattacttgtactatacaaggttttagtttcagatccataaaatttgttaacatatgtccttacggatagtattcctacttccccatcaggctctgataccagagatcagcggaataagatcaaacggacagataggaagtaagaatgcagtatgataaataaaacgaaaatataaacttgtaaagcagatatcaagggcacaccgaaacggcttacaaacccaggtttttgaaaacaaagaaaccgaagcggcggcagagccacacaggatcggtgaggggagaagggagatatgaaaaatagaacttgaaatttattgaaaccgaaagaaaagcttacaaagagtttttccctaggcagagcttctctctctaaaaacctgattctgagactatctgaaagggtgcctcacaaagagaacgaggactcctttaaa

SEQ ID NO: 7854 - DNA, 1251 bp, Glycine max
  Gm_smallRNAprecursor_687
caggaagtactgttcaaacatttattgtacaaatcaaagtaaaatattacttgtactatacaaggttttagtttcagatccataaaatttgttaacatatgtccttacggatagtattcctacttccccatcaggctctgataccagagatcagcggaataagatcaaacggacagataggaagtaagaatgcagtatgataaataaaacgaaaatataaacttgtaaagcagatatcaagggcacaccgaaacggcttacaaacccaggtttttgaaaacaaagaaaccgaagcggcggcagagccacacaggatcggtgaggggagaagggagatatgaaaaatagaacttgaaatttattgaaaccgaaagaaaagcttacaaagagtttttccctaggcagagcttctctctctaaaaacctgattctgagactatctgaaagggtgcctcacaaagagaacgaggactcctttaaatagactcaatttttactgtttctacagtgtcggtaatgtttaccagaactgttacaaaacttttacaaattacattaataaaaccgaaaattagttacaataattcatgattactacaactaattaatcgtcgtctaatgatatgccaaaacattcatcttcattctggtagaatggatcatcttcttggtcatcattagtctcagatgattcggcttccttcttgggaggttcgtcttccacttcttgttgaagtagttggagaacttctttgagattctgagcaagactctctttagattttgagcttgctaagaatgctgctagttgcgacttctgatttagaaacaaagatgtctccggatcagcaggtttgaggaactcaggattgctctggaaccagttcttgacttgttctggagcagcctttgaagtatcgaattgtgaccaccattttacaaaggcgtgtctctgcaatggtggatattgtttgctgttttcagtttttccgtatctgtactgccatgaaaaaatccatgacaaggcaaaactggaaaagtattttaaatctgtcggaatacgtgattccttgctgttatagagcttgttgaattgttggaatccctgttggacttcttctgggaatatttgtggaattggtccaaagtagttccaccattggaggaaccaatttggaaaattatacacagtgttgtttttgaagtaaattagccatgaatgcttgaatttactattttgatgccagaaca

SEQ ID NO: 7855 - DNA, 1138 bp, Glycine max
  Gm_smallRNAprecursor_688
caagggcacaccgaaacggcttacaaacccaggtttttgaaaacaaagaaaccgaagcggcggcagagccacacaggatcggtgaggggagaagggagatatgaaaaatagaacttgaaatttattgaaaccgaaagaaaagcttacaaagagtttttccctaggcagagcttctctctctaaaaacctgattctgagactatctgaaagggtgcctcacaaagagaacgaggactcctttaaatagactcaatttttactgtttctacagtgtcggtaatgtttaccagaactgttacaaaacttttacaaattacattaataaaaccgaaaattagttacaataattcatgattactacaactaattaatcgtcgtctaatgatatgccaaaacattcatcttcattctggtagaatggatcatcttcttggtcatcattagtctcagatgattcggcttccttcttgggaggttcgtcttccacttcttgttgaagtagttggagaacttctttgagattctgagcaagactctctttagattttgagcttgctaagaatgctgctagttgcgacttctgatttagaaacaaagatgtctccggatcagcaggtttgaggaactcaggattgctctggaaccagttcttgacttgttctggagcagcctttgaagtatcgaattgtgaccaccattttacaaaggcgtgtctctgcaatggtggatattgtttgctgttttcagtttttccgtatctgtactgccatgaaaaaatccatgacaaggcaaaactggaaaagtattttaaatctgtcggaatacgtgattccttgctgttatagagcttgttgaattgttggaatccctgttggacttcttctgggaatatttgtggaattggtccaaagtagttccaccattggaggaaccaatttggaaaattatacacagtgttgtttttgaagtaaattagccatgaatgcttgaatttactattttgatgccagaacacattggtccaggcgtcaatgtaatcccaatagttatatcctgcagggtcaaatggtgcagacatttttttgtgttggtttaagtttgagccataatgtcgtggctgcataacctttaagatttg

SEQ ID NO: 7856 - DNA, 1071 bp, Glycine max
  Gm_smallRNAprecursor_689
ccgaaacggcttacaaacccaggtttttgaaaacaaagaaaccgaagcggcggcagagccacacaggatcggtgaggggagaagggagatatgaaaaatagaacttgaaatttattgaaaccgaaagaaaagcttacaaagagtttttccctaggcagagcttctctctctaaaaacctgattctgagactatctgaaagggtgcctcacaaagagaacgaggactcctttaaatagactcaatttttactgtttctacagtgtcggtaatgtttaccagaactgttacaaaacttttacaaattacattaataaaaccgaaaattagttacaataattcatgattactacaactaattaatcgtcgtctaatgatatgccaaaacattcatcttcattctggtagaatggatcatcttcttggtcatcattagtctcagatgattcggcttccttcttgggaggttcgtcttccacttcttgttgaagtagttggagaacttctttgagattctgagcaagactctctttagattttgagcttgctaagaatgctgctagttgcgacttctgatttagaaacaaagatgtctccggatcagcaggtttgaggaactcaggattgctctggaaccagttcttgacttgttctggagcagcctttgaagtatcgaattgtgaccaccattttacaaaggcgtgtctctgcaatggtggatattgtttgctgttttcagtttttccgtatctgtactgccatgaaaaaatccatgacaaggcaaaactggaaaagtattttaaatctgtcggaatacgtgattccttgctgttatagagcttgttgaattgttggaatccctgttggacttcttctgggaatatttgtggaattggtccaaagtagttccaccattggaggaaccaatttggaaaattatacacagtgttgtttttgaagtaaattagccatgaatgcttgaatttactattttgatgccagaacacattggtccaggcgtcaatgtaatcccaatagttatatcctgcagggtcaaatggtgcagacatttt

SEQ ID NO: 7857 - DNA, 1072 bp, Glycine max
  Gm_smallRNAprecursor_690
ccgaaacggcttacaaacccaggtttttgaaaacaaagaaaccgaagcggcggcagagccacacaggatcggtgaggggagaagggagatatgaaaaatagaacttgaaatttattgaaaccgaaagaaaagcttacaaagagtttttccctaggcagagcttctctctctaaaaacctgattctgagactatctgaaagggtgcctcacaaagagaacgaggactcctttaaatagactcaatttttactgtttctacagtgtcggtaatgtttaccagaactgttacaaaacttttacaaattacattaataaaaccgaaaattagttacaataattcatgattactacaactaattaatcgtcgtctaatgatatgccaaaacattcatcttcattctggtagaatggatcatcttcttggtcatcattagtctcagatgattcggcttccttcttgggaggttcgtcttccacttcttgttgaagtagttggagaacttctttgagattctgagcaagactctctttagattttgagcttgctaagaatgctgctagttgcgacttctgatttagaaacaaagatgtctccggatcagcaggtttgaggaactcaggattgctctggaaccagttcttgacttgttctggagcagcctttgaagtatcgaattgtgaccaccattttacaaaggcgtgtctctgcaatggtggatattgtttgctgttttcagtttttccgtatctgtactgccatgaaaaaatccatgacaaggcaaaactggaaaagtattttaaatctgtcggaatacgtgattccttgctgttatagagcttgttgaattgttggaatccctgttggacttcttctgggaatatttgtggaattggtccaaagtagttccaccattggaggaaccaatttggaaaattatacacagtgttgtttttgaagtaaattagccatgaatgcttgaatttactattttgatgccagaacacattggtccaggcgtcaatgtaatcccaatagttatatcctgcagggtcaaatggtgcagacattttt

SEQ ID NO: 7858 - DNA, 1068 bp, Glycine max
  Gm_smallRNAprecursor_691
aaacggcttacaaacccaggtttttgaaaacaaagaaaccgaagcggcggcagagccacacaggatcggtgaggggagaagggagatatgaaaaatagaacttgaaatttattgaaaccgaaagaaaagcttacaaagagtttttccctaggcagagcttctctctctaaaaacctgattctgagactatctgaaagggtgcctcacaaagagaacgaggactcctttaaatagactcaatttttactgtttctacagtgtcggtaatgtttaccagaactgttacaaaacttttacaaattacattaataaaaccgaaaattagttacaataattcatgattactacaactaattaatcgtcgtctaatgatatgccaaaacattcatcttcattctggtagaatggatcatcttcttggtcatcattagtctcagatgattcggcttccttcttgggaggttcgtcttccacttcttgttgaagtagttggagaacttctttgagattctgagcaagactctctttagattttgagcttgctaagaatgctgctagttgcgacttctgatttagaaacaaagatgtctccggatcagcaggtttgaggaactcaggattgctctggaaccagttcttgacttgttctggagcagcctttgaagtatcgaattgtgaccaccattttacaaaggcgtgtctctgcaatggtggatattgtttgctgttttcagtttttccgtatctgtactgccatgaaaaaatccatgacaaggcaaaactggaaaagtattttaaatctgtcggaatacgtgattccttgctgttatagagcttgttgaattgttggaatccctgttggacttcttctgggaatatttgtggaattggtccaaagtagttccaccattggaggaaccaatttggaaaattatacacagtgttgtttttgaagtaaattagccatgaatgcttgaatttactattttgatgccagaacacattggtccaggcgtcaatgtaatcccaatagttatatcctgcagggtcaaatggtgcagacatttt

SEQ ID NO: 7859 - DNA, 1069 bp, Glycine max
  Gm_smallRNAprecursor_692
aaacggcttacaaacccaggtttttgaaaacaaagaaaccgaagcggcggcagagccacacaggatcggtgaggggagaagggagatatgaaaaatagaacttgaaatttattgaaaccgaaagaaaagcttacaaagagtttttccctaggcagagcttctctctctaaaaacctgattctgagactatctgaaagggtgcctcacaaagagaacgaggactcctttaaatagactcaatttttactgtttctacagtgtcggtaatgtttaccagaactgttacaaaacttttacaaattacattaataaaaccgaaaattagttacaataattcatgattactacaactaattaatcgtcgtctaatgatatgccaaaacattcatcttcattctggtagaatggatcatcttcttggtcatcattagtctcagatgattcggcttccttcttgggaggttcgtcttccacttcttgttgaagtagttggagaacttctttgagattctgagcaagactctctttagattttgagcttgctaagaatgctgctagttgcgacttctgatttagaaacaaagatgtctccggatcagcaggtttgaggaactcaggattgctctggaaccagttcttgacttgttctggagcagcctttgaagtatcgaattgtgaccaccattttacaaaggcgtgtctctgcaatggtggatattgtttgctgttttcagtttttccgtatctgtactgccatgaaaaaatccatgacaaggcaaaactggaaaagtattttaaatctgtcggaatacgtgattccttgctgttatagagcttgttgaattgttggaatccctgttggacttcttctgggaatatttgtggaattggtccaaagtagttccaccattggaggaaccaatttggaaaattatacacagtgttgtttttgaagtaaattagccatgaatgcttgaatttactattttgatgccagaacacattggtccaggcgtcaatgtaatcccaatagttatatcctgcagggtcaaatggtgcagacattttt

SEQ ID NO: 7860 - DNA, 1048 bp, Glycine max
  Gm_smallRNAprecursor_693
ggtgaggggagaagggagatatgaaaaatagaacttgaaatttattgaaaccgaaagaaaagcttacaaagagtttttccctaggcagagcttctctctctaaaaacctgattctgagactatctgaaagggtgcctcacaaagagaacgaggactcctttaaatagactcaatttttactgtttctacagtgtcggtaatgtttaccagaactgttacaaaacttttacaaattacattaataaaaccgaaaattagttacaataattcatgattactacaactaattaatcgtcgtctaatgatatgccaaaacattcatcttcattctggtagaatggatcatcttcttggtcatcattagtctcagatgattcggcttccttcttgggaggttcgtcttccacttcttgttgaagtagttggagaacttctttgagattctgagcaagactctctttagattttgagcttgctaagaatgctgctagttgcgacttctgatttagaaacaaagatgtctccggatcagcaggtttgaggaactcaggattgctctggaaccagttcttgacttgttctggagcagcctttgaagtatcgaattgtgaccaccattttacaaaggcgtgtctctgcaatggtggatattgtttgctgttttcagtttttccgtatctgtactgccatgaaaaaatccatgacaaggcaaaactggaaaagtattttaaatctgtcggaatacgtgattccttgctgttatagagcttgttgaattgttggaatccctgttggacttcttctgggaatatttgtggaattggtccaaagtagttccaccattggaggaaccaatttggaaaattatacacagtgttgtttttgaagtaaattagccatgaatgcttgaatttactattttgatgccagaacacattggtccaggcgtcaatgtaatcccaatagttatatcctgcagggtcaaatggtgcagacatttttttgtgttggtttaagtttgagccataatgtcgtggctgcataacct

SEQ ID NO: 7861 - DNA, 1047 bp, Glycine max
  Gm_smallRNAprecursor_694
gtgaggggagaagggagatatgaaaaatagaacttgaaatttattgaaaccgaaagaaaagcttacaaagagtttttccctaggcagagcttctctctctaaaaacctgattctgagactatctgaaagggtgcctcacaaagagaacgaggactcctttaaatagactcaatttttactgtttctacagtgtcggtaatgtttaccagaactgttacaaaacttttacaaattacattaataaaaccgaaaattagttacaataattcatgattactacaactaattaatcgtcgtctaatgatatgccaaaacattcatcttcattctggtagaatggatcatcttcttggtcatcattagtctcagatgattcggcttccttcttgggaggttcgtcttccacttcttgttgaagtagttggagaacttctttgagattctgagcaagactctctttagattttgagcttgctaagaatgctgctagttgcgacttctgatttagaaacaaagatgtctccggatcagcaggtttgaggaactcaggattgctctggaaccagttcttgacttgttctggagcagcctttgaagtatcgaattgtgaccaccattttacaaaggcgtgtctctgcaatggtggatattgtttgctgttttcagtttttccgtatctgtactgccatgaaaaaatccatgacaaggcaaaactggaaaagtattttaaatctgtcggaatacgtgattccttgctgttatagagcttgttgaattgttggaatccctgttggacttcttctgggaatatttgtggaattggtccaaagtagttccaccattggaggaaccaatttggaaaattatacacagtgttgtttttgaagtaaattagccatgaatgcttgaatttactattttgatgccagaacacattggtccaggcgtcaatgtaatcccaatagttatatcctgcagggtcaaatggtgcagacatttttttgtgttggtttaagtttgagccataatgtcgtggctgcataacct

SEQ ID NO: 7862 - DNA, 1137 bp, Glycine max
  Gm_smallRNAprecursor_695
ttacaaagagtttttccctaggcagagcttctctctctaaaaacctgattctgagactatctgaaagggtgcctcacaaagagaacgaggactcctttaaatagactcaatttttactgtttctacagtgtcggtaatgtttaccagaactgttacaaaacttttacaaattacattaataaaaccgaaaattagttacaataattcatgattactacaactaattaatcgtcgtctaatgatatgccaaaacattcatcttcattctggtagaatggatcatcttcttggtcatcattagtctcagatgattcggcttccttcttgggaggttcgtcttccacttcttgttgaagtagttggagaacttctttgagattctgagcaagactctctttagattttgagcttgctaagaatgctgctagttgcgacttctgatttagaaacaaagatgtctccggatcagcaggtttgaggaactcaggattgctctggaaccagttcttgacttgttctggagcagcctttgaagtatcgaattgtgaccaccattttacaaaggcgtgtctctgcaatggtggatattgtttgctgttttcagtttttccgtatctgtactgccatgaaaaaatccatgacaaggcaaaactggaaaagtattttaaatctgtcggaatacgtgattccttgctgttatagagcttgttgaattgttggaatccctgttggacttcttctgggaatatttgtggaattggtccaaagtagttccaccattggaggaaccaatttggaaaattatacacagtgttgtttttgaagtaaattagccatgaatgcttgaatttactattttgatgccagaacacattggtccaggcgtcaatgtaatcccaatagttatatcctgcagggtcaaatggtgcagacatttttttgtgttggtttaagtttgagccataatgtcgtggctgcataacctttaagatttggattgtggaatgggtatttagatttggatctttggggtctttgaagtgtttaatagatactgagtttgtatctattagaatgaattcgtagaatttgcgggttttgtttgtggctgttggcctgtaatggaatcctgggggg

SEQ ID NO: 7863 - DNA, 1137 bp, Glycine max; identical to SEQ ID NO: 7862
  Gm_smallRNAprecursor_696

SEQ ID NO: 7864 - DNA, 1086 bp, Glycine max
  Gm_smallRNAprecursor_697
tgagactatctgaaagggtgcctcacaaagagaacgaggactcctttaaatagactcaatttttactgtttctacagtgtcggtaatgtttaccagaactgttacaaaacttttacaaattacattaataaaaccgaaaattagttacaataattcatgattactacaactaattaatcgtcgtctaatgatatgccaaaacattcatcttcattctggtagaatggatcatcttcttggtcatcattagtctcagatgattcggcttccttcttgggaggttcgtcttccacttcttgttgaagtagttggagaacttctttgagattctgagcaagactctctttagattttgagcttgctaagaatgctgctagttgcgacttctgatttagaaacaaagatgtctccggatcagcaggtttgaggaactcaggattgctctggaaccagttcttgacttgttctggagcagcctttgaagtatcgaattgtgaccaccattttacaaaggcgtgtctctgcaatggtggatattgtttgctgttttcagtttttccgtatctgtactgccatgaaaaaatccatgacaaggcaaaactggaaaagtattttaaatctgtcggaatacgtgattccttgctgttatagagcttgttgaattgttggaatccctgttggacttcttctgggaatatttgtggaattggtccaaagtagttccaccattggaggaaccaatttggaaaattatacacagtgttgtttttgaagtaaattagccatgaatgcttgaatttactattttgatgccagaacacattggtccaggcgtcaatgtaatcccaatagttatatcctgcagggtcaaatggtgcagacatttttttgtgttggtttaagtttgagccataatgtcgtggctgcataacctttaagatttggattgtggaatgggtatttagatttggatctttggggtctttgaagtgtttaatagatactgagtttgtatctattagaatgaattcgtagaatttgcgggttttgtttgtggctgttggcctgtaatggaatcctgggggg

SEQ ID NO: 7865 - DNA, 1086 bp, Glycine max; identical to SEQ ID NO: 7864
  Gm_smallRNAprecursor_698

SEQ ID NO: 7866 - DNA, 1085 bp, Glycine max
  Gm_smallRNAprecursor_699
gagactatctgaaagggtgcctcacaaagagaacgaggactcctttaaatagactcaatttttactgtttctacagtgtcggtaatgtttaccagaactgttacaaaacttttacaaattacattaataaaaccgaaaattagttacaataattcatgattactacaactaattaatcgtcgtctaatgatatgccaaaacattcatcttcattctggtagaatggatcatcttcttggtcatcattagtctcagatgattcggcttccttcttgggaggttcgtcttccacttcttgttgaagtagttggagaacttctttgagattctgagcaagactctctttagattttgagcttgctaagaatgctgctagttgcgacttctgatttagaaacaaagatgtctccggatcagcaggtttgaggaactcaggattgctctggaaccagttcttgacttgttctggagcagcctttgaagtatcgaattgtgaccaccattttacaaaggcgtgtctctgcaatggtggatattgtttgctgttttcagtttttccgtatctgtactgccatgaaaaaatccatgacaaggcaaaactggaaaagtattttaaatctgtcggaatacgtgattccttgctgttatagagcttgttgaattgttggaatccctgttggacttcttctgggaatatttgtggaattggtccaaagtagttccaccattggaggaaccaatttggaaaattatacacagtgttgtttttgaagtaaattagccatgaatgcttgaatttactattttgatgccagaacacattggtccaggcgtcaatgtaatcccaatagttatatcctgcagggtcaaatggtgcagacatttttttgtgttggtttaagtttgagccataatgtcgtggctgcataacctttaagatttggattgtggaatgggtatttagatttggatctttggggtctttgaagtgtttaatagatactgagtttgtatctattagaatgaattcgtagaatttgcgggttttgtttgtggctgttggcctgtaatggaatcctgggggg

SEQ ID NO: 7867 - DNA, 1069 bp, Glycine max
  Gm_smallRNAprecursor_700
taatgtttaccagaactgttacaaaacttttacaaattacattaataaaaccgaaaattagttacaataattcatgattactacaactaattaatcgtcgtctaatgatatgccaaaacattcatcttcattctggtagaatggatcatcttcttggtcatcattagtctcagatgattcggcttccttcttgggaggttcgtcttccacttcttgttgaagtagttggagaacttctttgagattctgagcaagactctctttagattttgagcttgctaagaatgctgctagttgcgacttctgatttagaaacaaagatgtctccggatcagcaggtttgaggaactcaggattgctctggaaccagttcttgacttgttctggagcagcctttgaagtatcgaattgtgaccaccattttacaaaggcgtgtctctgcaatggtggatattgtttgctgttttcagtttttccgtatctgtactgccatgaaaaaatccatgacaaggcaaaactggaaaagtattttaaatctgtcggaatacgtgattccttgctgttatagagcttgttgaattgttggaatccctgttggacttcttctgggaatatttgtggaattggtccaaagtagttccaccattggaggaaccaatttggaaaattatacacagtgttgtttttgaagtaaattagccatgaatgcttgaatttactattttgatgccagaacacattggtccaggcgtcaatgtaatcccaatagttatatcctgcagggtcaaatggtgcagacatttttttgtgttggtttaagtttgagccataatgtcgtggctgcataacctttaagatttggattgtggaatgggtatttagatttggatctttggggtctttgaagtgtttaatagatactgagtttgtatctattagaatgaattcgtagaatttgcgggttttgtttgtggctgttggcctgtaatggaatcctggggggaatactttggcagttgctttgaaaggattcttgtcccagtattctggttccatttgtgagacattg

SEQ ID NO: 7868 - DNA, 1067 bp, Glycine max
  Gm_smallRNAprecursor_701
atgtttaccagaactgttacaaaacttttacaaattacattaataaaaccgaaaattagttacaataattcatgattactacaactaattaatcgtcgtctaatgatatgccaaaacattcatcttcattctggtagaatggatcatcttcttggtcatcattagtctcagatgattcggcttccttcttgggaggttcgtcttccacttcttgttgaagtagttggagaacttctttgagattctgagcaagactctctttagattttgagcttgctaagaatgctgctagttgcgacttctgatttagaaacaaagatgtctccggatcagcaggtttgaggaactcaggattgctctggaaccagttcttgacttgttctggagcagcctttgaagtatcgaattgtgaccaccattttacaaaggcgtgtctctgcaatggtggatattgtttgctgttttcagtttttccgtatctgtactgccatgaaaaaatccatgacaaggcaaaactggaaaagtattttaaatctgtcggaatacgtgattccttgctgttatagagcttgttgaattgttggaatccctgttggacttcttctgggaatatttgtggaattggtccaaagtagttccaccattggaggaaccaatttggaaaattatacacagtgttgtttttgaagtaaattagccatgaatgcttgaatttactattttgatgccagaacacattggtccaggcgtcaatgtaatcccaatagttatatcctgcagggtcaaatggtgcagacatttttttgtgttggtttaagtttgagccataatgtcgtggctgcataacctttaagatttggattgtggaatgggtatttagatttggatctttggggtctttgaagtgtttaatagatactgagtttgtatctattagaatgaattcgtagaatttgcgggttttgtttgtggctgttggcctgtaatggaatcctggggggaatactttggcagttgctttgaaaggattcttgtcccagtattctggttccatttgtgagacattg

SEQ ID NO: 7869 - DNA, 1067 bp, Glycine max; identical to SEQ ID NO: 7868
  Gm_smallRNAprecursor_702

SEQ ID NO: 7870 - DNA, 1094 bp, Glycine max
  Gm_smallRNAprecursor_703
ttaccagaactgttacaaaacttttacaaattacattaataaaaccgaaaattagttacaataattcatgattactacaactaattaatcgtcgtctaatgatatgccaaaacattcatcttcattctggtagaatggatcatcttcttggtcatcattagtctcagatgattcggcttccttcttgggaggttcgtcttccacttcttgttgaagtagttggagaacttctttgagattctgagcaagactctctttagattttgagcttgctaagaatgctgctagttgcgacttctgatttagaaacaaagatgtctccggatcagcaggtttgaggaactcaggattgctctggaaccagttcttgacttgttctggagcagcctttgaagtatcgaattgtgaccaccattttacaaaggcgtgtctctgcaatggtggatattgtttgctgttttcagtttttccgtatctgtactgccatgaaaaaatccatgacaaggcaaaactggaaaagtattttaaatctgtcggaatacgtgattccttgctgttatagagcttgttgaattgttggaatccctgttggacttcttctgggaatatttgtggaattggtccaaagtagttccaccattggaggaaccaatttggaaaattatacacagtgttgtttttgaagtaaattagccatgaatgcttgaatttactattttgatgccagaacacattggtccaggcgtcaatgtaatcccaatagttatatcctgcagggtcaaatggtgcagacatttttttgtgttggtttaagtttgagccataatgtcgtggctgcataacctttaagatttggattgtggaatgggtatttagatttggatctttggggtctttgaagtgtttaatagatactgagtttgtatctattagaatgaattcgtagaatttgcgggttttgtttgtggctgttggcctgtaatggaatcctggggggaatactttggcagttgctttgaaaggattcttgtcccagtattctggttccatttgtgagacattgaaattttttttttttgcaatataactgttgc

SEQ ID NO: 7871 - DNA, 1070 bp, Glycine max
  Gm_smallRNAprecursor_704
caactaattaatcgtcgtctaatgatatgccaaaacattcatcttcattctggtagaatggatcatcttcttggtcatcattagtctcagatgattcggcttccttcttgggaggttcgtcttccacttcttgttgaagtagttggagaacttctttgagattctgagcaagactctctttagattttgagcttgctaagaatgctgctagttgcgacttctgatttagaaacaaagatgtctccggatcagcaggtttgaggaactcaggattgctctggaaccagttcttgacttgttctggagcagcctttgaagtatcgaattgtgaccaccattttacaaaggcgtgtctctgcaatggtggatattgtttgctgttttcagtttttccgtatctgtactgccatgaaaaaatccatgacaaggcaaaactggaaaagtattttaaatctgtcggaatacgtgattccttgctgttatagagcttgttgaattgttggaatccctgttggacttcttctgggaatatttgtggaattggtccaaagtagttccaccattggaggaaccaatttggaaaattatacacagtgttgtttttgaagtaaattagccatgaatgcttgaatttactattttgatgccagaacacattggtccaggcgtcaatgtaatcccaatagttatatcctgcagggtcaaatggtgcagacatttttttgtgttggtttaagtttgagccataatgtcgtggctgcataacctttaagatttggattgtggaatgggtatttagatttggatctttggggtctttgaagtgtttaatagatactgagtttgtatctattagaatgaattcgtagaatttgcgggttttgtttgtggctgttggcctgtaatggaatcctggggggaatactttggcagttgctttgaaaggattcttgtcccagtattctggttccatttgtgagacattgaaattttttttttttgcaatataactgttgctgggttgtggcgttgattcttgttgagtcaatgattgtattggtttttggtta

SEQ ID NO: 7872 - DNA, 1109 bp, Glycine max
  Gm_smallRNAprecursor_705
tcggaatacgtgattccttgctgttatagagcttgttgaattgttggaatccctgttggacttcttctgggaatatttgtggaattggtccaaagtagttccaccattggaggaaccaatttggaaaattatacacagtgttgtttttgaagtaaattagccatgaatgcttgaatttactattttgatgccagaacacattggtccaggcgtcaatgtaatcccaatagttatatcctgcagggtcaaatggtgcagacatttttttgtgttggtttaagtttgagccataatgtcgtggctgcataacctttaagatttggattgtggaatgggtatttagatttggatctttggggtctttgaagtgtttaatagatactgagtttgtatctattagaatgaattcgtagaatttgcgggttttgtttgtggctgttggcctgtaatggaatcctggggggaatactttggcagttgctttgaaaggattcttgtcccagtattctggttccatttgtgagacattgaaattttttttttttgcaatataactgttgctgggttgtggcgttgattcttgttgagtcaatgattgtattggtttttggttacagacagttttggtctgtttggccttttggatttgtttttgcagatctgtttcaaaatcatcgtctgattctgaggccatttctgcccaggtctttttagccaattttggtactttggtgaggcctatatcttctaaggccaagagagtttgtattgaccaggcatagtcagccacagtctgttttgttgttgttgattttggggattcctgagttgatgactcaggtttgacggtagttatctgggtcaatgacccttcaagatttcctttctgggttgatgacccagtctgggtaggtgacccagaagatgatgtagtttcctttttggttattggctctggtagagccaatagaacctcttttccttttgtactggatctccctcctctgccggaggaactagacaccttaggaggcatcgggaattttctgtaaaaattcacgggtgaggtagtcacaaaatttgttagactagctcaaaatttgccatta

SEQ ID NO: 7873 - DNA, 1120 bp, Glycine max
  Gm_smallRNAprecursor_706
tctgactttgcaatggctcaaaggaaaagtcattctcctagtaagaaacttttaccatatgacaaatacaaataccatactatttttttatgtattagtgttataattcagaattctaactctgaagttatgctcttggttggtaattggtattgcagcatattggtggcgaatgtttgggtcacaaactccaaatttgcaaaagctagctattaaaaattttgagtttgacttgcaatgctttaggatgtgaaagaaattggagtgtgtttgagcaagtaattgtgacaaaactctaactatactttttaattttatttaattttgatgatcaagttttatttggagtatatttgagattgaaatcaacatttattttttatgttgtagattcattccaaaaaaagaaataggcttgagcacaagaggttgcatgatttggtgtttgtcaaatacaaccaacaattgaagcaaagatataatgcaagagatgaaattgatccaatttctcttaatgatattgatgtgtgcaatgaatggctcgtggaagagatggatcaagatgatgataatgatttggtatttgaagatgatgatgctctaaattgggcaactgtgtatcaggcttcgggggttggagagtgtaggatgtatactaggcgaaaaaagcaaaaaacaacaagtgttgctgctgcccaaacttctaaaaaacaggcaatggttgttggatcttcatcaaggaagcaaaaagcagtccaagaaaatgatgaagatctagattttgaggagaatattgatcttgaatctgaagaagaagaaatcatgatcaattttgaggcgtctgatggggaagagggagagggagatgatccattaccatatgataacaacgaagatgattatgttgggattggagaagatgattagagcctcaaccttttctttgcactttgcattatgtttttatcattttcttattttgaactctttaatgagtttatttggtattggtacttgattattatatgaactcatgaaacttttttagtttatttaaatgcaatcctttgtttttttcaatttcaatgagtttatatatatgtatttttttctttttttg

SEQ ID NO: 7874 - DNA, 1047 bp, Glycine max
  Gm_smallRNAprecursor_707
aagacataatatactggtggctataggattgccgttcaaactatttttaaaaaaaaaaagatttttcttaaaaataattcagatccagaaaaaatttgtgacatatttacttacggagatatttctatagaaccaaatgagggtaaagatattagagaatatcataatcatgtctagactcttacaatctttttctcgtatctattttcgctcaaactcctccttatcatcttcttcaagaaactctaatctattaaatgatcaagacaaccagacccaagaggtcgccccaaaacacaatctcttcgatgaggaagtccgattcgaagatatcaatcaaaatatggatgactggaacattccagaaatccctcaggatcaactatacgttcctgagacaataaaagacaaacacaactttgattacataatcaaaacagtagaaaacaatattcctctaggacaagaagtaggggaagaatttcatttactttcaaaaaattcaatttatgaacatagccgtaagtataaatatctacacatcggttgtgtacaagtagccatcaagcccttaattgatatgggcatagatgcagcagttttaatgtgtctaagagacattaggcataaccaatttgaagattccctaattggaacagtcgaaaccagtctaggacaaggtccaatatattttaattgttatccaaacaaaacagtgagtctgatggacagaaacattcttgactctctgttcttaaacatccactttcatggccttgacatgaaagaaggatcaatcccaacagccttaatatataggatccagtacaaggtcatgaatacttgtgcatctagagtcctgttaaaacctcaaagaggagaaacaactttgtttatcactgatatgacgaaggctaatgtttctcttccaagaaaaataaaatgggatgaagtcactcttcccaaaagatgggttatggataaggcaacaccgtctattccccgacccgctccaaccatagagcatattaagcaagataactccag

SEQ ID NO: 7875 - DNA, 1187 bp, Glycine max
  Gm_smallRNAprecursor_708
ggtagaatgacgaccatttgccagtgtccactgcagtagagacgaatatagtttattgtagtagtatagattatttaaattcaattattgtgtttgacttacctattcagataggctccaaggtaaacatctcgttttgaactctgtatccaactcttgatgtaactttcggattcaaattgtgattgtccagatctctgaatggactgtggctcgaggaatccatacacatcagaattccccgctcgcacacttgtctcagtcagatggctgtgttgttaagtcaaagttaattatgtatgaatttaaaacaattactttggtaattaatagtaatctaaaatgacttacagaatccacaactgtataactgatatgctgagacattgaccaccatgtgcaatttcagagagatcttcgtgctttatatacaacgggaagttttgattaaacaccccgaatatggtagcatcccacataacctggagcggcttcaaaaacagttgtgggatggtcaatgtcatcaggtacaggggatcatcgacctcttcatccgggctttctggaggttttgctggagacacagctgcctattgataaaacatagttaattagcaagttttgattacagtgaacaaattaattgaaaaaaataaacatataatcagagtaaaatacctgttctgataaacgcttcacaagatgtgttggccaagcaaggaaagtgttaagtgcctgccccactaaggtaacctcggcagtgggtacaggaacgagagcctctgtatctttaacctcctcaacaccaaccttgacttggccatgcaacaacgggatgttgtgaactgttgtggatccctcgtaaagtcttcctagggcaaccaagcgggaaggattttcttcaatatataggccgcatttgtctgagtcacccatccctggattgttccctgagggagcaacacaactctcctttgtactgacacgaggacctgagggaccaacctctggctctggaggtagtgcaattccctgtgattgcatccgagactgaaactgcgactgcatctggctgaaggattccatcatctttcgagtcactttttctgtgattgactcctccagttggtctctgatttgttgggtcagctgttctaggtcttcaagaggcatggaggaagaactgc

SEQ ID NO: 7876 - DNA, 1116 bp, Glycine max
  Gm_smallRNAprecursor_709
gctctggaggtagtgcaattccctgtgattgcatccgagactgaaactgcgactgcatctggctgaaggattccatcatctttcgagtcactttttctgtgattgactcctccagttggtctctgatttgttgggtcagctgttctaggtcttcaagaggcatggaggaagaactgcgggatgttcgtgaagctgatccaaagtattgctttatggtgacaccggctccaacagcacgaacacggccagggtgctctggtcgcccaatggcagcagtcaggatatcctgacgtccatgggggacaaacgatccctgtgacgcctgctcgtccaaagaatcctgtaccgaacacctattgtcagaagcttcagggatttgaaattccgcctgacaaacaataaattaggttttgttgtaagtaaataacaaatttagactattaaagaaaatcaacgaagaaaactcaaatacctgaatatcctcccatatcaaatccttctgagcagtagggacttccttccaggtgtcatatgtcacgtcgaccttatcacgagcgacaatccccaaatatgttcttaatttcttcttgtagggaccgtcggccttgccggtagcaggatcgacgttgaccacaggtctttctgccccaggtggtctagtggccaatgatcgtagccgtgtcgccttgcgtgtccgcttcaacgtagatggagacgcatcagcgtttgcaggaggaggaggaagaggaggaggaggcgaggcaggtggagtatccatggtcctttaaagaaaaaaagttgagttagttaatattatcaaaaaacactgtatgagttatgtaaatgaatgtaccgaaatgaaatattatattagaaaattacgttagacgatgttaattaattctccttcatcatgatcattacgattagcatgaacatcgtcagcttcttcttctccaacgttgttagaagtcatttgtgtagacaaaggactaacataagtgtccatgtatgaatcatcatcttctacattaacaccaattgttttcccgtttagaaccacagaccacctttcatcacaagggtcttgcacataaaatacttgcttagcttgtt

SEQ ID NO: 7877 - DNA, 1045 bp, Glycine max
  Gm_smallRNAprecursor_710
acacacacccgtggttgattttattgggatgcccacggcattggataccataggtagagtacattttgctagagccttgctgcagaattttacgataagaactgtaggtatccccaacaacattcttctcataaatacaagtgtatagtagtaagctcagaatagaatagaagaggaattgtcatgatgaaattgatggtaggtatgctgtatcctagcgacccgtataatgcccatttaagttaagatgtttagttttgggaacaaaaataacatgggtgttgctaggtgtactcaacattattgctggtgcactcaacacttaaggtaaaatgacaaaaatacccttgatccgtaagtcatttaagttgatccgtaaaagacttatgaaccaacttgatctgtagaagccttacggatcaacttgatctgtaagccttttacggatcaagttgatttgtaaggtttctatggatcaagttgatccgtattgtttcgtaaaaggcttacggatcaagttgatccgttagcattttatgaatcaacttgatccgtaagtcttttacggaacaatacgaatcaacttgatccgtagaaaccttatagatcaacttgatccgtatcaaccttatggatcaacttgattcgtacgatttatggaccaccctcacacacacccatcacaaatgcgaaataagcgcatggataattttggtattttaaaaaaatgttgggtgcatcagcaataatgttgggtgcacctagcaacacccaaataacactcaaagaaatataattgattgaaggctaatttgtccttaacactttgtacttagagaacataaacaaatgagtcttaagagtttaagccacttaaataataaatttcataaatgtgcagaaaaaaggtgaacaacaattcaaactggttaaaatacttgaaagctgcaggttgtagggtatctttatatatatatgagaggtaaattgagataattgatgcaatgactttttttcgtccacatggatgataatttcgtaattt

SEQ ID NO: 7878 - DNA, 1044 bp, Glycine max
  Gm_smallRNAprecursor_711
cacacacccgtggttgattttattgggatgcccacggcattggataccataggtagagtacattttgctagagccttgctgcagaattttacgataagaactgtaggtatccccaacaacattcttctcataaatacaagtgtatagtagtaagctcagaatagaatagaagaggaattgtcatgatgaaattgatggtaggtatgctgtatcctagcgacccgtataatgcccatttaagttaagatgtttagttttgggaacaaaaataacatgggtgttgctaggtgtactcaacattattgctggtgcactcaacacttaaggtaaaatgacaaaaatacccttgatccgtaagtcatttaagttgatccgtaaaagacttatgaaccaacttgatctgtagaagccttacggatcaacttgatctgtaagccttttacggatcaagttgatttgtaaggtttctatggatcaagttgatccgtattgtttcgtaaaaggcttacggatcaagttgatccgttagcattttatgaatcaacttgatccgtaagtcttttacggaacaatacgaatcaacttgatccgtagaaaccttatagatcaacttgatccgtatcaaccttatggatcaacttgattcgtacgatttatggaccaccctcacacacacccatcacaaatgcgaaataagcgcatggataattttggtattttaaaaaaatgttgggtgcatcagcaataatgttgggtgcacctagcaacacccaaataacactcaaagaaatataattgattgaaggctaatttgtccttaacactttgtacttagagaacataaacaaatgagtcttaagagtttaagccacttaaataataaatttcataaatgtgcagaaaaaaggtgaacaacaattcaaactggttaaaatacttgaaagctgcaggttgtagggtatctttatatatatatgagaggtaaattgagataattgatgcaatgactttttttcgtccacatggatgataatttcgtaattt

SEQ ID NO: 7879 - DNA, 1058 bp, Glycine max
  Gm_smallRNAprecursor_712
ctattgttgtagccttcgttttcttcattgatgggttcttctgataatggtgcaagtctacccatcatagcttcagcttcttctgcaggttgttgaaacgtgagacacacaacagagaaagaggaaaatgcgtgcaaagacttgaagacagggcttcaaaggaacacatacacactttgtggtgttgttgttgctgctgttgtaatgtgtttgtaggggtttgagcacgcgcagggtgagtgcgtggggtgcacgatggagagaaaaaagaaagaaaaaaaaaaggttgcaccaaagttaactgcaagattgaatgtggtgatgtgacccaaagggtctgatttaaagagagggtgtaaaaagaactgagaaagatgggataaagtagaagtttgattgtgctttcggattgcattattatatggtgcgatgagaattagggttgggataggccaggttggtctacaggggtctatgacctgtcctacataaagtctgacctggattggcctatttaattaaaaggtcaggctcaggcttttttaaaagcctatttaattaaataggtcaggcttaggcttattaaaaagccttagaagcctaataggccggcctatatatatatatatatatatatatatatatatatatatatatatatatatatatatatatatatatatatatatatattatttttttgatataattaatattttttttaactagcagattccattcctataattaagtaaaactttaattacaaggtgtattctagagcaaataaaaatcatatcctatcataatatcctattatcatattatgtttctatacaaatcatatcttatcatatccaattatgtttttatacaaaaattatatcctatcatatttacgttcctatgcaaaaatcatatcatttttctatcaggtttccttttttttaattctcctattacgttcctaaataaaaaatttattgtaaaaaagcttttaaagaggctatcaggtcagaccaggcttttaaaaaggtttggccgagccaaaataaaag

SEQ ID NO: 7880 - DNA, 1076 bp, Glycine max
  Gm_smallRNAprecursor_713
catctttcgggaagagttacctcatcccattttatttttctcgggagagaaacgttagcctttgtcatatcagtgataaacaaggttgtttctcctttttgaggttttaacaggactctagatgcacaagtattcatgaccttgtactggatcctataaattaaggctgctgggattgatccttctttcatgtcaaggccatgaaagtggatgtttaagaacagagagtcaagaatgtttatgtccatcagactcactgttttgtttggataacagttaaaatatattggaccttgtcctaggctggtttcgactgttccaattagggagtcttcaaattgattatgcctaatgtctcttagacacattaaaaccgctgcatctatgcccatatcaattaagggcttgatggctacttgtaacacaaccgatgtgtagatatttatacttacggctatgttcataaattgaattttttgaaagtaaatgaaattcttcccctatatcttgtcctagaggaatattgttttctactgttttgattatgtaatcaaagttgtgtttgtcttttattgtttcaggaacgtatagttgatcctgagggatttctagaatgttccagtcatccatgttttgattgatatcttcgaatcggacttcctcatcgaagagattgtgttttggggcgacctcttgggtctggttatcttgatcatttaataaattggagtttcttgaggaagatgatgaggaggagtttgagcgaaaagagatacgggaaaaagatcgtaaaagtctagacatgattacaatattctctaatatctttgccctcatttggttccatagaaatatctccgtaagtaaatatgtcacaaaatttttctggatctgaattatttttaagaaaaactctttttttttttttgaaaaacagtttgaacggcaatcctatagccaccagtgtattatgtcttgatattttggttaaacagtacaccttagccttaccgccctttatccaacatgggtcttactgctacagtactattcaactaaaatattagactgttgta

SEQ ID NO: 7881 - DNA, 1159 bp, Glycine max
  Gm_smallRNAprecursor_714
catctttcgggaagagttacctcatcccattttatttttctcgggagagaaacgttagcctttgtcatatcagtgataaacaaggttgtttctcctttttgaggttttaacaggactctagatgcacaagtattcatgaccttgtactggatcctataaattaaggctgctgggattgatccttctttcatgtcaaggccatgaaagtggatgtttaagaacagagagtcaagaatgtttatgtccatcagactcactgttttgtttggataacagttaaaatatattggaccttgtcctaggctggtttcgactgttccaattagggagtcttcaaattgattatgcctaatgtctcttagacacattaaaaccgctgcatctatgcccatatcaattaagggcttgatggctacttgtaacacaaccgatgtgtagatatttatacttacggctatgttcataaattgaattttttgaaagtaaatgaaattcttcccctatatcttgtcctagaggaatattgttttctactgttttgattatgtaatcaaagttgtgtttgtcttttattgtttcaggaacgtatagttgatcctgagggatttctagaatgttccagtcatccatgttttgattgatatcttcgaatcggacttcctcatcgaagagattgtgttttggggcgacctcttgggtctggttatcttgatcatttaataaattggagtttcttgaggaagatgatgaggaggagtttgagcgaaaagagatacgggaaaaagatcgtaaaagtctagacatgattacaatattctctaatatctttgccctcatttggttccatagaaatatctccgtaagtaaatatgtcacaaaatttttctggatctgaattatttttaagaaaaactctttttttttttttgaaaaacagtttgaacggcaatcctatagccaccagtgtattatgtcttgatattttggttaaacagtacaccttagccttaccgccctttatccaacatgggtcttactgctacagtactattcaactaaaatattagactgttgtacttccaggaagtactgttcaaacacttactgtacaaatcaaagtaaaatattacttgtactatacaagactttagttccagat

SEQ ID NO: 7882 - DNA, 1105 bp, Glycine max
  Gm_smallRNAprecursor_715
tgttttgtttggataacagttaaaatatattggaccttgtcctaggctggtttcgactgttccaattagggagtcttcaaattgattatgcctaatgtctcttagacacattaaaaccgctgcatctatgcccatatcaattaagggcttgatggctacttgtaacacaaccgatgtgtagatatttatacttacggctatgttcataaattgaattttttgaaagtaaatgaaattcttcccctatatcttgtcctagaggaatattgttttctactgttttgattatgtaatcaaagttgtgtttgtcttttattgtttcaggaacgtatagttgatcctgagggatttctagaatgttccagtcatccatgttttgattgatatcttcgaatcggacttcctcatcgaagagattgtgttttggggcgacctcttgggtctggttatcttgatcatttaataaattggagtttcttgaggaagatgatgaggaggagtttgagcgaaaagagatacgggaaaaagatcgtaaaagtctagacatgattacaatattctctaatatctttgccctcatttggttccatagaaatatctccgtaagtaaatatgtcacaaaatttttctggatctgaattatttttaagaaaaactctttttttttttttgaaaaacagtttgaacggcaatcctatagccaccagtgtattatgtcttgatattttggttaaacagtacaccttagccttaccgccctttatccaacatgggtcttactgctacagtactattcaactaaaatattagactgttgtacttccaggaagtactgttcaaacacttactgtacaaatcaaagtaaaatattacttgtactatacaagactttagttccagatccataaaatttgtcaacatatgtccttacggacagtattcctacttccccatcaggctctgatatcagagatcagcggaataagatcaaacggacagatagattttatatatatatatatatatatatatatatatatatatatatatatatatatatattaccgtgatacgctcaacatgatggagttgtacaagaactgcc

SEQ ID NO: 7883 - DNA, 1122 bp, Glycine max
  Gm_smallRNAprecursor_716
aactacttgatttgtggactcaacatacatactatatgcctactttcattttctcagatcttgactgaggaagtcttggcatcatgttctagtggtcctcgtggcaatcaacagttaaggatttttgccttactattttactcttacctccctcagtgatcttgctaaatccttgattttttggtttttgtgttggaggcaatttgttgagctctattttggttttaggggaaggtcagaaaataaatgaagatattattattgtcaagattgagctctattttgtgtagtttagaataattaatcttgggtgtcaagattgaggtcattgttattattgtaaacattgtgtagggattcaaaaagtattatttgatctttggatatgtcaaattcttcctccttgatcttgtgttaaaaataattaaaaataatattcaatttaaagacgatgcttatatcagcaccgtctttgaaagtagacattctaaaacggtgcttacctcaacaacgtctttgaaagtaggcattctaagacgttgcttaaataagcaacatcttagaatgcctatttttaaagacgttgctgaggtaagcactgtctttgaaaattgctcacttttaaagacggtgttttggaacccgtcattgaaatttttaagcttcgacgacgtcacatacaacgacgttcgaaaaacgttaatcacttttttccaatagtgagtacaaataacgcatggccgactgcaaaattgcaagtacattagacgcaagtagtagggtacatgaagggtagaaaggtaatttaaatctgtgaactacattgattaaaaagttctctattcgtcatgatggcaaaggaaaaataaaaacaaacgaatacaaaaacctgaaaaagcctttcatttcacaatttcaccacaaagtttggtgcattctaaccgatcgacaaaaaggatcaatcataataattctttcaacccaaagtaagagaaaaaaaaacagattgaatgaaagaacatacaagaaaagtctaaattatatacaaacgatataaataggggaaccggaattcctttgtctttatcctctatgatataactataatataaggttacatta

SEQ ID NO: 7884 - DNA, 1037 bp, Glycine max
  Gm_smallRNAprecursor_717
ttagtggggcaagcacttaacaccttccttgcttggccaacacatcttatgaagcgtttattagaacaggtattttactctgattatatgtttatttttttcaattaatttgttcactataatcaaaacttgttaattaactatgttttatcaacaggcagctgtgtctccagcaaaacctccagaaatcccagatgaagaggtcgatgatcccctgtacctgatgacattgaccatcccacaactgtttttgaagccgctccaggttatgtgggatgctaccatattcgaggtgtttaatcaaaacttcccgttgtatataaagcacgaagatctctttgaaattgcacacgatggtcaatgtctcagcatatctgttatacagttgtggattctgtaagtcattttagattactattaattaccaaagtaattgttttaaattcatacataattaactttgacttaacaacacagccatctgactaagacaagtgtgcgagcggggaattctgatgtgtatggattcctcgagccacagtccattcagagatctgggcaatcacaatttgaatccgaaagttacatcaagagttagatacagagttcaaaatgagatgtttaccttggagcctacctgaatgggtaagtcaaacacaataattgaatttaaataatctatactactacaataacccatattcgtctctactgcagcagacactggcaaatggtcgtcattttgcctaaggaaaacctagttgtctggttttgttctttacataacaggtcagacaactaccttaagggaataattaacaggtcagtattgttttcaatacattttcattggcataactcagcaacatcaatagtttaatgttcctcatattcaacactagtgctttgaaaggacttgatgatactccacagccgaaatccaaggctgctgctaggtggattgttattaaggtacgtgatttaaataaaagttctacttatatatattttatgtgtgtgtacactaattgtagtta

SEQ ID NO: 7885 - DNA, 1064 bp, Glycine max
  Gm_smallRNAprecursor_718
aacacatcttatgaagcgtttattagaacaggtattttactctgattatatgtttatttttttcaattaatttgttcactataatcaaaacttgttaattaactatgttttatcaacaggcagctgtgtctccagcaaaacctccagaaatcccagatgaagaggtcgatgatcccctgtacctgatgacattgaccatcccacaactgtttttgaagccgctccaggttatgtgggatgctaccatattcgaggtgtttaatcaaaacttcccgttgtatataaagcacgaagatctctttgaaattgcacacgatggtcaatgtctcagcatatctgttatacagttgtggattctgtaagtcattttagattactattaattaccaaagtaattgttttaaattcatacataattaactttgacttaacaacacagccatctgactaagacaagtgtgcgagcggggaattctgatgtgtatggattcctcgagccacagtccattcagagatctgggcaatcacaatttgaatccgaaagttacatcaagagttagatacagagttcaaaatgagatgtttaccttggagcctacctgaatgggtaagtcaaacacaataattgaatttaaataatctatactactacaataacccatattcgtctctactgcagcagacactggcaaatggtcgtcattttgcctaaggaaaacctagttgtctggttttgttctttacataacaggtcagacaactaccttaagggaataattaacaggtcagtattgttttcaatacattttcattggcataactcagcaacatcaatagtttaatgttcctcatattcaacactagtgctttgaaaggacttgatgatactccacagccgaaatccaaggctgctgctaggtggattgttattaaggtacgtgatttaaataaaagttctacttatatatattttatgtgtgtgtacactaattgtagttaacgtttaattaatatccaaatttcattatgtatttagtgtaatagacaaaaaggaatcactgaat

SEQ ID NO: 7886 - DNA, 1166 bp, Glycine max
  Gm_smallRNAprecursor_719
attttactgttttttttcttatatgtaaatataaataatataaggttatgccatagggacatggtcatttttacccctaacaatcttagaagtaaatatagaccatgtttttacgccatacccttataccatttatatttacatattagcaaaaagaaacagtaaaatcttaaggacaaatagttaagaaacttgttcattagctgcaaatatccttccctcctcaagtgcaaacttcttgcgtagccgctcttggtgctcagaaaatcccaaaaacaaatccctcttattactagctattttgaattctttagttcctgaatatacaaccttcaaattgttgctcgttcccctctttgagaatgaggaagatcttcataggacttcatccagctgatgtttgtcggcagtttcatcatccaccacccttttcttctgtgccttctcacgttcattgttgttaaacccatatttatgccttcttcccttcatgtcttgtttgatcacaactttagctgaatctcccatcttcagcatagttgaatctcctgtcttactgtccaatgccacattttgatggcctgtatctcttttgctcgtatgttctactgcttcagcttcacaatgcatagagcaatcagaattttcgagtcatcaccaaaggcttctgcatcagcgttgacactctccaccctctttggtttatgcttctatgttttcttccatgcttcctccttataattctcagatttattggaggtcccactagaaggatcagcaccaatccgtgcctgttcctcctctaccagctcaatatctttcctttcacctttgcttttgaaaactacactgtaatttacaaaacaaaagttgaaaggaaagatattgacctgatagacgaggaagaagcacagattggtgatgatcgttctagtgcaacctcgaataaagatgagatttataacgaggaggcacggaagaaaacacagaagcataaaccaaagagggtggagagtgtcaatgctgatgcagaagccattggtgatcactcggaaattctgattgctttatgcattctgaagctgaagcactagaacatacgaagaaaagagatacaggccatcaaagtgtggcattggacaatgagacaggagtttcaactatgc

SEQ ID NO: 7887 - DNA, 1039 bp, Glycine max
  Gm_smallRNAprecursor_720
agcaatcaaagaatacaacatcagaaatccttttgattgcagaacaatttactctgaccaaagaaggctacacttcgtctgcaagttacatgaaaatggttgtacatggagcttgggcacatgcaattcaaagaggcataacaaatggattatcaagagtatcagaggtcatcacacttgtctcgtgccaatgctcagacaagatcatcgccaactcgacaaacacgtcatagcacagatcatccaaccaattgtcaaaacaaacccaactgtctccatcaagacattgattgcagagatcaaaacgttcatgaattataccccatcctacaagaagacatggttagcaaagcaaaaagcattggagatgattcatggaaactgggaagaatcatatgccaaattgccaaaacttttcggagctttgcaatcttgtgttcccgggactgtggtcgctgctcaaacagaatccttgtatgaggggggagaaatagtatcgggcaaaagattgtttaaacgtgtcttttggtcatttggtccatgcattaatggttttgcatattgcaaacccattgtacaagtagatggtacatgactttacggaaagtatactggcacactgttgatagctaccgcacaagatggagctaaccatatcttcccgattgcctatgccattgtagaaggggagacaacttcagcttgggggttttttctaaagaatttgagaagacatgttcaccgcaaattaacatttctcttatttcagaccgacacccctcaattataagtgcctacaacaacccaagtaacttatgggtccaggacacatcccatttcttttgtctgcgccacattgcacaaaactttcttcgtggtaactcaaactgcaaacatttaaagaaaccacttatgttggctggtgagaatctattttatttattcgttataattttctttcaatcaaattttataacataatacattgattaaatatttacagggtacgcatacacggagaagatgcactggcgacatc

SEQ ID NO: 7888 - DNA, 1051 bp, Glycine max
  Gm_smallRNAprecursor_721
actggcgacatcttggggatattcgtgcgaataagccaagtgcagctgaatggcttgatcaattatccaaacaaaaatgggtacaatgctttgatgaggggaatcgttggggacatatgactaccaatttgtcggagtctgttaattccatgttaaaaaacacaagacatttgtcggtgtcatcattggttgaggagacctatttcaagaccgcacaactctttgctaatagaggtcgacaaactcaggcaatgatcaactccggctcacagtattctgaagttgtcttcgatgcaatcaatagtggtcaacaagaatctaatacacacattgtaaatgaattcgacagacacaatcacacttttattataaccgagactcaatccccacttgaaacacccaaaccacctggaaggtttagagtaatgttacaatcccaaaagtgtgattgtggtgaatttcaggctaaacatttaccgtgttctcacgtcatgactgcctgtaaatctgtcaatgttgatcccatgacctatttgccgatgatattcactttacaacacattttgcacatctacgacaactcctttggtttattgccacacgaatcaatgtgacaagaatatgaaggagatcagtggggtcctgatccaaggagaaagaggactgcaaagggtcgtcccgtttcaactcgcattcctactgagatggacgaagacgaaaatgaacgagcaagtagaaaaaaatgtggactttcccagcaacatggtcatagcagaaataattgtcctaatgtatcctcatcttagttttttcttagacaaatgtcattgtttaaatattttattgatgacgtagtataatgttcttatataaataaattgttaaaagcgttagttttatcatttttaattaaatctaataacataaacaaactaattatatttagtaaaatagttaaattaaaaattttaaaattcagattattatacaaaataaatatttactaaaataaatatattatacaaaattcagattttaaaacatatattca

SEQ ID NO: 7889 - DNA, 1052 bp, Glycine max
  Gm_smallRNAprecursor_722
actggcgacatcttggggatattcgtgcgaataagccaagtgcagctgaatggcttgatcaattatccaaacaaaaatgggtacaatgctttgatgaggggaatcgttggggacatatgactaccaatttgtcggagtctgttaattccatgttaaaaaacacaagacatttgtcggtgtcatcattggttgaggagacctatttcaagaccgcacaactctttgctaatagaggtcgacaaactcaggcaatgatcaactccggctcacagtattctgaagttgtcttcgatgcaatcaatagtggtcaacaagaatctaatacacacattgtaaatgaattcgacagacacaatcacacttttattataaccgagactcaatccccacttgaaacacccaaaccacctggaaggtttagagtaatgttacaatcccaaaagtgtgattgtggtgaatttcaggctaaacatttaccgtgttctcacgtcatgactgcctgtaaatctgtcaatgttgatcccatgacctatttgccgatgatattcactttacaacacattttgcacatctacgacaactcctttggtttattgccacacgaatcaatgtgacaagaatatgaaggagatcagtggggtcctgatccaaggagaaagaggactgcaaagggtcgtcccgtttcaactcgcattcctactgagatggacgaagacgaaaatgaacgagcaagtagaaaaaaatgtggactttcccagcaacatggtcatagcagaaataattgtcctaatgtatcctcatcttagttttttcttagacaaatgtcattgtttaaatattttattgatgacgtagtataatgttcttatataaataaattgttaaaagcgttagttttatcatttttaattaaatctaataacataaacaaactaattatatttagtaaaatagttaaattaaaaattttaaaattcagattattatacaaaataaatatttactaaaataaatatattatacaaaattcagattttaaaacatatattcat

SEQ ID NO: 7890 - DNA, 1129 bp, Glycine max
  Gm_smallRNAprecursor_723
ctgcaaaacagttaacaatttatttttataaatataattgttagtttgtttggtaggtggtgtttgagctttggctaaaggtagttttcctttagtattggtggctgttttggtcattgacgcattttggatcattgtttgtaaatttgattcagattcatcatcagattctgaggcaatgtctgcccaagattttttgattatttttggaaatttggtcagacccatgtcttgaagggcctgaagggtttcaattggccaagcatagtcggccgatgtttgtttggcggttgccggtttgggagattcctgagtggatggctcaggtttgattgaggcaatctgggttgatgacccttctaaattggttttctgggtagatgacccagcctgggttggtgacccagaagaggtagatgatttcttcatggttggttctggaagagccagcctggctcctttgcctgtactccttcctccccgtagggagattcccgatgccttaggaggcattaccacttttctgtaagaattcacgggtaaggtagtcaggtagtgaatttgaggtgcccttgatgtattctatgtcaaaatcaaagacacttaaaattgcttgccatcgtgcaaaaatttgttttgaggcaaggttttttacatctttttgtaaaatatctttggctgatttacaatcaaccctgattaaaaatttttggtttaataaatccgattgaaatttggaaatgcacaaaacaattgctaaaacttcttttttaacagttgaatattttaattgtgcaggattccaatgttttgatgtatatgcaatgacatgatcttggccatggactctttgtttgaggatgccaccataacctatgtctgaagcatcagtttcgacaattttaaatgcctgtggaataggaagatacagacatttaatggattggactttgactttgatttctttaaccgtttgtgtatggaggtcagaccaaggaggcggatttttcttcagcctatcatgtaatggcttgacaatattatttaaataggggacaaattctcctacgtaatttagacaacctagaaatctttgtaactgagttttgtctaagatttggttggggaa

SEQ ID NO: 7891 - DNA, 1115 bp, Glycine max
  Gm_smallRNAprecursor_724
acaatttatttttataaatataattgttagtttgtttggtaggtggtgtttgagctttggctaaaggtagttttcctttagtattggtggctgttttggtcattgacgcattttggatcattgtttgtaaatttgattcagattcatcatcagattctgaggcaatgtctgcccaagattttttgattatttttggaaatttggtcagacccatgtcttgaagggcctgaagggtttcaattggccaagcatagtcggccgatgtttgtttggcggttgccggtttgggagattcctgagtggatggctcaggtttgattgaggcaatctgggttgatgacccttctaaattggttttctgggtagatgacccagcctgggttggtgacccagaagaggtagatgatttcttcatggttggttctggaagagccagcctggctcctttgcctgtactccttcctccccgtagggagattcccgatgccttaggaggcattaccacttttctgtaagaattcacgggtaaggtagtcaggtagtgaatttgaggtgcccttgatgtattctatgtcaaaatcaaagacacttaaaattgcttgccatcgtgcaaaaatttgttttgaggcaaggttttttacatctttttgtaaaatatctttggctgatttacaatcaaccctgattaaaaatttttggtttaataaatccgattgaaatttggaaatgcacaaaacaattgctaaaacttcttttttaacagttgaatattttaattgtgcaggattccaatgttttgatgtatatgcaatgacatgatcttggccatggactctttgtttgaggatgccaccataacctatgtctgaagcatcagtttcgacaattttaaatgcctgtggaataggaagatacagacatttaatggattggactttgactttgatttctttaaccgtttgtgtatggaggtcagaccaaggaggcggatttttcttcagcctatcatgtaatggcttgacaatattatttaaataggggacaaattctcctacgtaatttagacaacctagaaatctttgtaactgagttttgtctaagatttggttggggaa

SEQ ID NO: 7892 - DNA, 1071 bp, Glycine max
  Gm_smallRNAprecursor_725
taaattggttttctgggtagatgacccagcctgggttggtgacccagaagaggtagatgatttcttcatggttggttctggaagagccagcctggctcctttgcctgtactccttcctccccgtagggagattcccgatgccttaggaggcattaccacttttctgtaagaattcacgggtaaggtagtcaggtagtgaatttgaggtgcccttgatgtattctatgtcaaaatcaaagacacttaaaattgcttgccatcgtgcaaaaatttgttttgaggcaaggttttttacatctttttgtaaaatatctttggctgatttacaatcaaccctgattaaaaatttttggtttaataaatccgattgaaatttggaaatgcacaaaacaattgctaaaacttcttttttaacagttgaatattttaattgtgcaggattccaatgttttgatgtatatgcaatgacatgatcttggccatggactctttgtttgaggatgccaccataacctatgtctgaagcatcagtttcgacaattttaaatgcctgtggaataggaagatacagacatttaatggattggactttgactttgatttctttaaccgtttgtgtatggaggtcagaccaaggaggcggatttttcttcagcctatcatgtaatggcttgacaatattatttaaataggggacaaattctcctacgtaatttagacaacctagaaatctttgtaactgagttttgtctaagatttggttggggaatttgctagcaaactctattgacctttcgattggaatgattgtaccttgatatatattgtgaccaaggaatcgaattcgagtttggaaaagattgatttttgatttggagactgccaaaccattttgtttgatgatatgtatgaaggtttggagatgtttgaaatgttggtcaatgttttgggaaaacatcatctatgtagacaatgacaaattttgaataaggattaaaaatatcattcataattttttgaaattctgaaggggcattcttcagcccgaatggcatcacgttccattcatat

SEQ ID NO: 7893 - DNA, 1073 bp, Glycine max
  Gm_smallRNAprecursor_726
taaattggttttctgggtagatgacccagcctgggttggtgacccagaagaggtagatgatttcttcatggttggttctggaagagccagcctggctcctttgcctgtactccttcctccccgtagggagattcccgatgccttaggaggcattaccacttttctgtaagaattcacgggtaaggtagtcaggtagtgaatttgaggtgcccttgatgtattctatgtcaaaatcaaagacacttaaaattgcttgccatcgtgcaaaaatttgttttgaggcaaggttttttacatctttttgtaaaatatctttggctgatttacaatcaaccctgattaaaaatttttggtttaataaatccgattgaaatttggaaatgcacaaaacaattgctaaaacttcttttttaacagttgaatattttaattgtgcaggattccaatgttttgatgtatatgcaatgacatgatcttggccatggactctttgtttgaggatgccaccataacctatgtctgaagcatcagtttcgacaattttaaatgcctgtggaataggaagatacagacatttaatggattggactttgactttgatttctttaaccgtttgtgtatggaggtcagaccaaggaggcggatttttcttcagcctatcatgtaatggcttgacaatattatttaaataggggacaaattctcctacgtaatttagacaacctagaaatctttgtaactgagttttgtctaagatttggttggggaatttgctagcaaactctattgacctttcgattggaatgattgtaccttgatatatattgtgaccaaggaatcgaattcgagtttggaaaagattgatttttgatttggagactgccaaaccattttgtttgatgatatgtatgaaggtttggagatgtttgaaatgttggtcaatgttttgggaaaacatcatctatgtagacaatgacaaattttgaataaggattaaaaatatcattcataattttttgaaattctgaaggggcattcttcagcccgaatggcatcacgttccattcatattg

SEQ ID NO: 7894 - DNA, 1178 bp, Glycine max
  Gm_smallRNAprecursor_727
tggttggttctggaagagccagcctggctcctttgcctgtactccttcctccccgtagggagattcccgatgccttaggaggcattaccacttttctgtaagaattcacgggtaaggtagtcaggtagtgaatttgaggtgcccttgatgtattctatgtcaaaatcaaagacacttaaaattgcttgccatcgtgcaaaaatttgttttgaggcaaggttttttacatctttttgtaaaatatctttggctgatttacaatcaaccctgattaaaaatttttggtttaataaatccgattgaaatttggaaatgcacaaaacaattgctaaaacttcttttttaacagttgaatattttaattgtgcaggattccaatgttttgatgtatatgcaatgacatgatcttggccatggactctttgtttgaggatgccaccataacctatgtctgaagcatcagtttcgacaattttaaatgcctgtggaataggaagatacagacatttaatggattggactttgactttgatttctttaaccgtttgtgtatggaggtcagaccaaggaggcggatttttcttcagcctatcatgtaatggcttgacaatattatttaaataggggacaaattctcctacgtaatttagacaacctagaaatctttgtaactgagttttgtctaagatttggttggggaatttgctagcaaactctattgacctttcgattggaatgattgtaccttgatatatattgtgaccaaggaatcgaattcgagtttggaaaagattgatttttgatttggagactgccaaaccattttgtttgatgatatgtatgaaggtttggagatgtttgaaatgttggtcaatgttttgggaaaacatcatctatgtagacaatgacaaattttgaataaggattaaaaatatcattcataattttttgaaattctgaaggggcattcttcagcccgaatggcatcacgttccattcatattgcccgaaaggtacagtaaacgctgttttgtacctgtctgattcttggatttggatttgccaaaatccagatttcatatcaaattttgaaaatatcttcgcagaatttaatctgttaagcaaatcttttttgtttggaataggatatctaatccattgtaatgcttgatttaatg

SEQ ID NO: 7895 - DNA, 1080 bp, Glycine max
  Gm_smallRNAprecursor_728
ggtttggagatgtttgaaatgttggtcaatgttttgggaaaacatcatctatgtagacaatgacaaattttgaataaggattaaaaatatcattcataattttttgaaattctgaaggggcattcttcagcccgaatggcatcacgttccattcatattgcccgaaaggtacagtaaacgctgttttgtacctgtctgattcttggatttggatttgccaaaatccagatttcatatcaaattttgaaaatatcttcgcagaatttaatctgttaagcaaatcttttttgtttggaataggatatctaatccattgtaatgcttgatttaatggtttgtaatttatgactaagcggggtgttccacgctcaatctccgattgtttgttaacataaaaagccgcacaagaccatgggcttttgcttttccggattaggcctttatcaagcaaatccttgatttccttttgacagtattgaagaagttcttcattcatttggattggtctggcttttgtgggaatttgtttttccctaaagtctttctcataagggagatcgacaatatgtttctttctgtcccaaaatgcatgtggcaattcagaacaaacggttgattcaatatgatttaataaagattgaattctttcttttacttgggttttcccagttgtatctgaatattattaaaagatacttcttcttttaagaagttaatttgattaatcttattttctataagatttatatttctggaaattggtttagtagaaaaattaaataaaatttttcttcctaaataattagtggttattccttcattagatatttggatgggaaacagggctctaatgaagggccttcctaagattacttcattcttaaggttttttaccagaagaaagtttgtgttaatcttaagaccttggttttcaattattgcatttgatagcttaaaattaatttttaattttgagccgtttgccgtacttaatttttctgaggttttctcaaagaattttgtaggaattaatccttctaaaatgcagtttgaatcagcccctgtatcaaatagggccat

SEQ ID NO: 7896 - DNA, 1076 bp, Glycine max
  Gm_smallRNAprecursor_729
ccatctttcgggaagagttacttcatcccattttatttttctcgggagagacacgttagcctttgtcatatcagtgataaacaaggttgtttctcctttttgaggttttaacaggactctagatgcacaagtattcatgaccttgtactggatcctataaattaaggctgctgggattgatccttctttcatgtcaaggccatgaaagtggatgtttaagaacagagagtcaaaaatgtttctgtccatcagactcactgttttgtttggataacaattaaaatatattggaccttgtcctaggctggtttcgactgttccaattagggagtcttcaaattgattatgcctaatatctcttagacacattaaaactgctgcatctatgcccatatcaattaagggcttgatggctacttgtacacaaccgatgtgtaaatatttatacttacggcaatgctcataaattgaattttttgaaagtagatgaaattcttcccctatatcttgtcctagaggaatattgttttctactgttttgattatgtaatcaaagttgtgtttgtctttaattgtttcaggaacgtatagttgatcctgagggatttctggaatgttccagtcatccatgttttgattaatatcttcgaatcggacttcctcatcgaagagattgtgttttggggcgacctcttgggtctggttatcttgatcatttaagagattggtgtttcttgaagaagatgaagaggaggaattcgagcgaaaagaaatacgggaaaaggatcgcaataatctagacataattaaaacattctctaatatctttgccttcatttggttccataggaatctttccataaggctatatgttacagaacttcttggatctgaataaatggaaaagaagattttttttttttttaatacagacaatatagtttgaacattactcctatagccaccagtatattatgtctcaatattttatttgaacaatacaccttagccttactgccctttctcatccacgggacttactgctacagtatcattcaactaaaatatcagactgc

SEQ ID NO: 7897 - DNA, 1159 bp, Glycine max
  Gm_smallRNAprecursor_730
ccatctttcgggaagagttacttcatcccattttatttttctcgggagagacacgttagcctttgtcatatcagtgataaacaaggttgtttctcctttttgaggttttaacaggactctagatgcacaagtattcatgaccttgtactggatcctataaattaaggctgctgggattgatccttctttcatgtcaaggccatgaaagtggatgtttaagaacagagagtcaaaaatgtttctgtccatcagactcactgttttgtttggataacaattaaaatatattggaccttgtcctaggctggtttcgactgttccaattagggagtcttcaaattgattatgcctaatatctcttagacacattaaaactgctgcatctatgcccatatcaattaagggcttgatggctacttgtacacaaccgatgtgtaaatatttatacttacggcaatgctcataaattgaattttttgaaagtagatgaaattcttcccctatatcttgtcctagaggaatattgttttctactgttttgattatgtaatcaaagttgtgtttgtctttaattgtttcaggaacgtatagttgatcctgagggatttctggaatgttccagtcatccatgttttgattaatatcttcgaatcggacttcctcatcgaagagattgtgttttggggcgacctcttgggtctggttatcttgatcatttaagagattggtgtttcttgaagaagatgaagaggaggaattcgagcgaaaagaaatacgggaaaaggatcgcaataatctagacataattaaaacattctctaatatctttgccttcatttggttccataggaatctttccataaggctatatgttacagaacttcttggatctgaataaatggaaaagaagattttttttttttttaatacagacaatatagtttgaacattactcctatagccaccagtatattatgtctcaatattttatttgaacaatacaccttagccttactgccctttctcatccacgggacttactgctacagtatcattcaactaaaatatcagactgctgtgcttccagaaaatactgttcaaacacatactgtttaaattaaaattactgtacatgcttcagatccataagttcagttaa

SEQ ID NO: 7898 - DNA, 1056 bp, Glycine max
  Gm_smallRNAprecursor_731
gttgatcctgagggatttctggaatgttccagtcatccatgttttgattaatatcttcgaatcggacttcctcatcgaagagattgtgttttggggcgacctcttgggtctggttatcttgatcatttaagagattggtgtttcttgaagaagatgaagaggaggaattcgagcgaaaagaaatacgggaaaaggatcgcaataatctagacataattaaaacattctctaatatctttgccttcatttggttccataggaatctttccataaggctatatgttacagaacttcttggatctgaataaatggaaaagaagattttttttttttttaatacagacaatatagtttgaacattactcctatagccaccagtatattatgtctcaatattttatttgaacaatacaccttagccttactgccctttctcatccacgggacttactgctacagtatcattcaactaaaatatcagactgctgtgcttccagaaaatactgttcaaacacatactgtttaaattaaaattactgtacatgcttcagatccataagttcagttaacatatgcccttacggacactattcctacttccccatcaggctctgataccagaggtcagcggagtaggatctaacggacagataggaagtaagaatgcagtatgatgaatgaaatgaaaatataaatttgaaaacagatatcaaggtcacaccggagaccggcttacaaaacccaggttttcataaacaaagaaaccgaagcgacggcagagccgcacaggatcggtgaagggagaagagagaaagatgaaaaatagaaatttatatatatatatatatatattgtgctgttagcttagtgcgatagctaggtcccttaacttacagacctatttgtttgcttagtgataagtatgtaaatctattaatccttttttgtgatatgtctattaattcataagtttattggtttatctaataaaagattcattagtctatttaaatcctaaatattaagctaaaaatttaagtatgtaaatctattaat

SEQ ID NO: 7899 - DNA, 1153 bp, Glycine max
  Gm_smallRNAprecursor_732
gttgatcctgagggatttctggaatgttccagtcatccatgttttgattaatatcttcgaatcggacttcctcatcgaagagattgtgttttggggcgacctcttgggtctggttatcttgatcatttaagagattggtgtttcttgaagaagatgaagaggaggaattcgagcgaaaagaaatacgggaaaaggatcgcaataatctagacataattaaaacattctctaatatctttgccttcatttggttccataggaatctttccataaggctatatgttacagaacttcttggatctgaataaatggaaaagaagattttttttttttttaatacagacaatatagtttgaacattactcctatagccaccagtatattatgtctcaatattttatttgaacaatacaccttagccttactgccctttctcatccacgggacttactgctacagtatcattcaactaaaatatcagactgctgtgcttccagaaaatactgttcaaacacatactgtttaaattaaaattactgtacatgcttcagatccataagttcagttaacatatgcccttacggacactattcctacttccccatcaggctctgataccagaggtcagcggagtaggatctaacggacagataggaagtaagaatgcagtatgatgaatgaaatgaaaatataaatttgaaaacagatatcaaggtcacaccggagaccggcttacaaaacccaggttttcataaacaaagaaaccgaagcgacggcagagccgcacaggatcggtgaagggagaagagagaaagatgaaaaatagaaatttatatatatatatatatatattgtgctgttagcttagtgcgatagctaggtcccttaacttacagacctatttgtttgcttagtgataagtatgtaaatctattaatccttttttgtgatatgtctattaattcataagtttattggtttatctaataaaagattcattagtctatttaaatcctaaatattaagctaaaaatttaagtatgtaaatctattaatccgtttttgtgatatgtctattaatccataaggttattggtttatctaataaaagattcattagtctatttaaatcctaaatattaagctaaaaatt

SEQ ID NO: 7900 - DNA, 1049 bp, Glycine max
  Gm_smallRNAprecursor_733
atcctgagggatttctggaatgttccagtcatccatgttttgattaatatcttcgaatcggacttcctcatcgaagagattgtgttttggggcgacctcttgggtctggttatcttgatcatttaagagattggtgtttcttgaagaagatgaagaggaggaattcgagcgaaaagaaatacgggaaaaggatcgcaataatctagacataattaaaacattctctaatatctttgccttcatttggttccataggaatctttccataaggctatatgttacagaacttcttggatctgaataaatggaaaagaagattttttttttttttaatacagacaatatagtttgaacattactcctatagccaccagtatattatgtctcaatattttatttgaacaatacaccttagccttactgccctttctcatccacgggacttactgctacagtatcattcaactaaaatatcagactgctgtgcttccagaaaatactgttcaaacacatactgtttaaattaaaattactgtacatgcttcagatccataagttcagttaacatatgcccttacggacactattcctacttccccatcaggctctgataccagaggtcagcggagtaggatctaacggacagataggaagtaagaatgcagtatgatgaatgaaatgaaaatataaatttgaaaacagatatcaaggtcacaccggagaccggcttacaaaacccaggttttcataaacaaagaaaccgaagcgacggcagagccgcacaggatcggtgaagggagaagagagaaagatgaaaaatagaaatttatatatatatatatatatattgtgctgttagcttagtgcgatagctaggtcccttaacttacagacctatttgtttgcttagtgataagtatgtaaatctattaatccttttttgtgatatgtctattaattcataagtttattggtttatctaataaaagattcattagtctatttaaatcctaaatattaagctaaaaatttaagtatgtaaatctatt

SEQ ID NO: 7901 - DNA, 1052 bp, Glycine max
  Gm_smallRNAprecursor_734
atcctgagggatttctggaatgttccagtcatccatgttttgattaatatcttcgaatcggacttcctcatcgaagagattgtgttttggggcgacctcttgggtctggttatcttgatcatttaagagattggtgtttcttgaagaagatgaagaggaggaattcgagcgaaaagaaatacgggaaaaggatcgcaataatctagacataattaaaacattctctaatatctttgccttcatttggttccataggaatctttccataaggctatatgttacagaacttcttggatctgaataaatggaaaagaagattttttttttttttaatacagacaatatagtttgaacattactcctatagccaccagtatattatgtctcaatattttatttgaacaatacaccttagccttactgccctttctcatccacgggacttactgctacagtatcattcaactaaaatatcagactgctgtgcttccagaaaatactgttcaaacacatactgtttaaattaaaattactgtacatgcttcagatccataagttcagttaacatatgcccttacggacactattcctacttccccatcaggctctgataccagaggtcagcggagtaggatctaacggacagataggaagtaagaatgcagtatgatgaatgaaatgaaaatataaatttgaaaacagatatcaaggtcacaccggagaccggcttacaaaacccaggttttcataaacaaagaaaccgaagcgacggcagagccgcacaggatcggtgaagggagaagagagaaagatgaaaaatagaaatttatatatatatatatatatattgtgctgttagcttagtgcgatagctaggtcccttaacttacagacctatttgtttgcttagtgataagtatgtaaatctattaatccttttttgtgatatgtctattaattcataagtttattggtttatctaataaaagattcattagtctatttaaatcctaaatattaagctaaaaatttaagtatgtaaatctattaat

SEQ ID NO: 7902 - DNA, 1064 bp, Glycine max
  Gm_smallRNAprecursor_735
atcctgagggatttctggaatgttccagtcatccatgttttgattaatatcttcgaatcggacttcctcatcgaagagattgtgttttggggcgacctcttgggtctggttatcttgatcatttaagagattggtgtttcttgaagaagatgaagaggaggaattcgagcgaaaagaaatacgggaaaaggatcgcaataatctagacataattaaaacattctctaatatctttgccttcatttggttccataggaatctttccataaggctatatgttacagaacttcttggatctgaataaatggaaaagaagattttttttttttttaatacagacaatatagtttgaacattactcctatagccaccagtatattatgtctcaatattttatttgaacaatacaccttagccttactgccctttctcatccacgggacttactgctacagtatcattcaactaaaatatcagactgctgtgcttccagaaaatactgttcaaacacatactgtttaaattaaaattactgtacatgcttcagatccataagttcagttaacatatgcccttacggacactattcctacttccccatcaggctctgataccagaggtcagcggagtaggatctaacggacagataggaagtaagaatgcagtatgatgaatgaaatgaaaatataaatttgaaaacagatatcaaggtcacaccggagaccggcttacaaaacccaggttttcataaacaaagaaaccgaagcgacggcagagccgcacaggatcggtgaagggagaagagagaaagatgaaaaatagaaatttatatatatatatatatatattgtgctgttagcttagtgcgatagctaggtcccttaacttacagacctatttgtttgcttagtgataagtatgtaaatctattaatccttttttgtgatatgtctattaattcataagtttattggtttatctaataaaagattcattagtctatttaaatcctaaatattaagctaaaaatttaagtatgtaaatctattaatccgtttttgtga

SEQ ID NO: 7903 - DNA, 1188 bp, Glycine max
  Gm_smallRNAprecursor_736
ccgtctttgcattttctgggtcaacaaacatctttgtctttcgcctataccagaccatgtagtccgagttaaagctcaataggccttcttgtcggggataagcgtcgaccctaaatgcatggcgattattccactaatgaatcattggggcgaacaattgcccccaattttcgtcatgtttcccttttaatgttatgccatgaatgtttaagggttgtgaaggagactctggaactggttgctgcatcccaaattgtctcaacactctgtccggttggtgccactcaataacttggaaacaaattagtggcaccaccgcgtaccacgcgagacttccgactaaacaaacgggaggcaacaatgatataactgttgatgggtaaagctcctacacaaactgcatataacaacatagttgtgaacattgtagtaaaataagacatataattttttattttacaaatacaatagcatggttcttacctcatgaagtttcataatatccaacttgcgacgaaaaactttcacatcatcattgccgatatgttggtttccacgtcgcagccacctacaaagaataaaatttaatataccctaaaaccatttattctattgaaatgaaagacgctgttaaaaatgactgacctgtgcgccagtggtgtattttctacttgggaaggagtcatctttggagccaaggttggacatcgttcccatgcccacaattgtagtaagatgcacatacctccgattgatttagttttataatcggtggcactgcacatctctctgtatagaaaaccaagtacggcagctccccatgcatatctgccacattcttcaaagtcacgtaaaaattgaaggtactttagcgaaactctgttactggttttgtcaatgaataagacacctccaatgaatctcagtatccatgcacgggcaaaccttcgtacttgttcttcgtcgtcgtcattatttatttgtgcaaaatggtgagccagccaacttaatttaaccacattacctttaatttcatcttctcgtggtttgactcccaataattcctcacataaatcagcccaatcaagatttgttggaccgattaatggtaaaccatccacacttatacctaacaatacagagacgtcttgtagagtaatagtacactctccgcatctcatgtgaaac

SEQ ID NO: 7904 - DNA, 1126 bp, Glycine max
  Gm_smallRNAprecursor_737
agattaacacaaactttcttctggtaaaaaaccttaagaatgaagtaatcttaggaacgcccttcattagagccctgtttcccatccaaatatctaatgaaggaataaccacaaattatttaggaagaaaaattatatttaatttttctactaaaccaatttccagaaatataaatcttatagaaaataagattaatcaaattaacttcttaaaagaagaagtatcttttaataatattcagatacaactgggaaaaccccaagtaaaagaaaaaaattcaatctttattaaatcatattgaatcgaccgtctgttttgaattgccacatgcattttgggacataaagaaacatattgttgatctcccttatgagaaagactttaggaaaaaacaaattcccacaaaagccagaccaatccaaatgaatgaagaacttcttcaatactgtcaaaaggaaatcaaggatttgcttgataaaggcctaatccggaaaagcaaaagcccatggtcttgtgcggctttttatgtcaataaacaatctgagattgagcgtggaacaccccgcttagtcataaattacaaaccactaaatcaagcattacaatggattagatatcctattccaaacaaaaaagatttgcttaatagattaaattctgcaaagatattttcaaaatttgatatgaaatctggattttggcaaatccaaatccaagaatcagataggtacaaaacagcgtttactgtaccttttgggcaatatgaatggaacgtgatgccattcggactggagaatgccccttcagaatttcaaaaaattatgaacgatatttttaatccctattcaaaatttgtcattgtctacatagatgatgttttaatcttttcccaaaacattgaccaacatttcaaacatctccaaaccttcatccatatcatcaaacaaaatggtttggcagtctccaaatcaaaaatcaatcttttccaaactcgaattcgattccttggtcacaatatatatcaaggtacaatcattccaatcgaaagatcaatagagtttgctaacaaattccccaaccaaatcttagacaaaacccagttacaaagatttctaggttgtctaa

SEQ ID NO: 7905 - DNA, 1234 bp, Glycine max
  Gm_smallRNAprecursor_738
ccaagtaaaagaaaaaaattcaatctttattaaatcatattgaatcgaccgtctgttttgaattgccacatgcattttgggacataaagaaacatattgttgatctcccttatgagaaagactttaggaaaaaacaaattcccacaaaagccagaccaatccaaatgaatgaagaacttcttcaatactgtcaaaaggaaatcaaggatttgcttgataaaggcctaatccggaaaagcaaaagcccatggtcttgtgcggctttttatgtcaataaacaatctgagattgagcgtggaacaccccgcttagtcataaattacaaaccactaaatcaagcattacaatggattagatatcctattccaaacaaaaaagatttgcttaatagattaaattctgcaaagatattttcaaaatttgatatgaaatctggattttggcaaatccaaatccaagaatcagataggtacaaaacagcgtttactgtaccttttgggcaatatgaatggaacgtgatgccattcggactggagaatgccccttcagaatttcaaaaaattatgaacgatatttttaatccctattcaaaatttgtcattgtctacatagatgatgttttaatcttttcccaaaacattgaccaacatttcaaacatctccaaaccttcatccatatcatcaaacaaaatggtttggcagtctccaaatcaaaaatcaatcttttccaaactcgaattcgattccttggtcacaatatatatcaaggtacaatcattccaatcgaaagatcaatagagtttgctaacaaattccccaaccaaatcttagacaaaacccagttacaaagatttctaggttgtctaaattacgtaggagaatttgtcccctatttaaacaatattgtcaagccattgcatgataggctgaagaaaaatccgcctccttggtctgacctccatacacaaacagttaaagaaatcaaagtcaaagtccaatccattaaatgtatgtatcttcctattccacaggcatttaaaatcgtcgaaactgatgcttcagacataggttatggtggcatcctcaaacaaagagtccatggccaagatcatgtcattgcatatacatcaaaacattggaatcctgcacaattaaaatattcaactgttaaaaaagaagttttagcaattgttttgtgcatttccaaatttcaatcggatttattaaaccaaaa

SEQ ID NO: 7906 - DNA, 1080 bp, Glycine max
  Gm_smallRNAprecursor_739
aaaagcaaaagcccatggtcttgtgcggctttttatgtcaataaacaatctgagattgagcgtggaacaccccgcttagtcataaattacaaaccactaaatcaagcattacaatggattagatatcctattccaaacaaaaaagatttgcttaatagattaaattctgcaaagatattttcaaaatttgatatgaaatctggattttggcaaatccaaatccaagaatcagataggtacaaaacagcgtttactgtaccttttgggcaatatgaatggaacgtgatgccattcggactggagaatgccccttcagaatttcaaaaaattatgaacgatatttttaatccctattcaaaatttgtcattgtctacatagatgatgttttaatcttttcccaaaacattgaccaacatttcaaacatctccaaaccttcatccatatcatcaaacaaaatggtttggcagtctccaaatcaaaaatcaatcttttccaaactcgaattcgattccttggtcacaatatatatcaaggtacaatcattccaatcgaaagatcaatagagtttgctaacaaattccccaaccaaatcttagacaaaacccagttacaaagatttctaggttgtctaaattacgtaggagaatttgtcccctatttaaacaatattgtcaagccattgcatgataggctgaagaaaaatccgcctccttggtctgacctccatacacaaacagttaaagaaatcaaagtcaaagtccaatccattaaatgtatgtatcttcctattccacaggcatttaaaatcgtcgaaactgatgcttcagacataggttatggtggcatcctcaaacaaagagtccatggccaagatcatgtcattgcatatacatcaaaacattggaatcctgcacaattaaaatattcaactgttaaaaaagaagttttagcaattgttttgtgcatttccaaatttcaatcggatttattaaaccaaaaatttctaatcagggttgattgtaaatcaaccaaagatattttacaaaaagatgttaaaaaccttgcctcaaaacaaatt

SEQ ID NO: 7907 - DNA, 1168 bp, Glycine max
  Gm_smallRNAprecursor_740
atggtcttgtgcggctttttatgtcaataaacaatctgagattgagcgtggaacaccccgcttagtcataaattacaaaccactaaatcaagcattacaatggattagatatcctattccaaacaaaaaagatttgcttaatagattaaattctgcaaagatattttcaaaatttgatatgaaatctggattttggcaaatccaaatccaagaatcagataggtacaaaacagcgtttactgtaccttttgggcaatatgaatggaacgtgatgccattcggactggagaatgccccttcagaatttcaaaaaattatgaacgatatttttaatccctattcaaaatttgtcattgtctacatagatgatgttttaatcttttcccaaaacattgaccaacatttcaaacatctccaaaccttcatccatatcatcaaacaaaatggtttggcagtctccaaatcaaaaatcaatcttttccaaactcgaattcgattccttggtcacaatatatatcaaggtacaatcattccaatcgaaagatcaatagagtttgctaacaaattccccaaccaaatcttagacaaaacccagttacaaagatttctaggttgtctaaattacgtaggagaatttgtcccctatttaaacaatattgtcaagccattgcatgataggctgaagaaaaatccgcctccttggtctgacctccatacacaaacagttaaagaaatcaaagtcaaagtccaatccattaaatgtatgtatcttcctattccacaggcatttaaaatcgtcgaaactgatgcttcagacataggttatggtggcatcctcaaacaaagagtccatggccaagatcatgtcattgcatatacatcaaaacattggaatcctgcacaattaaaatattcaactgttaaaaaagaagttttagcaattgttttgtgcatttccaaatttcaatcggatttattaaaccaaaaatttctaatcagggttgattgtaaatcaaccaaagatattttacaaaaagatgttaaaaaccttgcctcaaaacaaatttttgcaagatggcaagcaattctaagtgtctttgattttgacatagaatacatcaagagcacctcaaactcattacctgactaccttacccgtgaattctta

SEQ ID NO: 7908 - DNA, 1035 bp, Glycine max
  Gm_smallRNAprecursor_741
attgtctacatagatgatgttttaatcttttcccaaaacattgaccaacatttcaaacatctccaaaccttcatccatatcatcaaacaaaatggtttggcagtctccaaatcaaaaatcaatcttttccaaactcgaattcgattccttggtcacaatatatatcaaggtacaatcattccaatcgaaagatcaatagagtttgctaacaaattccccaaccaaatcttagacaaaacccagttacaaagatttctaggttgtctaaattacgtaggagaatttgtcccctatttaaacaatattgtcaagccattgcatgataggctgaagaaaaatccgcctccttggtctgacctccatacacaaacagttaaagaaatcaaagtcaaagtccaatccattaaatgtatgtatcttcctattccacaggcatttaaaatcgtcgaaactgatgcttcagacataggttatggtggcatcctcaaacaaagagtccatggccaagatcatgtcattgcatatacatcaaaacattggaatcctgcacaattaaaatattcaactgttaaaaaagaagttttagcaattgttttgtgcatttccaaatttcaatcggatttattaaaccaaaaatttctaatcagggttgattgtaaatcaaccaaagatattttacaaaaagatgttaaaaaccttgcctcaaaacaaatttttgcaagatggcaagcaattctaagtgtctttgattttgacatagaatacatcaagagcacctcaaactcattacctgactaccttacccgtgaattcttacagaaaagtggtaatgccttctaaggcatcaggaatctccctaaggggaggaaggagtacaggcaaaggagccagactggctcttccagagccaaccatcaagaaatcatcaacctcttctgggtcaccaacccaggctgggtcatctacccagaaaaccaatttagaagggtcatcaacccagattgcctcaatcaaacctgagtcatccactcagga

SEQ ID NO: 7909 - DNA, 1035 bp, Glycine max; identical to SEQ ID NO: 7908
  Gm_smallRNAprecursor_742

SEQ ID NO: 7910 - DNA, 1113 bp, Glycine max
  Gm_smallRNAprecursor_743
attgtctacatagatgatgttttaatcttttcccaaaacattgaccaacatttcaaacatctccaaaccttcatccatatcatcaaacaaaatggtttggcagtctccaaatcaaaaatcaatcttttccaaactcgaattcgattccttggtcacaatatatatcaaggtacaatcattccaatcgaaagatcaatagagtttgctaacaaattccccaaccaaatcttagacaaaacccagttacaaagatttctaggttgtctaaattacgtaggagaatttgtcccctatttaaacaatattgtcaagccattgcatgataggctgaagaaaaatccgcctccttggtctgacctccatacacaaacagttaaagaaatcaaagtcaaagtccaatccattaaatgtatgtatcttcctattccacaggcatttaaaatcgtcgaaactgatgcttcagacataggttatggtggcatcctcaaacaaagagtccatggccaagatcatgtcattgcatatacatcaaaacattggaatcctgcacaattaaaatattcaactgttaaaaaagaagttttagcaattgttttgtgcatttccaaatttcaatcggatttattaaaccaaaaatttctaatcagggttgattgtaaatcaaccaaagatattttacaaaaagatgttaaaaaccttgcctcaaaacaaatttttgcaagatggcaagcaattctaagtgtctttgattttgacatagaatacatcaagagcacctcaaactcattacctgactaccttacccgtgaattcttacagaaaagtggtaatgccttctaaggcatcaggaatctccctaaggggaggaaggagtacaggcaaaggagccagactggctcttccagagccaaccatcaagaaatcatcaacctcttctgggtcaccaacccaggctgggtcatctacccagaaaaccaatttagaagggtcatcaacccagattgcctcaatcaaacctgagtcatccactcaggaatctcccaaaccggcaaccgccaaacaaacatcggccgactatgcatggccaattgaaacccttcaggcccttcaaga

SEQ ID NO: 7911 - DNA, 1113 bp, Glycine max; identical to SEQ ID NO: 7910
  Gm_smallRNAprecursor_744

SEQ ID NO: 7912 - DNA, 1114 bp, Glycine max
  Gm_smallRNAprecursor_745
attgtctacatagatgatgttttaatcttttcccaaaacattgaccaacatttcaaacatctccaaaccttcatccatatcatcaaacaaaatggtttggcagtctccaaatcaaaaatcaatcttttccaaactcgaattcgattccttggtcacaatatatatcaaggtacaatcattccaatcgaaagatcaatagagtttgctaacaaattccccaaccaaatcttagacaaaacccagttacaaagatttctaggttgtctaaattacgtaggagaatttgtcccctatttaaacaatattgtcaagccattgcatgataggctgaagaaaaatccgcctccttggtctgacctccatacacaaacagttaaagaaatcaaagtcaaagtccaatccattaaatgtatgtatcttcctattccacaggcatttaaaatcgtcgaaactgatgcttcagacataggttatggtggcatcctcaaacaaagagtccatggccaagatcatgtcattgcatatacatcaaaacattggaatcctgcacaattaaaatattcaactgttaaaaaagaagttttagcaattgttttgtgcatttccaaatttcaatcggatttattaaaccaaaaatttctaatcagggttgattgtaaatcaaccaaagatattttacaaaaagatgttaaaaaccttgcctcaaaacaaatttttgcaagatggcaagcaattctaagtgtctttgattttgacatagaatacatcaagagcacctcaaactcattacctgactaccttacccgtgaattcttacagaaaagtggtaatgccttctaaggcatcaggaatctccctaaggggaggaaggagtacaggcaaaggagccagactggctcttccagagccaaccatcaagaaatcatcaacctcttctgggtcaccaacccaggctgggtcatctacccagaaaaccaatttagaagggtcatcaacccagattgcctcaatcaaacctgagtcatccactcaggaatctcccaaaccggcaaccgccaaacaaacatcggccgactatgcatggccaattgaaacccttcaggcccttcaagac

SEQ ID NO: 7913 - DNA, 1114 bp, Glycine max; identical to SEQ ID NO: 7912
  Gm_smallRNAprecursor_746

SEQ ID NO: 7914 - DNA, 1091 bp, Glycine max
  Gm_smallRNAprecursor_747
aagatggcaagcaattctaagtgtctttgattttgacatagaatacatcaagagcacctcaaactcattacctgactaccttacccgtgaattcttacagaaaagtggtaatgccttctaaggcatcaggaatctccctaaggggaggaaggagtacaggcaaaggagccagactggctcttccagagccaaccatcaagaaatcatcaacctcttctgggtcaccaacccaggctgggtcatctacccagaaaaccaatttagaagggtcatcaacccagattgcctcaatcaaacctgagtcatccactcaggaatctcccaaaccggcaaccgccaaacaaacatcggccgactatgcatggccaattgaaacccttcaggcccttcaagacatgggtctgaccaaatttccaaaaataatcaaaaaatcttgggcagacattgcctcagaatctgaatcaaatttacaaacaatgatccaaaaatgcgtcaatgaccaaaacagccaccaatactaaaggaaaactacctttagccaaagctcaaacaccacataccaaacaaactaacaattatatttataaaaataaattgttaactgttttgcagatggaacctgaattttgggacaaaaatcccttcaaggcgatggccaaggctttcccaccaggatttcactacaaaccaaccatcatcctgaagacaagaactttttatgaattgattttggtagattcaaactcagtatctatcaaacatttcaaagatccaaaagatcaaacattaaacacccacccgacaatccaaatactaaaagttcttcaaccaagacactttggttcggacttgaacaaaggaaagagattttcagttccatttgatccggtaggttatacctattgggattacgttgattcttggactaaggtgttttggcaccaaaatacccgcttcaagcattcatggctgatatatttcaagaccaacacaatttacaattttcccaattggtttttgcaatggtgggacttctttggaccaatcccagagatattcccagaaacagtccaacaaggatttgcccaatt

SEQ ID NO: 7915 - DNA, 1208 bp, Glycine max
  Gm_smallRNAprecursor_748
ggtaatgccttctaaggcatcaggaatctccctaaggggaggaaggagtacaggcaaaggagccagactggctcttccagagccaaccatcaagaaatcatcaacctcttctgggtcaccaacccaggctgggtcatctacccagaaaaccaatttagaagggtcatcaacccagattgcctcaatcaaacctgagtcatccactcaggaatctcccaaaccggcaaccgccaaacaaacatcggccgactatgcatggccaattgaaacccttcaggcccttcaagacatgggtctgaccaaatttccaaaaataatcaaaaaatcttgggcagacattgcctcagaatctgaatcaaatttacaaacaatgatccaaaaatgcgtcaatgaccaaaacagccaccaatactaaaggaaaactacctttagccaaagctcaaacaccacataccaaacaaactaacaattatatttataaaaataaattgttaactgttttgcagatggaacctgaattttgggacaaaaatcccttcaaggcgatggccaaggctttcccaccaggatttcactacaaaccaaccatcatcctgaagacaagaactttttatgaattgattttggtagattcaaactcagtatctatcaaacatttcaaagatccaaaagatcaaacattaaacacccacccgacaatccaaatactaaaagttcttcaaccaagacactttggttcggacttgaacaaaggaaagagattttcagttccatttgatccggtaggttatacctattgggattacgttgattcttggactaaggtgttttggcaccaaaatacccgcttcaagcattcatggctgatatatttcaagaccaacacaatttacaattttcccaattggtttttgcaatggtgggacttctttggaccaatcccagagatattcccagaaacagtccaacaaggatttgcccaatttaagaaacaatacaattcgcaggaatcacgaattccagcagatcttaaatacttttcaagctttgcactgtcatggatattctcatggcaatatcgttacagcatgactgaaaagacaaaccaatatccatcactacaaagacacgcatttgtaaaatggtggacacaatttgactcatccaaagcggatccagaacaagtaaaactctggttccaatcccat

SEQ ID NO: 7916 - DNA, 1208 bp, Glycine max; identical to SEQ ID NO: 7915
  Gm_smallRNAprecursor_749

SEQ ID NO: 7917 - DNA, 1211 bp, Glycine max
  Gm_smallRNAprecursor_750
ggtaatgccttctaaggcatcaggaatctccctaaggggaggaaggagtacaggcaaaggagccagactggctcttccagagccaaccatcaagaaatcatcaacctcttctgggtcaccaacccaggctgggtcatctacccagaaaaccaatttagaagggtcatcaacccagattgcctcaatcaaacctgagtcatccactcaggaatctcccaaaccggcaaccgccaaacaaacatcggccgactatgcatggccaattgaaacccttcaggcccttcaagacatgggtctgaccaaatttccaaaaataatcaaaaaatcttgggcagacattgcctcagaatctgaatcaaatttacaaacaatgatccaaaaatgcgtcaatgaccaaaacagccaccaatactaaaggaaaactacctttagccaaagctcaaacaccacataccaaacaaactaacaattatatttataaaaataaattgttaactgttttgcagatggaacctgaattttgggacaaaaatcccttcaaggcgatggccaaggctttcccaccaggatttcactacaaaccaaccatcatcctgaagacaagaactttttatgaattgattttggtagattcaaactcagtatctatcaaacatttcaaagatccaaaagatcaaacattaaacacccacccgacaatccaaatactaaaagttcttcaaccaagacactttggttcggacttgaacaaaggaaagagattttcagttccatttgatccggtaggttatacctattgggattacgttgattcttggactaaggtgttttggcaccaaaatacccgcttcaagcattcatggctgatatatttcaagaccaacacaatttacaattttcccaattggtttttgcaatggtgggacttctttggaccaatcccagagatattcccagaaacagtccaacaaggatttgcccaatttaagaaacaatacaattcgcaggaatcacgaattccagcagatcttaaatacttttcaagctttgcactgtcatggatattctcatggcaatatcgttacagcatgactgaaaagacaaaccaatatccatcactacaaagacacgcatttgtaaaatggtggacacaatttgactcatccaaagcggatccagaacaagtaaaactctggttccaatcccatcca

SEQ ID NO: 7918 - DNA, 1098 bp, Glycine max
  Gm_smallRNAprecursor_751
ctaaggcatcaggaatctccctaaggggaggaaggagtacaggcaaaggagccagactggctcttccagagccaaccatcaagaaatcatcaacctcttctgggtcaccaacccaggctgggtcatctacccagaaaaccaatttagaagggtcatcaacccagattgcctcaatcaaacctgagtcatccactcaggaatctcccaaaccggcaaccgccaaacaaacatcggccgactatgcatggccaattgaaacccttcaggcccttcaagacatgggtctgaccaaatttccaaaaataatcaaaaaatcttgggcagacattgcctcagaatctgaatcaaatttacaaacaatgatccaaaaatgcgtcaatgaccaaaacagccaccaatactaaaggaaaactacctttagccaaagctcaaacaccacataccaaacaaactaacaattatatttataaaaataaattgttaactgttttgcagatggaacctgaattttgggacaaaaatcccttcaaggcgatggccaaggctttcccaccaggatttcactacaaaccaaccatcatcctgaagacaagaactttttatgaattgattttggtagattcaaactcagtatctatcaaacatttcaaagatccaaaagatcaaacattaaacacccacccgacaatccaaatactaaaagttcttcaaccaagacactttggttcggacttgaacaaaggaaagagattttcagttccatttgatccggtaggttatacctattgggattacgttgattcttggactaaggtgttttggcaccaaaatacccgcttcaagcattcatggctgatatatttcaagaccaacacaatttacaattttcccaattggtttttgcaatggtgggacttctttggaccaatcccagagatattcccagaaacagtccaacaaggatttgcccaatttaagaaacaatacaattcgcaggaatcacgaattccagcagatcttaaatacttttcaagctttgcactgtcatggatattctcatggcaatatcgttacagcatgactgaaaagacaaaccaa

SEQ ID NO: 7919 - DNA, 1107 bp, Glycine max
  Gm_smallRNAprecursor_752
ggaatctcccaaaccggcaaccgccaaacaaacatcggccgactatgcatggccaattgaaacccttcaggcccttcaagacatgggtctgaccaaatttccaaaaataatcaaaaaatcttgggcagacattgcctcagaatctgaatcaaatttacaaacaatgatccaaaaatgcgtcaatgaccaaaacagccaccaatactaaaggaaaactacctttagccaaagctcaaacaccacataccaaacaaactaacaattatatttataaaaataaattgttaactgttttgcagatggaacctgaattttgggacaaaaatcccttcaaggcgatggccaaggctttcccaccaggatttcactacaaaccaaccatcatcctgaagacaagaactttttatgaattgattttggtagattcaaactcagtatctatcaaacatttcaaagatccaaaagatcaaacattaaacacccacccgacaatccaaatactaaaagttcttcaaccaagacactttggttcggacttgaacaaaggaaagagattttcagttccatttgatccggtaggttatacctattgggattacgttgattcttggactaaggtgttttggcaccaaaatacccgcttcaagcattcatggctgatatatttcaagaccaacacaatttacaattttcccaattggtttttgcaatggtgggacttctttggaccaatcccagagatattcccagaaacagtccaacaaggatttgcccaatttaagaaacaatacaattcgcaggaatcacgaattccagcagatcttaaatacttttcaagctttgcactgtcatggatattctcatggcaatatcgttacagcatgactgaaaagacaaaccaatatccatcactacaaagacacgcatttgtaaaatggtggacacaatttgactcatccaaagcggatccagaacaagtaaaactctggttccaatcccatccagaattcctcaaagcagctgatccatgaacttctgtgtttttgaaccaaaagtctcatctggcagcatttttagcaggatcaacatcaaaggaggtcttagcta

SEQ ID NO: 7920 - DNA, 1107 bp, Glycine max; identical to SEQ ID NO: 7919
  Gm_smallRNAprecursor_753

SEQ ID NO: 7921 - DNA, 1108 bp, Glycine max
  Gm_smallRNAprecursor_754
ggaatctcccaaaccggcaaccgccaaacaaacatcggccgactatgcatggccaattgaaacccttcaggcccttcaagacatgggtctgaccaaatttccaaaaataatcaaaaaatcttgggcagacattgcctcagaatctgaatcaaatttacaaacaatgatccaaaaatgcgtcaatgaccaaaacagccaccaatactaaaggaaaactacctttagccaaagctcaaacaccacataccaaacaaactaacaattatatttataaaaataaattgttaactgttttgcagatggaacctgaattttgggacaaaaatcccttcaaggcgatggccaaggctttcccaccaggatttcactacaaaccaaccatcatcctgaagacaagaactttttatgaattgattttggtagattcaaactcagtatctatcaaacatttcaaagatccaaaagatcaaacattaaacacccacccgacaatccaaatactaaaagttcttcaaccaagacactttggttcggacttgaacaaaggaaagagattttcagttccatttgatccggtaggttatacctattgggattacgttgattcttggactaaggtgttttggcaccaaaatacccgcttcaagcattcatggctgatatatttcaagaccaacacaatttacaattttcccaattggtttttgcaatggtgggacttctttggaccaatcccagagatattcccagaaacagtccaacaaggatttgcccaatttaagaaacaatacaattcgcaggaatcacgaattccagcagatcttaaatacttttcaagctttgcactgtcatggatattctcatggcaatatcgttacagcatgactgaaaagacaaaccaatatccatcactacaaagacacgcatttgtaaaatggtggacacaatttgactcatccaaagcggatccagaacaagtaaaactctggttccaatcccatccagaattcctcaaagcagctgatccatgaacttctgtgtttttgaaccaaaagtctcatctggcagcatttttagcaggatcaacatcaaaggaggtcttagctaa

SEQ ID NO: 7922 - DNA, 1108 bp, Glycine max; identical to SEQ ID NO: 7921
  Gm_smallRNAprecursor_755

SEQ ID NO: 7923 - DNA, 1244 bp, Glycine max
  Gm_smallRNAprecursor_756
ttcaggcccttcaagacatgggtctgaccaaatttccaaaaataatcaaaaaatcttgggcagacattgcctcagaatctgaatcaaatttacaaacaatgatccaaaaatgcgtcaatgaccaaaacagccaccaatactaaaggaaaactacctttagccaaagctcaaacaccacataccaaacaaactaacaattatatttataaaaataaattgttaactgttttgcagatggaacctgaattttgggacaaaaatcccttcaaggcgatggccaaggctttcccaccaggatttcactacaaaccaaccatcatcctgaagacaagaactttttatgaattgattttggtagattcaaactcagtatctatcaaacatttcaaagatccaaaagatcaaacattaaacacccacccgacaatccaaatactaaaagttcttcaaccaagacactttggttcggacttgaacaaaggaaagagattttcagttccatttgatccggtaggttatacctattgggattacgttgattcttggactaaggtgttttggcaccaaaatacccgcttcaagcattcatggctgatatatttcaagaccaacacaatttacaattttcccaattggtttttgcaatggtgggacttctttggaccaatcccagagatattcccagaaacagtccaacaaggatttgcccaatttaagaaacaatacaattcgcaggaatcacgaattccagcagatcttaaatacttttcaagctttgcactgtcatggatattctcatggcaatatcgttacagcatgactgaaaagacaaaccaatatccatcactacaaagacacgcatttgtaaaatggtggacacaatttgactcatccaaagcggatccagaacaagtaaaactctggttccaatcccatccagaattcctcaaagcagctgatccatgaacttctgtgtttttgaaccaaaagtctcatctggcagcatttttagcaggatcaacatcaaaggaggtcttagctaaaaatctgaaggaagttctgcaaatgttacagcaggaagaagaagcttcatcctcaaagaaggaagaaacaagttctgctgaagaagaagaagaagatcccttttaccaaaacgaagatgattgttttggtatctgtttagattaaatttaatttcggtcacaaaaccatctgtttgtaattaatgtataattaatgctgga

SEQ ID NO: 7924 - DNA, 1062 bp, Glycine max
  Gm_smallRNAprecursor_757
taatcaaaaaatcttgggcagacattgcctcagaatctgaatcaaatttacaaacaatgatccaaaaatgcgtcaatgaccaaaacagccaccaatactaaaggaaaactacctttagccaaagctcaaacaccacataccaaacaaactaacaattatatttataaaaataaattgttaactgttttgcagatggaacctgaattttgggacaaaaatcccttcaaggcgatggccaaggctttcccaccaggatttcactacaaaccaaccatcatcctgaagacaagaactttttatgaattgattttggtagattcaaactcagtatctatcaaacatttcaaagatccaaaagatcaaacattaaacacccacccgacaatccaaatactaaaagttcttcaaccaagacactttggttcggacttgaacaaaggaaagagattttcagttccatttgatccggtaggttatacctattgggattacgttgattcttggactaaggtgttttggcaccaaaatacccgcttcaagcattcatggctgatatatttcaagaccaacacaatttacaattttcccaattggtttttgcaatggtgggacttctttggaccaatcccagagatattcccagaaacagtccaacaaggatttgcccaatttaagaaacaatacaattcgcaggaatcacgaattccagcagatcttaaatacttttcaagctttgcactgtcatggatattctcatggcaatatcgttacagcatgactgaaaagacaaaccaatatccatcactacaaagacacgcatttgtaaaatggtggacacaatttgactcatccaaagcggatccagaacaagtaaaactctggttccaatcccatccagaattcctcaaagcagctgatccatgaacttctgtgtttttgaaccaaaagtctcatctggcagcatttttagcaggatcaacatcaaaggaggtcttagctaaaaatctgaaggaagttctgcaaatgttacagcaggaagaagaagcttcatcctcaaagaag

SEQ ID NO: 7925 - DNA, 1146 bp, Glycine max
  Gm_smallRNAprecursor_758
atgatccaaaaatgcgtcaatgaccaaaacagccaccaatactaaaggaaaactacctttagccaaagctcaaacaccacataccaaacaaactaacaattatatttataaaaataaattgttaactgttttgcagatggaacctgaattttgggacaaaaatcccttcaaggcgatggccaaggctttcccaccaggatttcactacaaaccaaccatcatcctgaagacaagaactttttatgaattgattttggtagattcaaactcagtatctatcaaacatttcaaagatccaaaagatcaaacattaaacacccacccgacaatccaaatactaaaagttcttcaaccaagacactttggttcggacttgaacaaaggaaagagattttcagttccatttgatccggtaggttatacctattgggattacgttgattcttggactaaggtgttttggcaccaaaatacccgcttcaagcattcatggctgatatatttcaagaccaacacaatttacaattttcccaattggtttttgcaatggtgggacttctttggaccaatcccagagatattcccagaaacagtccaacaaggatttgcccaatttaagaaacaatacaattcgcaggaatcacgaattccagcagatcttaaatacttttcaagctttgcactgtcatggatattctcatggcaatatcgttacagcatgactgaaaagacaaaccaatatccatcactacaaagacacgcatttgtaaaatggtggacacaatttgactcatccaaagcggatccagaacaagtaaaactctggttccaatcccatccagaattcctcaaagcagctgatccatgaacttctgtgtttttgaaccaaaagtctcatctggcagcatttttagcaggatcaacatcaaaggaggtcttagctaaaaatctgaaggaagttctgcaaatgttacagcaggaagaagaagcttcatcctcaaagaaggaagaaacaagttctgctgaagaagaagaagaagatcccttttaccaaaacgaagatgattgttttggtatctgtttagattaaatttaatttcggtcacaaaaccatctgtttgtaattaatgtataattaatgctgga

SEQ ID NO: 7926 - DNA, 1159 bp, Glycine max
  Gm_smallRNAprecursor_759
gaattttgggacaaaaatcccttcaaggcgatggccaaggctttcccaccaggatttcactacaaaccaaccatcatcctgaagacaagaactttttatgaattgattttggtagattcaaactcagtatctatcaaacatttcaaagatccaaaagatcaaacattaaacacccacccgacaatccaaatactaaaagttcttcaaccaagacactttggttcggacttgaacaaaggaaagagattttcagttccatttgatccggtaggttatacctattgggattacgttgattcttggactaaggtgttttggcaccaaaatacccgcttcaagcattcatggctgatatatttcaagaccaacacaatttacaattttcccaattggtttttgcaatggtgggacttctttggaccaatcccagagatattcccagaaacagtccaacaaggatttgcccaatttaagaaacaatacaattcgcaggaatcacgaattccagcagatcttaaatacttttcaagctttgcactgtcatggatattctcatggcaatatcgttacagcatgactgaaaagacaaaccaatatccatcactacaaagacacgcatttgtaaaatggtggacacaatttgactcatccaaagcggatccagaacaagtaaaactctggttccaatcccatccagaattcctcaaagcagctgatccatgaacttctgtgtttttgaaccaaaagtctcatctggcagcatttttagcaggatcaacatcaaaggaggtcttagctaaaaatctgaaggaagttctgcaaatgttacagcaggaagaagaagcttcatcctcaaagaaggaagaaacaagttctgctgaagaagaagaagaagatcccttttaccaaaacgaagatgattgttttggtatctgtttagattaaatttaatttcggtcacaaaaccatctgtttgtaattaatgtataattaatgctggacaatactacttgtcctgtagccattaaagtcccggtcaaaactacttgtcttgtaacaaacagtcaaatagtcccggtcaaaactactggcaactaccggtcttagatttatggctatataaggagtcctcaagtatgttgtgaggcaccttttcatt

SEQ ID NO: 7927 - DNA, 1131 bp, Glycine max
  Gm_smallRNAprecursor_760
cgatggccaaggctttcccaccaggatttcactacaaaccaaccatcatcctgaagacaagaactttttatgaattgattttggtagattcaaactcagtatctatcaaacatttcaaagatccaaaagatcaaacattaaacacccacccgacaatccaaatactaaaagttcttcaaccaagacactttggttcggacttgaacaaaggaaagagattttcagttccatttgatccggtaggttatacctattgggattacgttgattcttggactaaggtgttttggcaccaaaatacccgcttcaagcattcatggctgatatatttcaagaccaacacaatttacaattttcccaattggtttttgcaatggtgggacttctttggaccaatcccagagatattcccagaaacagtccaacaaggatttgcccaatttaagaaacaatacaattcgcaggaatcacgaattccagcagatcttaaatacttttcaagctttgcactgtcatggatattctcatggcaatatcgttacagcatgactgaaaagacaaaccaatatccatcactacaaagacacgcatttgtaaaatggtggacacaatttgactcatccaaagcggatccagaacaagtaaaactctggttccaatcccatccagaattcctcaaagcagctgatccatgaacttctgtgtttttgaaccaaaagtctcatctggcagcatttttagcaggatcaacatcaaaggaggtcttagctaaaaatctgaaggaagttctgcaaatgttacagcaggaagaagaagcttcatcctcaaagaaggaagaaacaagttctgctgaagaagaagaagaagatcccttttaccaaaacgaagatgattgttttggtatctgtttagattaaatttaatttcggtcacaaaaccatctgtttgtaattaatgtataattaatgctggacaatactacttgtcctgtagccattaaagtcccggtcaaaactacttgtcttgtaacaaacagtcaaatagtcccggtcaaaactactggcaactaccggtcttagatttatggctatataaggagtcctcaagtatgttgtgaggcaccttttcatt

SEQ ID NO: 7928 - DNA, 1169 bp, Glycine max
  Gm_smallRNAprecursor_761
cgatggccaaggctttcccaccaggatttcactacaaaccaaccatcatcctgaagacaagaactttttatgaattgattttggtagattcaaactcagtatctatcaaacatttcaaagatccaaaagatcaaacattaaacacccacccgacaatccaaatactaaaagttcttcaaccaagacactttggttcggacttgaacaaaggaaagagattttcagttccatttgatccggtaggttatacctattgggattacgttgattcttggactaaggtgttttggcaccaaaatacccgcttcaagcattcatggctgatatatttcaagaccaacacaatttacaattttcccaattggtttttgcaatggtgggacttctttggaccaatcccagagatattcccagaaacagtccaacaaggatttgcccaatttaagaaacaatacaattcgcaggaatcacgaattccagcagatcttaaatacttttcaagctttgcactgtcatggatattctcatggcaatatcgttacagcatgactgaaaagacaaaccaatatccatcactacaaagacacgcatttgtaaaatggtggacacaatttgactcatccaaagcggatccagaacaagtaaaactctggttccaatcccatccagaattcctcaaagcagctgatccatgaacttctgtgtttttgaaccaaaagtctcatctggcagcatttttagcaggatcaacatcaaaggaggtcttagctaaaaatctgaaggaagttctgcaaatgttacagcaggaagaagaagcttcatcctcaaagaaggaagaaacaagttctgctgaagaagaagaagaagatcccttttaccaaaacgaagatgattgttttggtatctgtttagattaaatttaatttcggtcacaaaaccatctgtttgtaattaatgtataattaatgctggacaatactacttgtcctgtagccattaaagtcccggtcaaaactacttgtcttgtaacaaacagtcaaatagtcccggtcaaaactactggcaactaccggtcttagatttatggctatataaggagtcctcaagtatgttgtgaggcaccttttcatttagcaatttttcaggtttctgaagagaggtgctctgaa

SEQ ID NO: 7929 - DNA, 1078 bp, Glycine max
  Gm_smallRNAprecursor_762
attcaaactcagtatctatcaaacatttcaaagatccaaaagatcaaacattaaacacccacccgacaatccaaatactaaaagttcttcaaccaagacactttggttcggacttgaacaaaggaaagagattttcagttccatttgatccggtaggttatacctattgggattacgttgattcttggactaaggtgttttggcaccaaaatacccgcttcaagcattcatggctgatatatttcaagaccaacacaatttacaattttcccaattggtttttgcaatggtgggacttctttggaccaatcccagagatattcccagaaacagtccaacaaggatttgcccaatttaagaaacaatacaattcgcaggaatcacgaattccagcagatcttaaatacttttcaagctttgcactgtcatggatattctcatggcaatatcgttacagcatgactgaaaagacaaaccaatatccatcactacaaagacacgcatttgtaaaatggtggacacaatttgactcatccaaagcggatccagaacaagtaaaactctggttccaatcccatccagaattcctcaaagcagctgatccatgaacttctgtgtttttgaaccaaaagtctcatctggcagcatttttagcaggatcaacatcaaaggaggtcttagctaaaaatctgaaggaagttctgcaaatgttacagcaggaagaagaagcttcatcctcaaagaaggaagaaacaagttctgctgaagaagaagaagaagatcccttttaccaaaacgaagatgattgttttggtatctgtttagattaaatttaatttcggtcacaaaaccatctgtttgtaattaatgtataattaatgctggacaatactacttgtcctgtagccattaaagtcccggtcaaaactacttgtcttgtaacaaacagtcaaatagtcccggtcaaaactactggcaactaccggtcttagatttatggctatataaggagtcctcaagtatgttgtgaggcaccttttcatttagcaatttttcaggtttctgaagagaggtgctc

SEQ ID NO: 7930 - DNA, 1079 bp, Glycine max
  Gm_smallRNAprecursor_763
attcaaactcagtatctatcaaacatttcaaagatccaaaagatcaaacattaaacacccacccgacaatccaaatactaaaagttcttcaaccaagacactttggttcggacttgaacaaaggaaagagattttcagttccatttgatccggtaggttatacctattgggattacgttgattcttggactaaggtgttttggcaccaaaatacccgcttcaagcattcatggctgatatatttcaagaccaacacaatttacaattttcccaattggtttttgcaatggtgggacttctttggaccaatcccagagatattcccagaaacagtccaacaaggatttgcccaatttaagaaacaatacaattcgcaggaatcacgaattccagcagatcttaaatacttttcaagctttgcactgtcatggatattctcatggcaatatcgttacagcatgactgaaaagacaaaccaatatccatcactacaaagacacgcatttgtaaaatggtggacacaatttgactcatccaaagcggatccagaacaagtaaaactctggttccaatcccatccagaattcctcaaagcagctgatccatgaacttctgtgtttttgaaccaaaagtctcatctggcagcatttttagcaggatcaacatcaaaggaggtcttagctaaaaatctgaaggaagttctgcaaatgttacagcaggaagaagaagcttcatcctcaaagaaggaagaaacaagttctgctgaagaagaagaagaagatcccttttaccaaaacgaagatgattgttttggtatctgtttagattaaatttaatttcggtcacaaaaccatctgtttgtaattaatgtataattaatgctggacaatactacttgtcctgtagccattaaagtcccggtcaaaactacttgtcttgtaacaaacagtcaaatagtcccggtcaaaactactggcaactaccggtcttagatttatggctatataaggagtcctcaagtatgttgtgaggcaccttttcatttagcaatttttcaggtttctgaagagaggtgctct

SEQ ID NO: 7931 - DNA, 1080 bp, Glycine max
  Gm_smallRNAprecursor_764
tcaagcattcatggctgatatatttcaagaccaacacaatttacaattttcccaattggtttttgcaatggtgggacttctttggaccaatcccagagatattcccagaaacagtccaacaaggatttgcccaatttaagaaacaatacaattcgcaggaatcacgaattccagcagatcttaaatacttttcaagctttgcactgtcatggatattctcatggcaatatcgttacagcatgactgaaaagacaaaccaatatccatcactacaaagacacgcatttgtaaaatggtggacacaatttgactcatccaaagcggatccagaacaagtaaaactctggttccaatcccatccagaattcctcaaagcagctgatccatgaacttctgtgtttttgaaccaaaagtctcatctggcagcatttttagcaggatcaacatcaaaggaggtcttagctaaaaatctgaaggaagttctgcaaatgttacagcaggaagaagaagcttcatcctcaaagaaggaagaaacaagttctgctgaagaagaagaagaagatcccttttaccaaaacgaagatgattgttttggtatctgtttagattaaatttaatttcggtcacaaaaccatctgtttgtaattaatgtataattaatgctggacaatactacttgtcctgtagccattaaagtcccggtcaaaactacttgtcttgtaacaaacagtcaaatagtcccggtcaaaactactggcaactaccggtcttagatttatggctatataaggagtcctcaagtatgttgtgaggcaccttttcatttagcaatttttcaggtttctgaagagaggtgctctgaaacaagatttttgtaagcgcttctttctagattcaataaatttctatttttcatccttttctcttctcccttcaccgatcctatgcggctctgccgccgcttcggtttctttgtttatgaaaacctggggtttgtaagccggtctccggtgtgcccttgatatctgtttttcaagtttcaagtttatattttcatttcatttatcatactgcattctt

SEQ ID NO: 7932 - DNA, 1081 bp, Glycine max
  Gm_smallRNAprecursor_765
tcaagcattcatggctgatatatttcaagaccaacacaatttacaattttcccaattggtttttgcaatggtgggacttctttggaccaatcccagagatattcccagaaacagtccaacaaggatttgcccaatttaagaaacaatacaattcgcaggaatcacgaattccagcagatcttaaatacttttcaagctttgcactgtcatggatattctcatggcaatatcgttacagcatgactgaaaagacaaaccaatatccatcactacaaagacacgcatttgtaaaatggtggacacaatttgactcatccaaagcggatccagaacaagtaaaactctggttccaatcccatccagaattcctcaaagcagctgatccatgaacttctgtgtttttgaaccaaaagtctcatctggcagcatttttagcaggatcaacatcaaaggaggtcttagctaaaaatctgaaggaagttctgcaaatgttacagcaggaagaagaagcttcatcctcaaagaaggaagaaacaagttctgctgaagaagaagaagaagatcccttttaccaaaacgaagatgattgttttggtatctgtttagattaaatttaatttcggtcacaaaaccatctgtttgtaattaatgtataattaatgctggacaatactacttgtcctgtagccattaaagtcccggtcaaaactacttgtcttgtaacaaacagtcaaatagtcccggtcaaaactactggcaactaccggtcttagatttatggctatataaggagtcctcaagtatgttgtgaggcaccttttcatttagcaatttttcaggtttctgaagagaggtgctctgaaacaagatttttgtaagcgcttctttctagattcaataaatttctatttttcatccttttctcttctcccttcaccgatcctatgcggctctgccgccgcttcggtttctttgtttatgaaaacctggggtttgtaagccggtctccggtgtgcccttgatatctgtttttcaagtttcaagtttatattttcatttcatttatcatactgcattctta

SEQ ID NO: 7933 - DNA, 1082 bp, Glycine max
  Gm_smallRNAprecursor_766
tcaagcattcatggctgatatatttcaagaccaacacaatttacaattttcccaattggtttttgcaatggtgggacttctttggaccaatcccagagatattcccagaaacagtccaacaaggatttgcccaatttaagaaacaatacaattcgcaggaatcacgaattccagcagatcttaaatacttttcaagctttgcactgtcatggatattctcatggcaatatcgttacagcatgactgaaaagacaaaccaatatccatcactacaaagacacgcatttgtaaaatggtggacacaatttgactcatccaaagcggatccagaacaagtaaaactctggttccaatcccatccagaattcctcaaagcagctgatccatgaacttctgtgtttttgaaccaaaagtctcatctggcagcatttttagcaggatcaacatcaaaggaggtcttagctaaaaatctgaaggaagttctgcaaatgttacagcaggaagaagaagcttcatcctcaaagaaggaagaaacaagttctgctgaagaagaagaagaagatcccttttaccaaaacgaagatgattgttttggtatctgtttagattaaatttaatttcggtcacaaaaccatctgtttgtaattaatgtataattaatgctggacaatactacttgtcctgtagccattaaagtcccggtcaaaactacttgtcttgtaacaaacagtcaaatagtcccggtcaaaactactggcaactaccggtcttagatttatggctatataaggagtcctcaagtatgttgtgaggcaccttttcatttagcaatttttcaggtttctgaagagaggtgctctgaaacaagatttttgtaagcgcttctttctagattcaataaatttctatttttcatccttttctcttctcccttcaccgatcctatgcggctctgccgccgcttcggtttctttgtttatgaaaacctggggtttgtaagccggtctccggtgtgcccttgatatctgtttttcaagtttcaagtttatattttcatttcatttatcatactgcattcttac

SEQ ID NO: 7934 - DNA, 1057 bp, Glycine max
  Gm_smallRNAprecursor_767
atttcaagaccaacacaatttacaattttcccaattggtttttgcaatggtgggacttctttggaccaatcccagagatattcccagaaacagtccaacaaggatttgcccaatttaagaaacaatacaattcgcaggaatcacgaattccagcagatcttaaatacttttcaagctttgcactgtcatggatattctcatggcaatatcgttacagcatgactgaaaagacaaaccaatatccatcactacaaagacacgcatttgtaaaatggtggacacaatttgactcatccaaagcggatccagaacaagtaaaactctggttccaatcccatccagaattcctcaaagcagctgatccatgaacttctgtgtttttgaaccaaaagtctcatctggcagcatttttagcaggatcaacatcaaaggaggtcttagctaaaaatctgaaggaagttctgcaaatgttacagcaggaagaagaagcttcatcctcaaagaaggaagaaacaagttctgctgaagaagaagaagaagatcccttttaccaaaacgaagatgattgttttggtatctgtttagattaaatttaatttcggtcacaaaaccatctgtttgtaattaatgtataattaatgctggacaatactacttgtcctgtagccattaaagtcccggtcaaaactacttgtcttgtaacaaacagtcaaatagtcccggtcaaaactactggcaactaccggtcttagatttatggctatataaggagtcctcaagtatgttgtgaggcaccttttcatttagcaatttttcaggtttctgaagagaggtgctctgaaacaagatttttgtaagcgcttctttctagattcaataaatttctatttttcatccttttctcttctcccttcaccgatcctatgcggctctgccgccgcttcggtttctttgtttatgaaaacctggggtttgtaagccggtctccggtgtgcccttgatatctgtttttcaagtttcaagtttatattttcatttcatttatcatactgcattc

SEQ ID NO: 7935 - DNA, 1064 bp, Glycine max
  Gm_smallRNAprecursor_768
atttcaagaccaacacaatttacaattttcccaattggtttttgcaatggtgggacttctttggaccaatcccagagatattcccagaaacagtccaacaaggatttgcccaatttaagaaacaatacaattcgcaggaatcacgaattccagcagatcttaaatacttttcaagctttgcactgtcatggatattctcatggcaatatcgttacagcatgactgaaaagacaaaccaatatccatcactacaaagacacgcatttgtaaaatggtggacacaatttgactcatccaaagcggatccagaacaagtaaaactctggttccaatcccatccagaattcctcaaagcagctgatccatgaacttctgtgtttttgaaccaaaagtctcatctggcagcatttttagcaggatcaacatcaaaggaggtcttagctaaaaatctgaaggaagttctgcaaatgttacagcaggaagaagaagcttcatcctcaaagaaggaagaaacaagttctgctgaagaagaagaagaagatcccttttaccaaaacgaagatgattgttttggtatctgtttagattaaatttaatttcggtcacaaaaccatctgtttgtaattaatgtataattaatgctggacaatactacttgtcctgtagccattaaagtcccggtcaaaactacttgtcttgtaacaaacagtcaaatagtcccggtcaaaactactggcaactaccggtcttagatttatggctatataaggagtcctcaagtatgttgtgaggcaccttttcatttagcaatttttcaggtttctgaagagaggtgctctgaaacaagatttttgtaagcgcttctttctagattcaataaatttctatttttcatccttttctcttctcccttcaccgatcctatgcggctctgccgccgcttcggtttctttgtttatgaaaacctggggtttgtaagccggtctccggtgtgcccttgatatctgtttttcaagtttcaagtttatattttcatttcatttatcatactgcattcttacttc

SEQ ID NO: 7936 - DNA, 1059 bp, Glycine max
  Gm_smallRNAprecursor_769
tttcaagaccaacacaatttacaattttcccaattggtttttgcaatggtgggacttctttggaccaatcccagagatattcccagaaacagtccaacaaggatttgcccaatttaagaaacaatacaattcgcaggaatcacgaattccagcagatcttaaatacttttcaagctttgcactgtcatggatattctcatggcaatatcgttacagcatgactgaaaagacaaaccaatatccatcactacaaagacacgcatttgtaaaatggtggacacaatttgactcatccaaagcggatccagaacaagtaaaactctggttccaatcccatccagaattcctcaaagcagctgatccatgaacttctgtgtttttgaaccaaaagtctcatctggcagcatttttagcaggatcaacatcaaaggaggtcttagctaaaaatctgaaggaagttctgcaaatgttacagcaggaagaagaagcttcatcctcaaagaaggaagaaacaagttctgctgaagaagaagaagaagatcccttttaccaaaacgaagatgattgttttggtatctgtttagattaaatttaatttcggtcacaaaaccatctgtttgtaattaatgtataattaatgctggacaatactacttgtcctgtagccattaaagtcccggtcaaaactacttgtcttgtaacaaacagtcaaatagtcccggtcaaaactactggcaactaccggtcttagatttatggctatataaggagtcctcaagtatgttgtgaggcaccttttcatttagcaatttttcaggtttctgaagagaggtgctctgaaacaagatttttgtaagcgcttctttctagattcaataaatttctatttttcatccttttctcttctcccttcaccgatcctatgcggctctgccgccgcttcggtttctttgtttatgaaaacctggggtttgtaagccggtctccggtgtgcccttgatatctgtttttcaagtttcaagtttatattttcatttcatttatcatactgcattctta

SEQ ID NO: 7937 - DNA, 1060 bp, Glycine max
  Gm_smallRNAprecursor_770
tttcaagaccaacacaatttacaattttcccaattggtttttgcaatggtgggacttctttggaccaatcccagagatattcccagaaacagtccaacaaggatttgcccaatttaagaaacaatacaattcgcaggaatcacgaattccagcagatcttaaatacttttcaagctttgcactgtcatggatattctcatggcaatatcgttacagcatgactgaaaagacaaaccaatatccatcactacaaagacacgcatttgtaaaatggtggacacaatttgactcatccaaagcggatccagaacaagtaaaactctggttccaatcccatccagaattcctcaaagcagctgatccatgaacttctgtgtttttgaaccaaaagtctcatctggcagcatttttagcaggatcaacatcaaaggaggtcttagctaaaaatctgaaggaagttctgcaaatgttacagcaggaagaagaagcttcatcctcaaagaaggaagaaacaagttctgctgaagaagaagaagaagatcccttttaccaaaacgaagatgattgttttggtatctgtttagattaaatttaatttcggtcacaaaaccatctgtttgtaattaatgtataattaatgctggacaatactacttgtcctgtagccattaaagtcccggtcaaaactacttgtcttgtaacaaacagtcaaatagtcccggtcaaaactactggcaactaccggtcttagatttatggctatataaggagtcctcaagtatgttgtgaggcaccttttcatttagcaatttttcaggtttctgaagagaggtgctctgaaacaagatttttgtaagcgcttctttctagattcaataaatttctatttttcatccttttctcttctcccttcaccgatcctatgcggctctgccgccgcttcggtttctttgtttatgaaaacctggggtttgtaagccggtctccggtgtgcccttgatatctgtttttcaagtttcaagtttatattttcatttcatttatcatactgcattcttac

SEQ ID NO: 7938 - DNA, 1060 bp, Glycine max; identical to SEQ ID NO: 7937
  Gm_smallRNAprecursor_771

SEQ ID NO: 7939 - DNA, 1063 bp, Glycine max
  Gm_smallRNAprecursor_772
tttcaagaccaacacaatttacaattttcccaattggtttttgcaatggtgggacttctttggaccaatcccagagatattcccagaaacagtccaacaaggatttgcccaatttaagaaacaatacaattcgcaggaatcacgaattccagcagatcttaaatacttttcaagctttgcactgtcatggatattctcatggcaatatcgttacagcatgactgaaaagacaaaccaatatccatcactacaaagacacgcatttgtaaaatggtggacacaatttgactcatccaaagcggatccagaacaagtaaaactctggttccaatcccatccagaattcctcaaagcagctgatccatgaacttctgtgtttttgaaccaaaagtctcatctggcagcatttttagcaggatcaacatcaaaggaggtcttagctaaaaatctgaaggaagttctgcaaatgttacagcaggaagaagaagcttcatcctcaaagaaggaagaaacaagttctgctgaagaagaagaagaagatcccttttaccaaaacgaagatgattgttttggtatctgtttagattaaatttaatttcggtcacaaaaccatctgtttgtaattaatgtataattaatgctggacaatactacttgtcctgtagccattaaagtcccggtcaaaactacttgtcttgtaacaaacagtcaaatagtcccggtcaaaactactggcaactaccggtcttagatttatggctatataaggagtcctcaagtatgttgtgaggcaccttttcatttagcaatttttcaggtttctgaagagaggtgctctgaaacaagatttttgtaagcgcttctttctagattcaataaatttctatttttcatccttttctcttctcccttcaccgatcctatgcggctctgccgccgcttcggtttctttgtttatgaaaacctggggtttgtaagccggtctccggtgtgcccttgatatctgtttttcaagtttcaagtttatattttcatttcatttatcatactgcattcttacttc

SEQ ID NO: 7940 - DNA, 1056 bp, Glycine max
  Gm_smallRNAprecursor_773
caagaccaacacaatttacaattttcccaattggtttttgcaatggtgggacttctttggaccaatcccagagatattcccagaaacagtccaacaaggatttgcccaatttaagaaacaatacaattcgcaggaatcacgaattccagcagatcttaaatacttttcaagctttgcactgtcatggatattctcatggcaatatcgttacagcatgactgaaaagacaaaccaatatccatcactacaaagacacgcatttgtaaaatggtggacacaatttgactcatccaaagcggatccagaacaagtaaaactctggttccaatcccatccagaattcctcaaagcagctgatccatgaacttctgtgtttttgaaccaaaagtctcatctggcagcatttttagcaggatcaacatcaaaggaggtcttagctaaaaatctgaaggaagttctgcaaatgttacagcaggaagaagaagcttcatcctcaaagaaggaagaaacaagttctgctgaagaagaagaagaagatcccttttaccaaaacgaagatgattgttttggtatctgtttagattaaatttaatttcggtcacaaaaccatctgtttgtaattaatgtataattaatgctggacaatactacttgtcctgtagccattaaagtcccggtcaaaactacttgtcttgtaacaaacagtcaaatagtcccggtcaaaactactggcaactaccggtcttagatttatggctatataaggagtcctcaagtatgttgtgaggcaccttttcatttagcaatttttcaggtttctgaagagaggtgctctgaaacaagatttttgtaagcgcttctttctagattcaataaatttctatttttcatccttttctcttctcccttcaccgatcctatgcggctctgccgccgcttcggtttctttgtttatgaaaacctggggtttgtaagccggtctccggtgtgcccttgatatctgtttttcaagtttcaagtttatattttcatttcatttatcatactgcattctta

SEQ ID NO: 7941 - DNA, 1056 bp, Glycine max; identical to SEQ ID NO: 7940
  Gm_smallRNAprecursor_774

SEQ ID NO: 7942 - DNA, 1057 bp, Glycine max
  Gm_smallRNAprecursor_775
caagaccaacacaatttacaattttcccaattggtttttgcaatggtgggacttctttggaccaatcccagagatattcccagaaacagtccaacaaggatttgcccaatttaagaaacaatacaattcgcaggaatcacgaattccagcagatcttaaatacttttcaagctttgcactgtcatggatattctcatggcaatatcgttacagcatgactgaaaagacaaaccaatatccatcactacaaagacacgcatttgtaaaatggtggacacaatttgactcatccaaagcggatccagaacaagtaaaactctggttccaatcccatccagaattcctcaaagcagctgatccatgaacttctgtgtttttgaaccaaaagtctcatctggcagcatttttagcaggatcaacatcaaaggaggtcttagctaaaaatctgaaggaagttctgcaaatgttacagcaggaagaagaagcttcatcctcaaagaaggaagaaacaagttctgctgaagaagaagaagaagatcccttttaccaaaacgaagatgattgttttggtatctgtttagattaaatttaatttcggtcacaaaaccatctgtttgtaattaatgtataattaatgctggacaatactacttgtcctgtagccattaaagtcccggtcaaaactacttgtcttgtaacaaacagtcaaatagtcccggtcaaaactactggcaactaccggtcttagatttatggctatataaggagtcctcaagtatgttgtgaggcaccttttcatttagcaatttttcaggtttctgaagagaggtgctctgaaacaagatttttgtaagcgcttctttctagattcaataaatttctatttttcatccttttctcttctcccttcaccgatcctatgcggctctgccgccgcttcggtttctttgtttatgaaaacctggggtttgtaagccggtctccggtgtgcccttgatatctgtttttcaagtttcaagtttatattttcatttcatttatcatactgcattcttac

SEQ ID NO: 7943 - DNA, 1057 bp, Glycine max; identical to SEQ ID NO: 7942
  Gm_smallRNAprecursor_776

SEQ ID NO: 7944 - DNA, 1057 bp, Glycine max; identical to SEQ ID NO: 7942
  Gm_smallRNAprecursor_777

SEQ ID NO: 7945 - DNA, 1057 bp, Glycine max; identical to SEQ ID NO: 7942
  Gm_smallRNAprecursor_778

SEQ ID NO: 7946 - DNA, 1155 bp, Glycine max
  Gm_smallRNAprecursor_779
tgggacttctttggaccaatcccagagatattcccagaaacagtccaacaaggatttgcccaatttaagaaacaatacaattcgcaggaatcacgaattccagcagatcttaaatacttttcaagctttgcactgtcatggatattctcatggcaatatcgttacagcatgactgaaaagacaaaccaatatccatcactacaaagacacgcatttgtaaaatggtggacacaatttgactcatccaaagcggatccagaacaagtaaaactctggttccaatcccatccagaattcctcaaagcagctgatccatgaacttctgtgtttttgaaccaaaagtctcatctggcagcatttttagcaggatcaacatcaaaggaggtcttagctaaaaatctgaaggaagttctgcaaatgttacagcaggaagaagaagcttcatcctcaaagaaggaagaaacaagttctgctgaagaagaagaagaagatcccttttaccaaaacgaagatgattgttttggtatctgtttagattaaatttaatttcggtcacaaaaccatctgtttgtaattaatgtataattaatgctggacaatactacttgtcctgtagccattaaagtcccggtcaaaactacttgtcttgtaacaaacagtcaaatagtcccggtcaaaactactggcaactaccggtcttagatttatggctatataaggagtcctcaagtatgttgtgaggcaccttttcatttagcaatttttcaggtttctgaagagaggtgctctgaaacaagatttttgtaagcgcttctttctagattcaataaatttctatttttcatccttttctcttctcccttcaccgatcctatgcggctctgccgccgcttcggtttctttgtttatgaaaacctggggtttgtaagccggtctccggtgtgcccttgatatctgtttttcaagtttcaagtttatattttcatttcatttatcatactgcattcttacttcctatctgtccgtttgatcctattccgctgacctctggtgtatatatatatatatatatatatatatatatatatatatatatatatatatatatatatatatatatatatatatatattccttctctctagaaaatacaag

SEQ ID NO: 7947 - DNA, 1142 bp, Glycine max
  Gm_smallRNAprecursor_780
gaccaatcccagagatattcccagaaacagtccaacaaggatttgcccaatttaagaaacaatacaattcgcaggaatcacgaattccagcagatcttaaatacttttcaagctttgcactgtcatggatattctcatggcaatatcgttacagcatgactgaaaagacaaaccaatatccatcactacaaagacacgcatttgtaaaatggtggacacaatttgactcatccaaagcggatccagaacaagtaaaactctggttccaatcccatccagaattcctcaaagcagctgatccatgaacttctgtgtttttgaaccaaaagtctcatctggcagcatttttagcaggatcaacatcaaaggaggtcttagctaaaaatctgaaggaagttctgcaaatgttacagcaggaagaagaagcttcatcctcaaagaaggaagaaacaagttctgctgaagaagaagaagaagatcccttttaccaaaacgaagatgattgttttggtatctgtttagattaaatttaatttcggtcacaaaaccatctgtttgtaattaatgtataattaatgctggacaatactacttgtcctgtagccattaaagtcccggtcaaaactacttgtcttgtaacaaacagtcaaatagtcccggtcaaaactactggcaactaccggtcttagatttatggctatataaggagtcctcaagtatgttgtgaggcaccttttcatttagcaatttttcaggtttctgaagagaggtgctctgaaacaagatttttgtaagcgcttctttctagattcaataaatttctatttttcatccttttctcttctcccttcaccgatcctatgcggctctgccgccgcttcggtttctttgtttatgaaaacctggggtttgtaagccggtctccggtgtgcccttgatatctgtttttcaagtttcaagtttatattttcatttcatttatcatactgcattcttacttcctatctgtccgtttgatcctattccgctgacctctggtgtatatatatatatatatatatatatatatatatatatatatatatatatatatatatatatatatatatatatatatattccttctctctagaaaatacaag

SEQ ID NO: 7948 - DNA, 1051 bp, Glycine max
  Gm_smallRNAprecursor_781
ttgactcgtgtgctttatttttttccaaggagtgttagtatatatatatatatatatatatattattctaaacaaataagatttactcaatagactaaattctgcaaggatattttctaagtttgatatgaaatcaggattctggcaaatccaaatacaagaatctaataggtataaaatcgtcttcatagtacatttcgggcaatatgaatggaatgttatgtcattcggtctgaagaatgtcccttcagaattccaaaaaatcatgaatgatatttttaatccttattcaaaattcgtcattgtttacatagatgattatttacataaaccagcactttaagcatctacagacttttatccacattatcaagcagaatggtcttgcagtctccaaatcaaaaatcaacctttttcaaacaaaaatctgattccttggtcacaacatacactaaggtacaatcataccaatagataggtcaatagaattcgccaacaaattccccaaccaaatcttagacaaaattcagttacaaagatttcttagttgtctaaattatgtaggagaatttgtaccttatttaaacaacattgtcaaaccattacatgataggttgaagaaaaatcctcctccttggtctgatattcatactcaaattgtcaaagacattaaacttaaagttcagtccattaaatgtttgtatctcccggttccacaagcattcaaaatcattaaaacatatgcatccgacattggttacggtggtattctcaaacaaagagtccatacccaagaacatgtcattgcatatacatcaaaacattggattctatacaattaaaatattcaactgttaaaaaataagtcttagcaattgttttgtgcatctccaaattccaatccgatttattaaatcaaaagtttttcatctggattgattgtaaatcagctaaggatattttacaaaaagatgttaaaaatcttgtctcaaagcaaatttttgcaagatgacaagcaattttaagtgtttttgatttcgagataaaatat

SEQ ID NO: 7949 - DNA, 1105 bp, Glycine max
  Gm_smallRNAprecursor_782
actgttttgtttggataacagttaaaatatattggaccttgtcctaggctggtttcgactgttccaattagggagtcttcaaattgattatgcctaatgtctcttagacacattaaaactgctgcatctgtgcccatatcaattaagggcttgatggctacttgtacacaaccgatgtgtagatatttatacttacggctatgttcataaattgaattttttgaaagtaaatgaaattcttcccctacatcttgtcctagaggaatattgttttctactgttttgattatgtaatcaaagttgtgtttgtcttttattgtttcaggaacgtatagttgatcctgagggatttctggaatgttccagtcatccatgatttgattgatatctcgaatcggacttcctcatcgaagagattgtgttttggggtgacctcttaggtctggttgtcttgatcatttaataaattgaagttttttgaagaagatgatgaggaggagtttgagcgaaaagagatacgggaaaaagatcgtaatagtctagacatggttataatattctctaatatctttgccctcatttggttccatagaaatatctccgtaagtaaatatgtcacaaaatttttctggatctgaattatttttaagaaaaactcttttttttttttgaaaaacagtttgaacggcaatcctatagccaccagtgtattatgtcttgatattttggttaaacagtacaccttagccttactgccctttatccaacacgagtcttactgctacaatactgttcaactaaaatattagactgctgtacttccaggaagtactgttcaaacactcactgtacaaatcaaagtaaaatattacgtgtactatacaagactttagttccagatccataaaatttgttaacatatgtccttacggacagtattcctacttccccatcaggctctgataccagagatcagcggaataagatcaaacggacagataggaagtaagaaatgcagtatgataaatgaaagcgaaatataaactgtaaaacagatatcaagggcacaccgaaacggcttacaaacccaggtttttgaaaacaa

SEQ ID NO: 7950 - DNA, 1199 bp, Glycine max
  Gm_smallRNAprecursor_783
tagacacattaaaactgctgcatctgtgcccatatcaattaagggcttgatggctacttgtacacaaccgatgtgtagatatttatacttacggctatgttcataaattgaattttttgaaagtaaatgaaattcttcccctacatcttgtcctagaggaatattgttttctactgttttgattatgtaatcaaagttgtgtttgtcttttattgtttcaggaacgtatagttgatcctgagggatttctggaatgttccagtcatccatgatttgattgatatctcgaatcggacttcctcatcgaagagattgtgttttggggtgacctcttaggtctggttgtcttgatcatttaataaattgaagttttttgaagaagatgatgaggaggagtttgagcgaaaagagatacgggaaaaagatcgtaatagtctagacatggttataatattctctaatatctttgccctcatttggttccatagaaatatctccgtaagtaaatatgtcacaaaatttttctggatctgaattatttttaagaaaaactcttttttttttttgaaaaacagtttgaacggcaatcctatagccaccagtgtattatgtcttgatattttggttaaacagtacaccttagccttactgccctttatccaacacgagtcttactgctacaatactgttcaactaaaatattagactgctgtacttccaggaagtactgttcaaacactcactgtacaaatcaaagtaaaatattacgtgtactatacaagactttagttccagatccataaaatttgttaacatatgtccttacggacagtattcctacttccccatcaggctctgataccagagatcagcggaataagatcaaacggacagataggaagtaagaaatgcagtatgataaatgaaagcgaaatataaactgtaaaacagatatcaagggcacaccgaaacggcttacaaacccaggtttttgaaaacaaagaaaccgaagcggcggcagagccgcataggatcggtaaggggagaagggagatatgaaaaacagaacttgaaatttattgaaaccgaaagaaaagcttacaaagagtttttccctaggcagagcttctctctctaaaacctgattctgagactatctgaaagggtgcctcacaaaggggacgaggactcctttaaat

SEQ ID NO: 7951 - DNA, 1056 bp, Glycine max
  Gm_smallRNAprecursor_784
aatactgttcaactaaaatattagactgctgtacttccaggaagtactgttcaaacactcactgtacaaatcaaagtaaaatattacgtgtactatacaagactttagttccagatccataaaatttgttaacatatgtccttacggacagtattcctacttccccatcaggctctgataccagagatcagcggaataagatcaaacggacagataggaagtaagaaatgcagtatgataaatgaaagcgaaatataaactgtaaaacagatatcaagggcacaccgaaacggcttacaaacccaggtttttgaaaacaaagaaaccgaagcggcggcagagccgcataggatcggtaaggggagaagggagatatgaaaaacagaacttgaaatttattgaaaccgaaagaaaagcttacaaagagtttttccctaggcagagcttctctctctaaaacctgattctgagactatctgaaagggtgcctcacaaaggggacgaggactcctttaaatagacccaatttttactgtttttacagtatcggtaatgtttaccggaactgttacaaaacttttacaaattacattatttaaaatagtcacaataattcatgattactacaactaattaatcgtcgtccaatgatataccaaaacagtcatcttcattctggtagaatggatcgtcttcttggtcatcattagtctctgatgattcagcttccttcttggaaggttcttcttccacttcctgttgaagtagttggagaacttctttgagattctgagcaagactctctttagattttgagcttgctaagaatgctgctagttgcgacttttgatttagaaacaaagatgtctccggatcagcaggtttaaggaactcaggattgctctggaaccagttcttgacttgatctggagcagtctttgaagtatcgaattgtgaccaccattttacaaaggcgtgtctctgtaacggtggatattgcttgttgttttcagtttttccgtatctgtattgccatgaaaagatccatgacaaggc

SEQ ID NO: 7952 - DNA, 1202 bp, Glycine max
  Gm_smallRNAprecursor_785
cactcactgtacaaatcaaagtaaaatattacgtgtactatacaagactttagttccagatccataaaatttgttaacatatgtccttacggacagtattcctacttccccatcaggctctgataccagagatcagcggaataagatcaaacggacagataggaagtaagaaatgcagtatgataaatgaaagcgaaatataaactgtaaaacagatatcaagggcacaccgaaacggcttacaaacccaggtttttgaaaacaaagaaaccgaagcggcggcagagccgcataggatcggtaaggggagaagggagatatgaaaaacagaacttgaaatttattgaaaccgaaagaaaagcttacaaagagtttttccctaggcagagcttctctctctaaaacctgattctgagactatctgaaagggtgcctcacaaaggggacgaggactcctttaaatagacccaatttttactgtttttacagtatcggtaatgtttaccggaactgttacaaaacttttacaaattacattatttaaaatagtcacaataattcatgattactacaactaattaatcgtcgtccaatgatataccaaaacagtcatcttcattctggtagaatggatcgtcttcttggtcatcattagtctctgatgattcagcttccttcttggaaggttcttcttccacttcctgttgaagtagttggagaacttctttgagattctgagcaagactctctttagattttgagcttgctaagaatgctgctagttgcgacttttgatttagaaacaaagatgtctccggatcagcaggtttaaggaactcaggattgctctggaaccagttcttgacttgatctggagcagtctttgaagtatcgaattgtgaccaccattttacaaaggcgtgtctctgtaacggtggatattgcttgttgttttcagtttttccgtatctgtattgccatgaaaagatccatgacaaggcaaaactggaaaagtactttaaatctaccggaatacgtgattccttgctattatagagcctgttgaattgttggaatccctgttggacttcttctggaaatatttgtggaattggtccgaagtagttccaccattggaggaaccagtttggaaaattatacgtagtattattttttaagtaaatcagccatgaatgcttgaa

SEQ ID NO: 7953 - DNA, 1138 bp, Glycine max
  Gm_smallRNAprecursor_786
acagatatcaagggcacaccgaaacggcttacaaacccaggtttttgaaaacaaagaaaccgaagcggcggcagagccgcataggatcggtaaggggagaagggagatatgaaaaacagaacttgaaatttattgaaaccgaaagaaaagcttacaaagagtttttccctaggcagagcttctctctctaaaacctgattctgagactatctgaaagggtgcctcacaaaggggacgaggactcctttaaatagacccaatttttactgtttttacagtatcggtaatgtttaccggaactgttacaaaacttttacaaattacattatttaaaatagtcacaataattcatgattactacaactaattaatcgtcgtccaatgatataccaaaacagtcatcttcattctggtagaatggatcgtcttcttggtcatcattagtctctgatgattcagcttccttcttggaaggttcttcttccacttcctgttgaagtagttggagaacttctttgagattctgagcaagactctctttagattttgagcttgctaagaatgctgctagttgcgacttttgatttagaaacaaagatgtctccggatcagcaggtttaaggaactcaggattgctctggaaccagttcttgacttgatctggagcagtctttgaagtatcgaattgtgaccaccattttacaaaggcgtgtctctgtaacggtggatattgcttgttgttttcagtttttccgtatctgtattgccatgaaaagatccatgacaaggcaaaactggaaaagtactttaaatctaccggaatacgtgattccttgctattatagagcctgttgaattgttggaatccctgttggacttcttctggaaatatttgtggaattggtccgaagtagttccaccattggaggaaccagtttggaaaattatacgtagtattattttttaagtaaatcagccatgaatgcttgaatttactattttgatgctagaacacattagtccaggcgtcaatgtaatcccaataattatatcctgcagggtcaaatggtgcagaaaattttttgggttgatttaagtttgagccataatgtcatggctgcataaccttcaagatttg

SEQ ID NO: 7954 - DNA, 1072 bp, Glycine max
  Gm_smallRNAprecursor_787
agggcacaccgaaacggcttacaaacccaggtttttgaaaacaaagaaaccgaagcggcggcagagccgcataggatcggtaaggggagaagggagatatgaaaaacagaacttgaaatttattgaaaccgaaagaaaagcttacaaagagtttttccctaggcagagcttctctctctaaaacctgattctgagactatctgaaagggtgcctcacaaaggggacgaggactcctttaaatagacccaatttttactgtttttacagtatcggtaatgtttaccggaactgttacaaaacttttacaaattacattatttaaaatagtcacaataattcatgattactacaactaattaatcgtcgtccaatgatataccaaaacagtcatcttcattctggtagaatggatcgtcttcttggtcatcattagtctctgatgattcagcttccttcttggaaggttcttcttccacttcctgttgaagtagttggagaacttctttgagattctgagcaagactctctttagattttgagcttgctaagaatgctgctagttgcgacttttgatttagaaacaaagatgtctccggatcagcaggtttaaggaactcaggattgctctggaaccagttcttgacttgatctggagcagtctttgaagtatcgaattgtgaccaccattttacaaaggcgtgtctctgtaacggtggatattgcttgttgttttcagtttttccgtatctgtattgccatgaaaagatccatgacaaggcaaaactggaaaagtactttaaatctaccggaatacgtgattccttgctattatagagcctgttgaattgttggaatccctgttggacttcttctggaaatatttgtggaattggtccgaagtagttccaccattggaggaaccagtttggaaaattatacgtagtattattttttaagtaaatcagccatgaatgcttgaatttactattttgatgctagaacacattagtccaggcgtcaatgtaatcccaataattatatcctgcagggtcaaatggtgcagaaaatttt

SEQ ID NO: 7955 - DNA, 1069 bp, Glycine max
  Gm_smallRNAprecursor_788
gcacaccgaaacggcttacaaacccaggtttttgaaaacaaagaaaccgaagcggcggcagagccgcataggatcggtaaggggagaagggagatatgaaaaacagaacttgaaatttattgaaaccgaaagaaaagcttacaaagagtttttccctaggcagagcttctctctctaaaacctgattctgagactatctgaaagggtgcctcacaaaggggacgaggactcctttaaatagacccaatttttactgtttttacagtatcggtaatgtttaccggaactgttacaaaacttttacaaattacattatttaaaatagtcacaataattcatgattactacaactaattaatcgtcgtccaatgatataccaaaacagtcatcttcattctggtagaatggatcgtcttcttggtcatcattagtctctgatgattcagcttccttcttggaaggttcttcttccacttcctgttgaagtagttggagaacttctttgagattctgagcaagactctctttagattttgagcttgctaagaatgctgctagttgcgacttttgatttagaaacaaagatgtctccggatcagcaggtttaaggaactcaggattgctctggaaccagttcttgacttgatctggagcagtctttgaagtatcgaattgtgaccaccattttacaaaggcgtgtctctgtaacggtggatattgcttgttgttttcagtttttccgtatctgtattgccatgaaaagatccatgacaaggcaaaactggaaaagtactttaaatctaccggaatacgtgattccttgctattatagagcctgttgaattgttggaatccctgttggacttcttctggaaatatttgtggaattggtccgaagtagttccaccattggaggaaccagtttggaaaattatacgtagtattattttttaagtaaatcagccatgaatgcttgaatttactattttgatgctagaacacattagtccaggcgtcaatgtaatcccaataattatatcctgcagggtcaaatggtgcagaaaatttt

SEQ ID NO: 7956 - DNA, 1047 bp, Glycine max
  Gm_smallRNAprecursor_789
taggatcggtaaggggagaagggagatatgaaaaacagaacttgaaatttattgaaaccgaaagaaaagcttacaaagagtttttccctaggcagagcttctctctctaaaacctgattctgagactatctgaaagggtgcctcacaaaggggacgaggactcctttaaatagacccaatttttactgtttttacagtatcggtaatgtttaccggaactgttacaaaacttttacaaattacattatttaaaatagtcacaataattcatgattactacaactaattaatcgtcgtccaatgatataccaaaacagtcatcttcattctggtagaatggatcgtcttcttggtcatcattagtctctgatgattcagcttccttcttggaaggttcttcttccacttcctgttgaagtagttggagaacttctttgagattctgagcaagactctctttagattttgagcttgctaagaatgctgctagttgcgacttttgatttagaaacaaagatgtctccggatcagcaggtttaaggaactcaggattgctctggaaccagttcttgacttgatctggagcagtctttgaagtatcgaattgtgaccaccattttacaaaggcgtgtctctgtaacggtggatattgcttgttgttttcagtttttccgtatctgtattgccatgaaaagatccatgacaaggcaaaactggaaaagtactttaaatctaccggaatacgtgattccttgctattatagagcctgttgaattgttggaatccctgttggacttcttctggaaatatttgtggaattggtccgaagtagttccaccattggaggaaccagtttggaaaattatacgtagtattattttttaagtaaatcagccatgaatgcttgaatttactattttgatgctagaacacattagtccaggcgtcaatgtaatcccaataattatatcctgcagggtcaaatggtgcagaaaattttttgggttgatttaagtttgagccataatgtcatggctgcataacct

SEQ ID NO: 7957 - DNA, 1120 bp, Glycine max
  Gm_smallRNAprecursor_790
atttattgaaaccgaaagaaaagcttacaaagagtttttccctaggcagagcttctctctctaaaacctgattctgagactatctgaaagggtgcctcacaaaggggacgaggactcctttaaatagacccaatttttactgtttttacagtatcggtaatgtttaccggaactgttacaaaacttttacaaattacattatttaaaatagtcacaataattcatgattactacaactaattaatcgtcgtccaatgatataccaaaacagtcatcttcattctggtagaatggatcgtcttcttggtcatcattagtctctgatgattcagcttccttcttggaaggttcttcttccacttcctgttgaagtagttggagaacttctttgagattctgagcaagactctctttagattttgagcttgctaagaatgctgctagttgcgacttttgatttagaaacaaagatgtctccggatcagcaggtttaaggaactcaggattgctctggaaccagttcttgacttgatctggagcagtctttgaagtatcgaattgtgaccaccattttacaaaggcgtgtctctgtaacggtggatattgcttgttgttttcagtttttccgtatctgtattgccatgaaaagatccatgacaaggcaaaactggaaaagtactttaaatctaccggaatacgtgattccttgctattatagagcctgttgaattgttggaatccctgttggacttcttctggaaatatttgtggaattggtccgaagtagttccaccattggaggaaccagtttggaaaattatacgtagtattattttttaagtaaatcagccatgaatgcttgaatttactattttgatgctagaacacattagtccaggcgtcaatgtaatcccaataattatatcctgcagggtcaaatggtgcagaaaattttttgggttgatttaagtttgagccataatgtcatggctgcataaccttcaagatttggattgtggaatgggtatttagatttggatctttggggtctttgaagtgtttaatagatactgagtttgtatctattagaatgaattcgtagaatttgcgggttttgttt

SEQ ID NO: 7958 - DNA, 1198 bp, Glycine max
  Gm_smallRNAprecursor_791
tttattgaaaccgaaagaaaagcttacaaagagtttttccctaggcagagcttctctctctaaaacctgattctgagactatctgaaagggtgcctcacaaaggggacgaggactcctttaaatagacccaatttttactgtttttacagtatcggtaatgtttaccggaactgttacaaaacttttacaaattacattatttaaaatagtcacaataattcatgattactacaactaattaatcgtcgtccaatgatataccaaaacagtcatcttcattctggtagaatggatcgtcttcttggtcatcattagtctctgatgattcagcttccttcttggaaggttcttcttccacttcctgttgaagtagttggagaacttctttgagattctgagcaagactctctttagattttgagcttgctaagaatgctgctagttgcgacttttgatttagaaacaaagatgtctccggatcagcaggtttaaggaactcaggattgctctggaaccagttcttgacttgatctggagcagtctttgaagtatcgaattgtgaccaccattttacaaaggcgtgtctctgtaacggtggatattgcttgttgttttcagtttttccgtatctgtattgccatgaaaagatccatgacaaggcaaaactggaaaagtactttaaatctaccggaatacgtgattccttgctattatagagcctgttgaattgttggaatccctgttggacttcttctggaaatatttgtggaattggtccgaagtagttccaccattggaggaaccagtttggaaaattatacgtagtattattttttaagtaaatcagccatgaatgcttgaatttactattttgatgctagaacacattagtccaggcgtcaatgtaatcccaataattatatcctgcagggtcaaatggtgcagaaaattttttgggttgatttaagtttgagccataatgtcatggctgcataaccttcaagatttggattgtggaatgggtatttagatttggatctttggggtctttgaagtgtttaatagatactgagtttgtatctattagaatgaattcgtagaatttgcgggttttgtttgtggctattggcctgtaatggaatcccggggggaatactttggcggttgctttgaaaggattcttgtcccagtattctg

SEQ ID NO: 7959 - DNA, 1086 bp, Glycine max
  Gm_smallRNAprecursor_792
ctgattctgagactatctgaaagggtgcctcacaaaggggacgaggactcctttaaatagacccaatttttactgtttttacagtatcggtaatgtttaccggaactgttacaaaacttttacaaattacattatttaaaatagtcacaataattcatgattactacaactaattaatcgtcgtccaatgatataccaaaacagtcatcttcattctggtagaatggatcgtcttcttggtcatcattagtctctgatgattcagcttccttcttggaaggttcttcttccacttcctgttgaagtagttggagaacttctttgagattctgagcaagactctctttagattttgagcttgctaagaatgctgctagttgcgacttttgatttagaaacaaagatgtctccggatcagcaggtttaaggaactcaggattgctctggaaccagttcttgacttgatctggagcagtctttgaagtatcgaattgtgaccaccattttacaaaggcgtgtctctgtaacggtggatattgcttgttgttttcagtttttccgtatctgtattgccatgaaaagatccatgacaaggcaaaactggaaaagtactttaaatctaccggaatacgtgattccttgctattatagagcctgttgaattgttggaatccctgttggacttcttctggaaatatttgtggaattggtccgaagtagttccaccattggaggaaccagtttggaaaattatacgtagtattattttttaagtaaatcagccatgaatgcttgaatttactattttgatgctagaacacattagtccaggcgtcaatgtaatcccaataattatatcctgcagggtcaaatggtgcagaaaattttttgggttgatttaagtttgagccataatgtcatggctgcataaccttcaagatttggattgtggaatgggtatttagatttggatctttggggtctttgaagtgtttaatagatactgagtttgtatctattagaatgaattcgtagaatttgcgggttttgtttgtggctattggcctgtaatggaatcccgggggg

SEQ ID NO: 7960 - DNA, 1086 bp, Glycine max; identical to SEQ ID NO: 7959
  Gm_smallRNAprecursor_793

SEQ ID NO: 7961 - DNA, 1085 bp, Glycine max
  Gm_smallRNAprecursor_794
tgattctgagactatctgaaagggtgcctcacaaaggggacgaggactcctttaaatagacccaatttttactgtttttacagtatcggtaatgtttaccggaactgttacaaaacttttacaaattacattatttaaaatagtcacaataattcatgattactacaactaattaatcgtcgtccaatgatataccaaaacagtcatcttcattctggtagaatggatcgtcttcttggtcatcattagtctctgatgattcagcttccttcttggaaggttcttcttccacttcctgttgaagtagttggagaacttctttgagattctgagcaagactctctttagattttgagcttgctaagaatgctgctagttgcgacttttgatttagaaacaaagatgtctccggatcagcaggtttaaggaactcaggattgctctggaaccagttcttgacttgatctggagcagtctttgaagtatcgaattgtgaccaccattttacaaaggcgtgtctctgtaacggtggatattgcttgttgttttcagtttttccgtatctgtattgccatgaaaagatccatgacaaggcaaaactggaaaagtactttaaatctaccggaatacgtgattccttgctattatagagcctgttgaattgttggaatccctgttggacttcttctggaaatatttgtggaattggtccgaagtagttccaccattggaggaaccagtttggaaaattatacgtagtattattttttaagtaaatcagccatgaatgcttgaatttactattttgatgctagaacacattagtccaggcgtcaatgtaatcccaataattatatcctgcagggtcaaatggtgcagaaaattttttgggttgatttaagtttgagccataatgtcatggctgcataaccttcaagatttggattgtggaatgggtatttagatttggatctttggggtctttgaagtgtttaatagatactgagtttgtatctattagaatgaattcgtagaatttgcgggttttgtttgtggctattggcctgtaatggaatcccgggggg

SEQ ID NO: 7962 - DNA, 1032 bp, Glycine max
  Gm_smallRNAprecursor_795
ttaaatagacccaatttttactgtttttacagtatcggtaatgtttaccggaactgttacaaaacttttacaaattacattatttaaaatagtcacaataattcatgattactacaactaattaatcgtcgtccaatgatataccaaaacagtcatcttcattctggtagaatggatcgtcttcttggtcatcattagtctctgatgattcagcttccttcttggaaggttcttcttccacttcctgttgaagtagttggagaacttctttgagattctgagcaagactctctttagattttgagcttgctaagaatgctgctagttgcgacttttgatttagaaacaaagatgtctccggatcagcaggtttaaggaactcaggattgctctggaaccagttcttgacttgatctggagcagtctttgaagtatcgaattgtgaccaccattttacaaaggcgtgtctctgtaacggtggatattgcttgttgttttcagtttttccgtatctgtattgccatgaaaagatccatgacaaggcaaaactggaaaagtactttaaatctaccggaatacgtgattccttgctattatagagcctgttgaattgttggaatccctgttggacttcttctggaaatatttgtggaattggtccgaagtagttccaccattggaggaaccagtttggaaaattatacgtagtattattttttaagtaaatcagccatgaatgcttgaatttactattttgatgctagaacacattagtccaggcgtcaatgtaatcccaataattatatcctgcagggtcaaatggtgcagaaaattttttgggttgatttaagtttgagccataatgtcatggctgcataaccttcaagatttggattgtggaatgggtatttagatttggatctttggggtctttgaagtgtttaatagatactgagtttgtatctattagaatgaattcgtagaatttgcgggttttgtttgtggctattggcctgtaatggaatcccgggg

SEQ ID NO: 7963 - DNA, 1109 bp, Glycine max
  Gm_smallRNAprecursor_796
ccggaatacgtgattccttgctattatagagcctgttgaattgttggaatccctgttggacttcttctggaaatatttgtggaattggtccgaagtagttccaccattggaggaaccagtttggaaaattatacgtagtattattttttaagtaaatcagccatgaatgcttgaatttactattttgatgctagaacacattagtccaggcgtcaatgtaatcccaataattatatcctgcagggtcaaatggtgcagaaaattttttgggttgatttaagtttgagccataatgtcatggctgcataaccttcaagatttggattgtggaatgggtatttagatttggatctttggggtctttgaagtgtttaatagatactgagtttgtatctattagaatgaattcgtagaatttgcgggttttgtttgtggctattggcctgtaatggaatcccggggggaatactttggcggttgctttgaaaggattcttgtcccagtattctggttccatttgtaaaacattgaaaaatttgttttttgaaatgtaactgttaccgggttgtggtgttgattcttgttgagtcaacgattggcttggtttttggttacagacagttttggtctgtttggctttttggatttgtttttgtaggtctgtttcagaatcatcgtctgattctgaggccatttctgcccaggtctttttggctaattttggtattttggtgaggcctatatcttctaaggccaagagagtttgtattgaccaggcataatcagccacggtctgtttggttgttgttggttttggggactcctgagttgatgactcaaatttgacggtagttgtctgggtcaatgacccttcaagttttcctttctgggttgatgacccagtctgggtaggtgacccagaagatgttgtagttgcctttttggttattggctctggtagagccagtagaacttctttaccttttgtactggatcttcctcctctgccggaggaactagacaccttaggaggcatcgggaattttctgtaaaaattcacgggtgaggtagtcaggtagagagttggaagagcccttgatatattctat

SEQ ID NO: 7964 - DNA, 1196 bp, Glycine max
  Gm_smallRNAprecursor_797
aaggttttttacatctttctgtaaaatgtctttggctgatttgcagtcaacccttactaaaaatttttgatttaataaatcagattgaaatttggaaatgcacaaaacaattgctaaaacttcttttttaacagttgaatactttaattgtgcaggattccagtgttttgaagtatatgcgatgacatgttcttgaccatgtacttgttgtttgaggatgccactgtaaccgatgtctgatgcatcagtttcgacaattttgaatgcctgtggaatgggaagatacaaacattttatggattggactttgactttgatttctttaactgtttgggtatggaggtcagaccaaggaggcggatttttctttagcctatcatgcaatggtttgacaatattgtttaagtaggggacaaattcacctacgtaatttagacaacctagaaatctctgtaactgggttttgtctaagatttggttggggaatttgctagcaaactctattgacctttcgattggaacgattgtaccttgataaatattgtgaccaaggaatcgaattcgtgtttggaaaagattgatttttgatttggagactgccaaaccattttgtttgatgatatggatgaaggtttggagatgtttgaaatgttggtcaatgttttgggaaaagattaaaacatcatctatgtagacaatgacaaattttgaatagggattaaaaatatcattcataattttttgaaattctgaaggggcatttttcagtccgaatgacattacatttcattcatattgcccgaaaggtacagtgaatgctgttttgtacctatctgattcttggatttggatttgccaaaatccagatttcatatcaaattttgaaaatatctttgcagaatttaatttgttaagcaaatcttttttgtttggaataggatatctaatccattgtaatgcttgatttagtggtttgtaatttatgactaagcggggtgttccacgctcaatctcagattgtttgttgacataaaaagccgcacaagaccatgggcttttgcttttccggattaggcctttatcaagcaaatctttgatttccttttgacagtattgaagaagttcttcattcatttggattggtctggcttttgtgggaatttgtttttccctaaagtccttctcgtaggggagat

SEQ ID NO: 7965 - DNA, 1105 bp, Glycine max
  Gm_smallRNAprecursor_798
ctgttttgtttggataacagttaaaatatattggaccttgtcctaggctggtttcgactgttccaattagggagtcttcaaattgattatgcctaatgtctcttagacacattaaaactgctgcatctatgcccatatcaattaagggcttgatggctacttgtacacaaccaatgtgtagatatttatacttacggctatgttcataaattgaattttttgaaagtaaatgaaattcttcccctacatcttgtcctagaggaatattgttttctactgttttgattatgtaatcaaagttgtgtttgtcttttattgtttcaggaacgtatagttgatcctgagggatttctggaatgttccagtcatccatgttttgattgatatcttcgaatcagacttcctcatcgaagagattgtgttttggggcgacctcttgggtctggttgtcttgatcatttaataaattggagttttttgaagaagatgatgaggaggagtttgagcgaaaagagatacgggaaaaagatcgtaatagtctagacatggttataatattctctaatatctttgccctcatttggttccatagaaatatctccgtaagtaaatatgtcacaaaatttttctggatctgaattatttttaagaaaaactctttttgtttttttgaaaaacagtttgaacggcaatcctatagccaccagtgtattatgtcttgatattttggttaaacagtacaccttagccttactgccctttatccaacacgagtcttactgctacagtactgttcaactaaaatattagactgctgtacttccaggaagtactgttcaaacactcactgtacaaatcaaagtaaaatattacgtgtactatacaagactttagttccagatccataaaatttgttaacatatgtccttacggacagtattcctacttccccatcaggctctgataccagagatcagcggaataagatcaaacggacagataggaagtaagaaatgcagtatgataaatgaaagtgaaatataaactgtaaaacagatatcaagggcacaccgaaacggcttacaaacccaggtttttgaaaaca

SEQ ID NO: 7966 - DNA, 1200 bp, Glycine max
  Gm_smallRNAprecursor_799
agacacattaaaactgctgcatctatgcccatatcaattaagggcttgatggctacttgtacacaaccaatgtgtagatatttatacttacggctatgttcataaattgaattttttgaaagtaaatgaaattcttcccctacatcttgtcctagaggaatattgttttctactgttttgattatgtaatcaaagttgtgtttgtcttttattgtttcaggaacgtatagttgatcctgagggatttctggaatgttccagtcatccatgttttgattgatatcttcgaatcagacttcctcatcgaagagattgtgttttggggcgacctcttgggtctggttgtcttgatcatttaataaattggagttttttgaagaagatgatgaggaggagtttgagcgaaaagagatacgggaaaaagatcgtaatagtctagacatggttataatattctctaatatctttgccctcatttggttccatagaaatatctccgtaagtaaatatgtcacaaaatttttctggatctgaattatttttaagaaaaactctttttgtttttttgaaaaacagtttgaacggcaatcctatagccaccagtgtattatgtcttgatattttggttaaacagtacaccttagccttactgccctttatccaacacgagtcttactgctacagtactgttcaactaaaatattagactgctgtacttccaggaagtactgttcaaacactcactgtacaaatcaaagtaaaatattacgtgtactatacaagactttagttccagatccataaaatttgttaacatatgtccttacggacagtattcctacttccccatcaggctctgataccagagatcagcggaataagatcaaacggacagataggaagtaagaaatgcagtatgataaatgaaagtgaaatataaactgtaaaacagatatcaagggcacaccgaaacggcttacaaacccaggtttttgaaaacaaagaaaccgaagcggcggcagagccgcacaggatcggtaaggggagaagggagatatgaaaaacagaacttgaaatttattgaaaccgaaagaaaagcttacaaagagtttttccctaggcagagcttctctctctaaaacctgattttgagactatctgaaagggtgtctcacaaaggggacgaggactcctttaaat

SEQ ID NO: 7967 - DNA, 1188 bp, Glycine max
  Gm_smallRNAprecursor_800
ccgtctttgcattttctgggtcaacaaacatctttgtctttcgcatgtaccagaccatgtaatctgagttaaaactcaataggccttcttgtcggggataagcgtcgaccctaaatgcatggcgattattccactgctgaatcattggggcaaacaattgcccccaattttcgtcatgtttccccttaaatgttatgccatgaatgtttaggggttgtgaaggagactctggaactagttactgcatcccaaattgtctcaagactctgtccggttggtgccattcaataacttggaaacaaattagtggcaccaccgcgtaccacgcgagacttccaactaaacaaacgggaggcaacaatgatataatggttgatgggtaaggctcccacacaaactgcatataacaacatagttgtaaacattgtagtaaaataagacatataattttttattttacaaatacagtagcatgattcttacctcatgacgtttcataatatccaacttgcgacgaaaaactttcacatcatcattgtcgatatgttggtttccacgtcgcagccacctacaaagaataaaatttaatataccctaaaaccatttattctattcaaatgaaagacgctgttaaaaatgactaacatgtgccctagtggtatattttctatttgggaaggagtcctctttggagccaaggttggacatcgttcccatgcccacaattgtagtatgatgctcatacctccgattgatttagttttataatcgatggcactgcacatctctctgtatagaaaaccaagtacggcagctccccatgcatatctgctacattcttcaaagtcacgtaaaaattgaaggtactttagcgaaactctgttactggttttgtcaacgaacaagacacctccaataaatctcagtatccatgcacgggcaaaccttcgtacttgttcttcgtcgtcatcattattaatttgatcaaaatggtgagccagccaacttaatttaaccacactacctttaatttcaccttcttgtggtctgactcccaataattcctcacataaatcagctcaatcaagatttgttggaccgattaatggtaaaccatccacacttatacctaacaacacagacacgtcttgtagagtgatagtacactctccgcatctcatatgaaac

SEQ ID NO: 7968 - DNA, 1075 bp, Glycine max
  Gm_smallRNAprecursor_801
aactatctcattattgccgactagccctatccaaataaccatggaatcatcaaatcatactaggacaataggcaactaaaactaacacaattatacctagaggtgttcacgggtacgggtcacccgggaactcgaattgacccaaaccgatccgaatagtttgagttagtgttcatgtacgggttgagtcataggtttagatttataaattcaatcaaaaccgttcatgtacgagttgggtcatagatttagatttatagatccgatcaaaaccatttatgtacaggttggatcacaaatttagatttatagattcgatcaaaatttttagaattgttttgtttgactttaaatactgctaatattgggactccaagtattgaaattactagtgttggaacttcttaagatattactttcaggtacattcaatgttgttaatggcggatggcggttcatggcagaaagtaaaatccgccataaaaatatggcggatggcgtagcggaaaatggcggatgtcatggcggacaaaaaaaaaaaacatatatataaactcattgaaattgaaaaaaacaaaggattgcattcaaataaactaaaaaagtttgatgagttcatacaataatcaagtaccaataccaaataaactcaataaaaagaggactgaacagaaaaaaaaaaaattgtggtgtcaaatagaaaaaaaaattaaaaatgggactgtcgaaagcaaaaaggggtgtcaagcagcaaaaacaaaaaaaaaaggctttggcccacccccaccagtataagtcgcggttctggctaggtcgtcttcttcgttcgcgttgccgtcgttcacgccgtgctcgtcgccgccgttcgcgttgccgtgggtcgtcgctgccatgctcgtcgccgccgtgggtcgtcgctggttgcaggtgtgggtggttccgaggttgtggcgggttgcaggggtcgtgggtcgtcgcgctgtgttggagcttcgaggtcgaaggttgcagctgcatccgccattttccgcctcgccgccacatccgccatggccgccatggctatggcggccgc

SEQ ID NO: 7969 - DNA, 1221 bp, Glycine max
  Gm_smallRNAprecursor_802
gaagagcaaaaaaaaattatttattatgtttttttgacaattatttcttatgttattaagagcacataatgtaaaaaatattacatacactctattaaatattttaaactatttaaaatataattactaaacattttttatattttaatttaataatagactttttataataaaacatttcatttttaatttctaatcacatattcacggaaacgtaatttttttctttttttatataataagacatgagttaattgtaaaaacaacaatttggtacaaaatttctgttttatatgccataaaacttgttgaagcagaaatccctcctccacttcaattaaacagtttgaataatggggagtttcatgttctacccacatacaaaaaaaaaaagaaaaaaaaaagcaaccaatcagtgaatttacctgagcactcccgaatatgcaagttgttttgggaactattaaattttatagtgcagcataggcatccgaaaggtccccttaaaaaccggttcataagagggtggtctacccagctatataagcatttatcatgttcatgaattacccgatgtgggactattcttaacacgccccctcgagccagggctcgtcaccacaaagcgagggctggcggcacccaccggacagaagtagaagatggctctgataccatattaaattttatagtgcagcataggcatccgaaaggtccccttaaaaaccggttcataagggggtggtctacccagctatataagcacttatcatgttcatgaattacccgatgtggaactattcttaacaggaaccttgacagttgacagcattgtttgtacctgaaggagtgacatagcctagcatgtcattcattctgagattcttaaattagatcgtttgacttgactatttgactaagcaaggtgaactgaactgaagcatgaagtgattgatcacatgcagctttatttttttatcgaaagggaaatatttttttggttattttttaatgagataaatttttaaaaattacctaaaagagataagtcgtaccaagtgttacaacatctgaaattagaagtcgtaacacttgttatgactttttatctttttttaactaaagtcgtaaaattatttacgatttcagttaaaaaaagactttgaaatcataggaattttttttttttgttgtacgactttaaagtcataaaaatttttt

SEQ ID NO: 7970 - DNA, 1040 bp, Glycine max
  Gm_smallRNAprecursor_803
tcatatatttttacaaaactacttatattttttattattttataaaatattaaatgaaaaataaatttaatattgcaaaaatataaaactcattcaatactattatgcaaagctacaaataaaatagaagaattagtacaaaaatattctaataagatttagaattatttttactcaaaacttagatgagtgattcagtacattaatgctaatgggatacatattggccaagttttcgagaggggcaagaggccaagagctgggccataacgttgtggtcatctgtggggcattgctttgtgtatctagcacgtgttgctaggtgcacccagtattttttaaaaatactaaaattgtccctgcgcttttttcgcatttgtgatggtgtatgtaagggtggtccgtaaattgtacggatcaagttaatccgtaagattgatactgatcaagttgatctataaggcttctacggatcaagttgatctgtattgttccataaaaggtttacggatcaagttgattcgtaaaaggcttacggatcaacttgatccgtaagccttttacgaatcaacttaaatggcttacggatcaaggatatttttatcatttcaccttaagtgttgggtacaccagcaataatgctggatgcacctagcaacacccctagcacaattgctggtactgtggtacacccagtaaaataatgtaattttaattttgtcttgttgatatgaattcgtttgaacctcatacggaattacacataaaataacttttctcctaatttccttgtgtcattgctattttgaaaagaaaatggcattactacaaactaatgggtgccataactcatgtcagatttcagatgtgaaagctgggcattttttttttagtaagcacaaggttacacaatatctaactaagaaataattcgatacttgagttattaattaatttcacaaattactttataaattgaacatgtgtgcactcactttcttttcttttcttttctttttttcctttctaaaaaaagatta

SEQ ID NO: 7971 - DNA, 1151 bp, Glycine max
  Gm_smallRNAprecursor_804
agtttgctttgcaatataacttcggatttggtttcagatcaggatcaaatatatgtagttctaacttctgaaaactccatttttcttatctacttcacattaattcactgagttatttgacaaagtcagtaattaaacatgcttaaagaaattccttccattgaatctactatatattatttacttgtaagtcaactattactaattgtccattctgtcataacctttaatttgatgttgtacactcatacccctctttcccacttcatcatatatgtgtgcataaagtttatatatatctgagtctggattaatttgttagaattgattctcatttcttttaatacaaaagaaaactagccttcattattggaatttaaattggttgatctgattatactttcttcatcttgtgtcaggaagaaggaaaaatgtacatgtgcagctgttctattaatattgcagcttagtctagtcacattgggagggaaagagagtgaaggagtttccctcagcccattcatggatataatgaaagattgggttgctgaattaactgattcattcatacaatagtattcaattagggtaatattgtgtgaatgaagagagtatagtatctatattggaaccccctctttctctgtgcttggactgaagggagctccttctttttctgttccctccatttgtatcatccatgtctcaaagggctttatgcatgttgttgtctaaagcttaatctacataatatgatgctcggcacaaaaaaggtgaggtcagtacactgtagctgatgctacactttgtcttgtagctctttgtaagtatttactctagcacaactgccatagattcagcaagcatctgaacagttgcatatgagtttaatagccttgtcaccccacttggtactgtttttacacgaaaaaaatcatgatctccgatatatatatatatatatatatatatatatatatatatattaatttctttcgtgaagtagataatgatacagtgtgtcactttgcttgttaatttttattaggtacaagtttttttttttttttctctcaacacttttctgagttctttctttgggggttgggaaagcaaaattttaggtcaaagttggttaacagttcacttgt

SEQ ID NO: 7972 - DNA, 1094 bp, Glycine max
  Gm_smallRNAprecursor_805
ttgatcggttagtaaaattactttagccttagataatcaaacatgcactaataattgaagtaaagtgatatgaaatgaaagatacagcgaggcgcgaggggactttgaaagtgcaggagacgagaccgggttggactcggtcaactcggatgccagagaggatgaagtgttcgtagaaggaggagttatcgccggctctgagggaaggaacagagttgagtcgtgacatagcgaccgattcttgctgcgttagtctcagcatctctctcaccttctccatcctctttgtcttgcctttttccaacccaccaagacgaagacgatctataggggttgcttgttgctggttgctatctggatcgtgagttcacttgagcctaatgggcttttacattgtttaacttcttgagtgttgctaggtgcagccatcattattgttggtgcacccaatattttttgaaaatggtaaaattgttcctgttaatttcttcccttacgaatcaaattgatccgtaagttgatttttaagacttacagatcaagttgatccgtaaaaaacttacagatcaacttgatccgtaagttttaaaaatcaacttacgaatcaacttgatccgtaaaagatttacagatcaacttgatccataagtcttaaaaatcaacttacgaatcaacttgatccgtaaaagacttacggatcaagttaatctgtaagtcttaaaaattaacttatgaatcaacttgatccgtaagggatatttttgtctttttgtggttagtactaggtgcaccagcaataatgctgggtgcacctagcagcagtctaacttctctcaccaaatttgcataaaggccattcatatttacacctctcaattttactagtatatctccttatatatatatatatatatatatatatatatatatatatatatatatatatatattaccataaactgttttttttttcttcaaaatgttgaaaaatttgcgtttataaaaattttacatttggaatgtagtttctctggaagtggtaaaaatttagcacattacaaaaagtattttctggaagtcaattttcaaaaata

SEQ ID NO: 7973 - DNA, 1160 bp, Glycine max
  Gm_smallRNAprecursor_806
ttgatcggttagtaaaattactttagccttagataatcaaacatgcactaataattgaagtaaagtgatatgaaatgaaagatacagcgaggcgcgaggggactttgaaagtgcaggagacgagaccgggttggactcggtcaactcggatgccagagaggatgaagtgttcgtagaaggaggagttatcgccggctctgagggaaggaacagagttgagtcgtgacatagcgaccgattcttgctgcgttagtctcagcatctctctcaccttctccatcctctttgtcttgcctttttccaacccaccaagacgaagacgatctataggggttgcttgttgctggttgctatctggatcgtgagttcacttgagcctaatgggcttttacattgtttaacttcttgagtgttgctaggtgcagccatcattattgttggtgcacccaatattttttgaaaatggtaaaattgttcctgttaatttcttcccttacgaatcaaattgatccgtaagttgatttttaagacttacagatcaagttgatccgtaaaaaacttacagatcaacttgatccgtaagttttaaaaatcaacttacgaatcaacttgatccgtaaaagatttacagatcaacttgatccataagtcttaaaaatcaacttacgaatcaacttgatccgtaaaagacttacggatcaagttaatctgtaagtcttaaaaattaacttatgaatcaacttgatccgtaagggatatttttgtctttttgtggttagtactaggtgcaccagcaataatgctgggtgcacctagcagcagtctaacttctctcaccaaatttgcataaaggccattcatatttacacctctcaattttactagtatatctccttatatatatatatatatatatatatatatatatatatatatatatatatatatattaccataaactgttttttttttcttcaaaatgttgaaaaatttgcgtttataaaaattttacatttggaatgtagtttctctggaagtggtaaaaatttagcacattacaaaaagtattttctggaagtcaattttcaaaaataaaataaaatgggcaccgattgcctttaagcattttcttttttgggtatttgctaagcgttgatata

SEQ ID NO: 7974 - DNA, 1166 bp, Glycine max
  Gm_smallRNAprecursor_807
tactttagccttagataatcaaacatgcactaataattgaagtaaagtgatatgaaatgaaagatacagcgaggcgcgaggggactttgaaagtgcaggagacgagaccgggttggactcggtcaactcggatgccagagaggatgaagtgttcgtagaaggaggagttatcgccggctctgagggaaggaacagagttgagtcgtgacatagcgaccgattcttgctgcgttagtctcagcatctctctcaccttctccatcctctttgtcttgcctttttccaacccaccaagacgaagacgatctataggggttgcttgttgctggttgctatctggatcgtgagttcacttgagcctaatgggcttttacattgtttaacttcttgagtgttgctaggtgcagccatcattattgttggtgcacccaatattttttgaaaatggtaaaattgttcctgttaatttcttcccttacgaatcaaattgatccgtaagttgatttttaagacttacagatcaagttgatccgtaaaaaacttacagatcaacttgatccgtaagttttaaaaatcaacttacgaatcaacttgatccgtaaaagatttacagatcaacttgatccataagtcttaaaaatcaacttacgaatcaacttgatccgtaaaagacttacggatcaagttaatctgtaagtcttaaaaattaacttatgaatcaacttgatccgtaagggatatttttgtctttttgtggttagtactaggtgcaccagcaataatgctgggtgcacctagcagcagtctaacttctctcaccaaatttgcataaaggccattcatatttacacctctcaattttactagtatatctccttatatatatatatatatatatatatatatatatatatatatatatatatatatattaccataaactgttttttttttcttcaaaatgttgaaaaatttgcgtttataaaaattttacatttggaatgtagtttctctggaagtggtaaaaatttagcacattacaaaaagtattttctggaagtcaattttcaaaaataaaataaaatgggcaccgattgcctttaagcattttcttttttgggtatttgctaagcgttgatatactcgttttcttgttcagttcagaa

SEQ ID NO: 7975 - DNA, 1044 bp, Glycine max
  Gm_smallRNAprecursor_808
cttttttttcatcacaagtttttcactcacttggaacccagagaaaaatcactttttgtctctctcccactttcagggttgttcaacttgggaaagtggcgcatgaatcccaaccagggtctgaaattttcagatctcttactttaacaggttctgtaataaccccctatttttttttctttttttgctcccccatgcaatattatgtgtatacgactgcttaaatggcctatgtatgacaatgatatttttgtttgaaatttgaaatacaacttcttcaataatgaaatttggctgaatttataaagggatttataaaattgggggaccaaatgtgcgaattaaattataaggggaccaaaattgaaattggagtaaaaatgggagactaaaaatataattttacttacaaaaaatgaagcatttacaaggaacaactcaaatgttgacacgtggcattgacatgtgacagttacacgtggcgttggcacgtagcagtcaacgtctgaggttaacggtcaatgttcaaattggactttcaggaccaattttgcagggatttataaaactgagggaccaaatttgtgaattaaattataggggaaccaattctaaaattggagataaactgagggaccaaaagtgtaattttacctaaaataaataatattattatacataatactaaaatttctaatgtatatttaaaacgcatgtaaatttaaataataaattttgtgatgattaattttaatataactcatacgaattatttaatccgtatattttttataaataaaaaatatttactattaaaaaatttaatatattaataaattaaaaaaatatatttttgaaaaaaattaaaaatagcacttacgggttacgtaatctatatgagttatacgaattacgtaatccatacgagtcatataaattacataatccgtatgagttaatttgtatgactcatatcatacggattatgggatgagtaagtatttttttttaaaaaagaaatcaataatttgtttttatttattt

SEQ ID NO: 7976 - DNA, 1078 bp, Glycine max
  Gm_smallRNAprecursor_809
gtttcaggagatcttctctcctgtgttatcttgtagtacctctggtactagttatcgtttaatatatatattattttagcagttcaaaaaaaaaaaaaaaacactgtggatctatacttatacataatgtgaagaaaaatattttcataaaggcttatggtaccaaataagtgcttgtaaacaaaaaaaatactgtccaagggttcattcttatagaaacaacctttctgtcttcttgagctttctggatagatacatagatacatacgaatcaatttctgggccttaattcctgaattttagagaattctcaatattctaactttaagatatatgatcatgcttttctgttgaatgatttttgtgtttgttttcttgctggaggacatttattctctaaatgggtatcttgctctcgttgcctctttaataatatttcttctttaatcctccctccccaacacacaacacgctgttttctagtactctatgaagcaccgacaccgacacggacatcggacacgacacggatacggacacgtggacacctgtaatgtccaaaatatagaacgtaatacgggtgtcgtgtcggtgtcggacactaacacggacgcgtgtcggacaccggacacggcaaagggctgaagtgtccgtgcttcatagctagtacttcatcttgagtcactaaataataagggtaataagttataaaaagaggtgatactaatataagtttcaaaagaatatatatgctcgtaatccttattttcttcttgaagttgaagaatattggccttgctgtcttctttgtgttgcagttatgggttggtcccgggagtaaggcagctgaagagaaagagttttttgatagccaccttgctccattctacagaatagaacaggtttcaagtggctggaaattaattttacttttctttctagtttttaaatcccaggtgtgggttctggttcctgaaatttaagctcctttttatgaaaataatttatttaccatccctgttcattgccatttttgccttttacccccccccccccccccccacacacacacacacag

SEQ ID NO: 7977 - DNA, 1080 bp, Glycine max
  Gm_smallRNAprecursor_810
gtttcaggagatcttctctcctgtgttatcttgtagtacctctggtactagttatcgtttaatatatatattattttagcagttcaaaaaaaaaaaaaaaacactgtggatctatacttatacataatgtgaagaaaaatattttcataaaggcttatggtaccaaataagtgcttgtaaacaaaaaaaatactgtccaagggttcattcttatagaaacaacctttctgtcttcttgagctttctggatagatacatagatacatacgaatcaatttctgggccttaattcctgaattttagagaattctcaatattctaactttaagatatatgatcatgcttttctgttgaatgatttttgtgtttgttttcttgctggaggacatttattctctaaatgggtatcttgctctcgttgcctctttaataatatttcttctttaatcctccctccccaacacacaacacgctgttttctagtactctatgaagcaccgacaccgacacggacatcggacacgacacggatacggacacgtggacacctgtaatgtccaaaatatagaacgtaatacgggtgtcgtgtcggtgtcggacactaacacggacgcgtgtcggacaccggacacggcaaagggctgaagtgtccgtgcttcatagctagtacttcatcttgagtcactaaataataagggtaataagttataaaaagaggtgatactaatataagtttcaaaagaatatatatgctcgtaatccttattttcttcttgaagttgaagaatattggccttgctgtcttctttgtgttgcagttatgggttggtcccgggagtaaggcagctgaagagaaagagttttttgatagccaccttgctccattctacagaatagaacaggtttcaagtggctggaaattaattttacttttctttctagtttttaaatcccaggtgtgggttctggttcctgaaatttaagctcctttttatgaaaataatttatttaccatccctgttcattgccatttttgccttttacccccccccccccccccccacacacacacacacagac

SEQ ID NO: 7978 - DNA, 1077 bp, Glycine max
  Gm_smallRNAprecursor_811
tcaggagatcttctctcctgtgttatcttgtagtacctctggtactagttatcgtttaatatatatattattttagcagttcaaaaaaaaaaaaaaaacactgtggatctatacttatacataatgtgaagaaaaatattttcataaaggcttatggtaccaaataagtgcttgtaaacaaaaaaaatactgtccaagggttcattcttatagaaacaacctttctgtcttcttgagctttctggatagatacatagatacatacgaatcaatttctgggccttaattcctgaattttagagaattctcaatattctaactttaagatatatgatcatgcttttctgttgaatgatttttgtgtttgttttcttgctggaggacatttattctctaaatgggtatcttgctctcgttgcctctttaataatatttcttctttaatcctccctccccaacacacaacacgctgttttctagtactctatgaagcaccgacaccgacacggacatcggacacgacacggatacggacacgtggacacctgtaatgtccaaaatatagaacgtaatacgggtgtcgtgtcggtgtcggacactaacacggacgcgtgtcggacaccggacacggcaaagggctgaagtgtccgtgcttcatagctagtacttcatcttgagtcactaaataataagggtaataagttataaaaagaggtgatactaatataagtttcaaaagaatatatatgctcgtaatccttattttcttcttgaagttgaagaatattggccttgctgtcttctttgtgttgcagttatgggttggtcccgggagtaaggcagctgaagagaaagagttttttgatagccaccttgctccattctacagaatagaacaggtttcaagtggctggaaattaattttacttttctttctagtttttaaatcccaggtgtgggttctggttcctgaaatttaagctcctttttatgaaaataatttatttaccatccctgttcattgccatttttgccttttacccccccccccccccccccacacacacacacacagac

SEQ ID NO: 7979 - DNA, 1078 bp, Glycine max
  Gm_smallRNAprecursor_812
tcaggagatcttctctcctgtgttatcttgtagtacctctggtactagttatcgtttaatatatatattattttagcagttcaaaaaaaaaaaaaaaacactgtggatctatacttatacataatgtgaagaaaaatattttcataaaggcttatggtaccaaataagtgcttgtaaacaaaaaaaatactgtccaagggttcattcttatagaaacaacctttctgtcttcttgagctttctggatagatacatagatacatacgaatcaatttctgggccttaattcctgaattttagagaattctcaatattctaactttaagatatatgatcatgcttttctgttgaatgatttttgtgtttgttttcttgctggaggacatttattctctaaatgggtatcttgctctcgttgcctctttaataatatttcttctttaatcctccctccccaacacacaacacgctgttttctagtactctatgaagcaccgacaccgacacggacatcggacacgacacggatacggacacgtggacacctgtaatgtccaaaatatagaacgtaatacgggtgtcgtgtcggtgtcggacactaacacggacgcgtgtcggacaccggacacggcaaagggctgaagtgtccgtgcttcatagctagtacttcatcttgagtcactaaataataagggtaataagttataaaaagaggtgatactaatataagtttcaaaagaatatatatgctcgtaatccttattttcttcttgaagttgaagaatattggccttgctgtcttctttgtgttgcagttatgggttggtcccgggagtaaggcagctgaagagaaagagttttttgatagccaccttgctccattctacagaatagaacaggtttcaagtggctggaaattaattttacttttctttctagtttttaaatcccaggtgtgggttctggttcctgaaatttaagctcctttttatgaaaataatttatttaccatccctgttcattgccatttttgccttttacccccccccccccccccccacacacacacacacagaca

SEQ ID NO: 7980 - DNA, 1079 bp, Glycine max
  Gm_smallRNAprecursor_813
tcaggagatcttctctcctgtgttatcttgtagtacctctggtactagttatcgtttaatatatatattattttagcagttcaaaaaaaaaaaaaaaacactgtggatctatacttatacataatgtgaagaaaaatattttcataaaggcttatggtaccaaataagtgcttgtaaacaaaaaaaatactgtccaagggttcattcttatagaaacaacctttctgtcttcttgagctttctggatagatacatagatacatacgaatcaatttctgggccttaattcctgaattttagagaattctcaatattctaactttaagatatatgatcatgcttttctgttgaatgatttttgtgtttgttttcttgctggaggacatttattctctaaatgggtatcttgctctcgttgcctctttaataatatttcttctttaatcctccctccccaacacacaacacgctgttttctagtactctatgaagcaccgacaccgacacggacatcggacacgacacggatacggacacgtggacacctgtaatgtccaaaatatagaacgtaatacgggtgtcgtgtcggtgtcggacactaacacggacgcgtgtcggacaccggacacggcaaagggctgaagtgtccgtgcttcatagctagtacttcatcttgagtcactaaataataagggtaataagttataaaaagaggtgatactaatataagtttcaaaagaatatatatgctcgtaatccttattttcttcttgaagttgaagaatattggccttgctgtcttctttgtgttgcagttatgggttggtcccgggagtaaggcagctgaagagaaagagttttttgatagccaccttgctccattctacagaatagaacaggtttcaagtggctggaaattaattttacttttctttctagtttttaaatcccaggtgtgggttctggttcctgaaatttaagctcctttttatgaaaataatttatttaccatccctgttcattgccatttttgccttttacccccccccccccccccccacacacacacacacagacac

SEQ ID NO: 7981 - DNA, 1080 bp, Glycine max
  Gm_smallRNAprecursor_814
tcaggagatcttctctcctgtgttatcttgtagtacctctggtactagttatcgtttaatatatatattattttagcagttcaaaaaaaaaaaaaaaacactgtggatctatacttatacataatgtgaagaaaaatattttcataaaggcttatggtaccaaataagtgcttgtaaacaaaaaaaatactgtccaagggttcattcttatagaaacaacctttctgtcttcttgagctttctggatagatacatagatacatacgaatcaatttctgggccttaattcctgaattttagagaattctcaatattctaactttaagatatatgatcatgcttttctgttgaatgatttttgtgtttgttttcttgctggaggacatttattctctaaatgggtatcttgctctcgttgcctctttaataatatttcttctttaatcctccctccccaacacacaacacgctgttttctagtactctatgaagcaccgacaccgacacggacatcggacacgacacggatacggacacgtggacacctgtaatgtccaaaatatagaacgtaatacgggtgtcgtgtcggtgtcggacactaacacggacgcgtgtcggacaccggacacggcaaagggctgaagtgtccgtgcttcatagctagtacttcatcttgagtcactaaataataagggtaataagttataaaaagaggtgatactaatataagtttcaaaagaatatatatgctcgtaatccttattttcttcttgaagttgaagaatattggccttgctgtcttctttgtgttgcagttatgggttggtcccgggagtaaggcagctgaagagaaagagttttttgatagccaccttgctccattctacagaatagaacaggtttcaagtggctggaaattaattttacttttctttctagtttttaaatcccaggtgtgggttctggttcctgaaatttaagctcctttttatgaaaataatttatttaccatccctgttcattgccatttttgccttttacccccccccccccccccccacacacacacacacagacaca

SEQ ID NO: 7982 - DNA, 1112 bp, Glycine max
  Gm_smallRNAprecursor_815
tcaggagatcttctctcctgtgttatcttgtagtacctctggtactagttatcgtttaatatatatattattttagcagttcaaaaaaaaaaaaaaaacactgtggatctatacttatacataatgtgaagaaaaatattttcataaaggcttatggtaccaaataagtgcttgtaaacaaaaaaaatactgtccaagggttcattcttatagaaacaacctttctgtcttcttgagctttctggatagatacatagatacatacgaatcaatttctgggccttaattcctgaattttagagaattctcaatattctaactttaagatatatgatcatgcttttctgttgaatgatttttgtgtttgttttcttgctggaggacatttattctctaaatgggtatcttgctctcgttgcctctttaataatatttcttctttaatcctccctccccaacacacaacacgctgttttctagtactctatgaagcaccgacaccgacacggacatcggacacgacacggatacggacacgtggacacctgtaatgtccaaaatatagaacgtaatacgggtgtcgtgtcggtgtcggacactaacacggacgcgtgtcggacaccggacacggcaaagggctgaagtgtccgtgcttcatagctagtacttcatcttgagtcactaaataataagggtaataagttataaaaagaggtgatactaatataagtttcaaaagaatatatatgctcgtaatccttattttcttcttgaagttgaagaatattggccttgctgtcttctttgtgttgcagttatgggttggtcccgggagtaaggcagctgaagagaaagagttttttgatagccaccttgctccattctacagaatagaacaggtttcaagtggctggaaattaattttacttttctttctagtttttaaatcccaggtgtgggttctggttcctgaaatttaagctcctttttatgaaaataatttatttaccatccctgttcattgccatttttgccttttacccccccccccccccccccacacacacacacacagacacacagacaccaaaaaaaagagaaataaataaagg

SEQ ID NO: 7983 - DNA, 1113 bp, Glycine max
  Gm_smallRNAprecursor_816
tcaggagatcttctctcctgtgttatcttgtagtacctctggtactagttatcgtttaatatatatattattttagcagttcaaaaaaaaaaaaaaaacactgtggatctatacttatacataatgtgaagaaaaatattttcataaaggcttatggtaccaaataagtgcttgtaaacaaaaaaaatactgtccaagggttcattcttatagaaacaacctttctgtcttcttgagctttctggatagatacatagatacatacgaatcaatttctgggccttaattcctgaattttagagaattctcaatattctaactttaagatatatgatcatgcttttctgttgaatgatttttgtgtttgttttcttgctggaggacatttattctctaaatgggtatcttgctctcgttgcctctttaataatatttcttctttaatcctccctccccaacacacaacacgctgttttctagtactctatgaagcaccgacaccgacacggacatcggacacgacacggatacggacacgtggacacctgtaatgtccaaaatatagaacgtaatacgggtgtcgtgtcggtgtcggacactaacacggacgcgtgtcggacaccggacacggcaaagggctgaagtgtccgtgcttcatagctagtacttcatcttgagtcactaaataataagggtaataagttataaaaagaggtgatactaatataagtttcaaaagaatatatatgctcgtaatccttattttcttcttgaagttgaagaatattggccttgctgtcttctttgtgttgcagttatgggttggtcccgggagtaaggcagctgaagagaaagagttttttgatagccaccttgctccattctacagaatagaacaggtttcaagtggctggaaattaattttacttttctttctagtttttaaatcccaggtgtgggttctggttcctgaaatttaagctcctttttatgaaaataatttatttaccatccctgttcattgccatttttgccttttacccccccccccccccccccacacacacacacacagacacacagacaccaaaaaaaagagaaataaataaagga

SEQ ID NO: 7984 - DNA, 1113 bp, Glycine max; identical to SEQ ID NO: 7983
  Gm_smallRNAprecursor_817

SEQ ID NO: 7985 - DNA, 1114 bp, Glycine max
  Gm_smallRNAprecursor_818
tcaggagatcttctctcctgtgttatcttgtagtacctctggtactagttatcgtttaatatatatattattttagcagttcaaaaaaaaaaaaaaaacactgtggatctatacttatacataatgtgaagaaaaatattttcataaaggcttatggtaccaaataagtgcttgtaaacaaaaaaaatactgtccaagggttcattcttatagaaacaacctttctgtcttcttgagctttctggatagatacatagatacatacgaatcaatttctgggccttaattcctgaattttagagaattctcaatattctaactttaagatatatgatcatgcttttctgttgaatgatttttgtgtttgttttcttgctggaggacatttattctctaaatgggtatcttgctctcgttgcctctttaataatatttcttctttaatcctccctccccaacacacaacacgctgttttctagtactctatgaagcaccgacaccgacacggacatcggacacgacacggatacggacacgtggacacctgtaatgtccaaaatatagaacgtaatacgggtgtcgtgtcggtgtcggacactaacacggacgcgtgtcggacaccggacacggcaaagggctgaagtgtccgtgcttcatagctagtacttcatcttgagtcactaaataataagggtaataagttataaaaagaggtgatactaatataagtttcaaaagaatatatatgctcgtaatccttattttcttcttgaagttgaagaatattggccttgctgtcttctttgtgttgcagttatgggttggtcccgggagtaaggcagctgaagagaaagagttttttgatagccaccttgctccattctacagaatagaacaggtttcaagtggctggaaattaattttacttttctttctagtttttaaatcccaggtgtgggttctggttcctgaaatttaagctcctttttatgaaaataatttatttaccatccctgttcattgccatttttgccttttacccccccccccccccccccacacacacacacacagacacacagacaccaaaaaaaagagaaataaataaaggaa

SEQ ID NO: 7986 - DNA, 1115 bp, Glycine max
  Gm_smallRNAprecursor_819
tcaggagatcttctctcctgtgttatcttgtagtacctctggtactagttatcgtttaatatatatattattttagcagttcaaaaaaaaaaaaaaaacactgtggatctatacttatacataatgtgaagaaaaatattttcataaaggcttatggtaccaaataagtgcttgtaaacaaaaaaaatactgtccaagggttcattcttatagaaacaacctttctgtcttcttgagctttctggatagatacatagatacatacgaatcaatttctgggccttaattcctgaattttagagaattctcaatattctaactttaagatatatgatcatgcttttctgttgaatgatttttgtgtttgttttcttgctggaggacatttattctctaaatgggtatcttgctctcgttgcctctttaataatatttcttctttaatcctccctccccaacacacaacacgctgttttctagtactctatgaagcaccgacaccgacacggacatcggacacgacacggatacggacacgtggacacctgtaatgtccaaaatatagaacgtaatacgggtgtcgtgtcggtgtcggacactaacacggacgcgtgtcggacaccggacacggcaaagggctgaagtgtccgtgcttcatagctagtacttcatcttgagtcactaaataataagggtaataagttataaaaagaggtgatactaatataagtttcaaaagaatatatatgctcgtaatccttattttcttcttgaagttgaagaatattggccttgctgtcttctttgtgttgcagttatgggttggtcccgggagtaaggcagctgaagagaaagagttttttgatagccaccttgctccattctacagaatagaacaggtttcaagtggctggaaattaattttacttttctttctagtttttaaatcccaggtgtgggttctggttcctgaaatttaagctcctttttatgaaaataatttatttaccatccctgttcattgccatttttgccttttacccccccccccccccccccacacacacacacacagacacacagacaccaaaaaaaagagaaataaataaaggaag

SEQ ID NO: 7987 - DNA, 1062 bp, Glycine max
  Gm_smallRNAprecursor_820
ttctctcctgtgttatcttgtagtacctctggtactagttatcgtttaatatatatattattttagcagttcaaaaaaaaaaaaaaaacactgtggatctatacttatacataatgtgaagaaaaatattttcataaaggcttatggtaccaaataagtgcttgtaaacaaaaaaaatactgtccaagggttcattcttatagaaacaacctttctgtcttcttgagctttctggatagatacatagatacatacgaatcaatttctgggccttaattcctgaattttagagaattctcaatattctaactttaagatatatgatcatgcttttctgttgaatgatttttgtgtttgttttcttgctggaggacatttattctctaaatgggtatcttgctctcgttgcctctttaataatatttcttctttaatcctccctccccaacacacaacacgctgttttctagtactctatgaagcaccgacaccgacacggacatcggacacgacacggatacggacacgtggacacctgtaatgtccaaaatatagaacgtaatacgggtgtcgtgtcggtgtcggacactaacacggacgcgtgtcggacaccggacacggcaaagggctgaagtgtccgtgcttcatagctagtacttcatcttgagtcactaaataataagggtaataagttataaaaagaggtgatactaatataagtttcaaaagaatatatatgctcgtaatccttattttcttcttgaagttgaagaatattggccttgctgtcttctttgtgttgcagttatgggttggtcccgggagtaaggcagctgaagagaaagagttttttgatagccaccttgctccattctacagaatagaacaggtttcaagtggctggaaattaattttacttttctttctagtttttaaatcccaggtgtgggttctggttcctgaaatttaagctcctttttatgaaaataatttatttaccatccctgttcattgccatttttgccttttacccccccccccccccccccacacacacacaca

SEQ ID NO: 7988 - DNA, 1066 bp, Glycine max
  Gm_smallRNAprecursor_821
ctctcctgtgttatcttgtagtacctctggtactagttatcgtttaatatatatattattttagcagttcaaaaaaaaaaaaaaaacactgtggatctatacttatacataatgtgaagaaaaatattttcataaaggcttatggtaccaaataagtgcttgtaaacaaaaaaaatactgtccaagggttcattcttatagaaacaacctttctgtcttcttgagctttctggatagatacatagatacatacgaatcaatttctgggccttaattcctgaattttagagaattctcaatattctaactttaagatatatgatcatgcttttctgttgaatgatttttgtgtttgttttcttgctggaggacatttattctctaaatgggtatcttgctctcgttgcctctttaataatatttcttctttaatcctccctccccaacacacaacacgctgttttctagtactctatgaagcaccgacaccgacacggacatcggacacgacacggatacggacacgtggacacctgtaatgtccaaaatatagaacgtaatacgggtgtcgtgtcggtgtcggacactaacacggacgcgtgtcggacaccggacacggcaaagggctgaagtgtccgtgcttcatagctagtacttcatcttgagtcactaaataataagggtaataagttataaaaagaggtgatactaatataagtttcaaaagaatatatatgctcgtaatccttattttcttcttgaagttgaagaatattggccttgctgtcttctttgtgttgcagttatgggttggtcccgggagtaaggcagctgaagagaaagagttttttgatagccaccttgctccattctacagaatagaacaggtttcaagtggctggaaattaattttacttttctttctagtttttaaatcccaggtgtgggttctggttcctgaaatttaagctcctttttatgaaaataatttatttaccatccctgttcattgccatttttgccttttacccccccccccccccccccacacacacacacacagaca

SEQ ID NO: 7989 - DNA, 1067 bp, Glycine max
  Gm_smallRNAprecursor_822
ctctcctgtgttatcttgtagtacctctggtactagttatcgtttaatatatatattattttagcagttcaaaaaaaaaaaaaaaacactgtggatctatacttatacataatgtgaagaaaaatattttcataaaggcttatggtaccaaataagtgcttgtaaacaaaaaaaatactgtccaagggttcattcttatagaaacaacctttctgtcttcttgagctttctggatagatacatagatacatacgaatcaatttctgggccttaattcctgaattttagagaattctcaatattctaactttaagatatatgatcatgcttttctgttgaatgatttttgtgtttgttttcttgctggaggacatttattctctaaatgggtatcttgctctcgttgcctctttaataatatttcttctttaatcctccctccccaacacacaacacgctgttttctagtactctatgaagcaccgacaccgacacggacatcggacacgacacggatacggacacgtggacacctgtaatgtccaaaatatagaacgtaatacgggtgtcgtgtcggtgtcggacactaacacggacgcgtgtcggacaccggacacggcaaagggctgaagtgtccgtgcttcatagctagtacttcatcttgagtcactaaataataagggtaataagttataaaaagaggtgatactaatataagtttcaaaagaatatatatgctcgtaatccttattttcttcttgaagttgaagaatattggccttgctgtcttctttgtgttgcagttatgggttggtcccgggagtaaggcagctgaagagaaagagttttttgatagccaccttgctccattctacagaatagaacaggtttcaagtggctggaaattaattttacttttctttctagtttttaaatcccaggtgtgggttctggttcctgaaatttaagctcctttttatgaaaataatttatttaccatccctgttcattgccatttttgccttttacccccccccccccccccccacacacacacacacagacac

SEQ ID NO: 7990 - DNA, 1059 bp, Glycine max
  Gm_smallRNAprecursor_823
tctcctgtgttatcttgtagtacctctggtactagttatcgtttaatatatatattattttagcagttcaaaaaaaaaaaaaaaacactgtggatctatacttatacataatgtgaagaaaaatattttcataaaggcttatggtaccaaataagtgcttgtaaacaaaaaaaatactgtccaagggttcattcttatagaaacaacctttctgtcttcttgagctttctggatagatacatagatacatacgaatcaatttctgggccttaattcctgaattttagagaattctcaatattctaactttaagatatatgatcatgcttttctgttgaatgatttttgtgtttgttttcttgctggaggacatttattctctaaatgggtatcttgctctcgttgcctctttaataatatttcttctttaatcctccctccccaacacacaacacgctgttttctagtactctatgaagcaccgacaccgacacggacatcggacacgacacggatacggacacgtggacacctgtaatgtccaaaatatagaacgtaatacgggtgtcgtgtcggtgtcggacactaacacggacgcgtgtcggacaccggacacggcaaagggctgaagtgtccgtgcttcatagctagtacttcatcttgagtcactaaataataagggtaataagttataaaaagaggtgatactaatataagtttcaaaagaatatatatgctcgtaatccttattttcttcttgaagttgaagaatattggccttgctgtcttctttgtgttgcagttatgggttggtcccgggagtaaggcagctgaagagaaagagttttttgatagccaccttgctccattctacagaatagaacaggtttcaagtggctggaaattaattttacttttctttctagtttttaaatcccaggtgtgggttctggttcctgaaatttaagctcctttttatgaaaataatttatttaccatccctgttcattgccatttttgccttttacccccccccccccccccccacacacacacaca

SEQ ID NO: 7991 - DNA, 1064 bp, Glycine max
  Gm_smallRNAprecursor_824
tctcctgtgttatcttgtagtacctctggtactagttatcgtttaatatatatattattttagcagttcaaaaaaaaaaaaaaaacactgtggatctatacttatacataatgtgaagaaaaatattttcataaaggcttatggtaccaaataagtgcttgtaaacaaaaaaaatactgtccaagggttcattcttatagaaacaacctttctgtcttcttgagctttctggatagatacatagatacatacgaatcaatttctgggccttaattcctgaattttagagaattctcaatattctaactttaagatatatgatcatgcttttctgttgaatgatttttgtgtttgttttcttgctggaggacatttattctctaaatgggtatcttgctctcgttgcctctttaataatatttcttctttaatcctccctccccaacacacaacacgctgttttctagtactctatgaagcaccgacaccgacacggacatcggacacgacacggatacggacacgtggacacctgtaatgtccaaaatatagaacgtaatacgggtgtcgtgtcggtgtcggacactaacacggacgcgtgtcggacaccggacacggcaaagggctgaagtgtccgtgcttcatagctagtacttcatcttgagtcactaaataataagggtaataagttataaaaagaggtgatactaatataagtttcaaaagaatatatatgctcgtaatccttattttcttcttgaagttgaagaatattggccttgctgtcttctttgtgttgcagttatgggttggtcccgggagtaaggcagctgaagagaaagagttttttgatagccaccttgctccattctacagaatagaacaggtttcaagtggctggaaattaattttacttttctttctagtttttaaatcccaggtgtgggttctggttcctgaaatttaagctcctttttatgaaaataatttatttaccatccctgttcattgccatttttgccttttacccccccccccccccccccacacacacacacacagac

SEQ ID NO: 7992 - DNA, 1065 bp, Glycine max
  Gm_smallRNAprecursor_825
tctcctgtgttatcttgtagtacctctggtactagttatcgtttaatatatatattattttagcagttcaaaaaaaaaaaaaaaacactgtggatctatacttatacataatgtgaagaaaaatattttcataaaggcttatggtaccaaataagtgcttgtaaacaaaaaaaatactgtccaagggttcattcttatagaaacaacctttctgtcttcttgagctttctggatagatacatagatacatacgaatcaatttctgggccttaattcctgaattttagagaattctcaatattctaactttaagatatatgatcatgcttttctgttgaatgatttttgtgtttgttttcttgctggaggacatttattctctaaatgggtatcttgctctcgttgcctctttaataatatttcttctttaatcctccctccccaacacacaacacgctgttttctagtactctatgaagcaccgacaccgacacggacatcggacacgacacggatacggacacgtggacacctgtaatgtccaaaatatagaacgtaatacgggtgtcgtgtcggtgtcggacactaacacggacgcgtgtcggacaccggacacggcaaagggctgaagtgtccgtgcttcatagctagtacttcatcttgagtcactaaataataagggtaataagttataaaaagaggtgatactaatataagtttcaaaagaatatatatgctcgtaatccttattttcttcttgaagttgaagaatattggccttgctgtcttctttgtgttgcagttatgggttggtcccgggagtaaggcagctgaagagaaagagttttttgatagccaccttgctccattctacagaatagaacaggtttcaagtggctggaaattaattttacttttctttctagtttttaaatcccaggtgtgggttctggttcctgaaatttaagctcctttttatgaaaataatttatttaccatccctgttcattgccatttttgccttttacccccccccccccccccccacacacacacacacagaca

SEQ ID NO: 7993 - DNA, 1066 bp, Glycine max
  Gm_smallRNAprecursor_826
tctcctgtgttatcttgtagtacctctggtactagttatcgtttaatatatatattattttagcagttcaaaaaaaaaaaaaaaacactgtggatctatacttatacataatgtgaagaaaaatattttcataaaggcttatggtaccaaataagtgcttgtaaacaaaaaaaatactgtccaagggttcattcttatagaaacaacctttctgtcttcttgagctttctggatagatacatagatacatacgaatcaatttctgggccttaattcctgaattttagagaattctcaatattctaactttaagatatatgatcatgcttttctgttgaatgatttttgtgtttgttttcttgctggaggacatttattctctaaatgggtatcttgctctcgttgcctctttaataatatttcttctttaatcctccctccccaacacacaacacgctgttttctagtactctatgaagcaccgacaccgacacggacatcggacacgacacggatacggacacgtggacacctgtaatgtccaaaatatagaacgtaatacgggtgtcgtgtcggtgtcggacactaacacggacgcgtgtcggacaccggacacggcaaagggctgaagtgtccgtgcttcatagctagtacttcatcttgagtcactaaataataagggtaataagttataaaaagaggtgatactaatataagtttcaaaagaatatatatgctcgtaatccttattttcttcttgaagttgaagaatattggccttgctgtcttctttgtgttgcagttatgggttggtcccgggagtaaggcagctgaagagaaagagttttttgatagccaccttgctccattctacagaatagaacaggtttcaagtggctggaaattaattttacttttctttctagtttttaaatcccaggtgtgggttctggttcctgaaatttaagctcctttttatgaaaataatttatttaccatccctgttcattgccatttttgccttttacccccccccccccccccccacacacacacacacagacac

SEQ ID NO: 7994 - DNA, 1093 bp, Glycine max
  Gm_smallRNAprecursor_827
tctcctgtgttatcttgtagtacctctggtactagttatcgtttaatatatatattattttagcagttcaaaaaaaaaaaaaaaacactgtggatctatacttatacataatgtgaagaaaaatattttcataaaggcttatggtaccaaataagtgcttgtaaacaaaaaaaatactgtccaagggttcattcttatagaaacaacctttctgtcttcttgagctttctggatagatacatagatacatacgaatcaatttctgggccttaattcctgaattttagagaattctcaatattctaactttaagatatatgatcatgcttttctgttgaatgatttttgtgtttgttttcttgctggaggacatttattctctaaatgggtatcttgctctcgttgcctctttaataatatttcttctttaatcctccctccccaacacacaacacgctgttttctagtactctatgaagcaccgacaccgacacggacatcggacacgacacggatacggacacgtggacacctgtaatgtccaaaatatagaacgtaatacgggtgtcgtgtcggtgtcggacactaacacggacgcgtgtcggacaccggacacggcaaagggctgaagtgtccgtgcttcatagctagtacttcatcttgagtcactaaataataagggtaataagttataaaaagaggtgatactaatataagtttcaaaagaatatatatgctcgtaatccttattttcttcttgaagttgaagaatattggccttgctgtcttctttgtgttgcagttatgggttggtcccgggagtaaggcagctgaagagaaagagttttttgatagccaccttgctccattctacagaatagaacaggtttcaagtggctggaaattaattttacttttctttctagtttttaaatcccaggtgtgggttctggttcctgaaatttaagctcctttttatgaaaataatttatttaccatccctgttcattgccatttttgccttttacccccccccccccccccccacacacacacacacagacacacagacaccaaaaaaaagagaaataaa

SEQ ID NO: 7995 - DNA, 1094 bp, Glycine max
  Gm_smallRNAprecursor_828
tctcctgtgttatcttgtagtacctctggtactagttatcgtttaatatatatattattttagcagttcaaaaaaaaaaaaaaaacactgtggatctatacttatacataatgtgaagaaaaatattttcataaaggcttatggtaccaaataagtgcttgtaaacaaaaaaaatactgtccaagggttcattcttatagaaacaacctttctgtcttcttgagctttctggatagatacatagatacatacgaatcaatttctgggccttaattcctgaattttagagaattctcaatattctaactttaagatatatgatcatgcttttctgttgaatgatttttgtgtttgttttcttgctggaggacatttattctctaaatgggtatcttgctctcgttgcctctttaataatatttcttctttaatcctccctccccaacacacaacacgctgttttctagtactctatgaagcaccgacaccgacacggacatcggacacgacacggatacggacacgtggacacctgtaatgtccaaaatatagaacgtaatacgggtgtcgtgtcggtgtcggacactaacacggacgcgtgtcggacaccggacacggcaaagggctgaagtgtccgtgcttcatagctagtacttcatcttgagtcactaaataataagggtaataagttataaaaagaggtgatactaatataagtttcaaaagaatatatatgctcgtaatccttattttcttcttgaagttgaagaatattggccttgctgtcttctttgtgttgcagttatgggttggtcccgggagtaaggcagctgaagagaaagagttttttgatagccaccttgctccattctacagaatagaacaggtttcaagtggctggaaattaattttacttttctttctagtttttaaatcccaggtgtgggttctggttcctgaaatttaagctcctttttatgaaaataatttatttaccatccctgttcattgccatttttgccttttacccccccccccccccccccacacacacacacacagacacacagacaccaaaaaaaagagaaataaat

SEQ ID NO: 7996 - DNA, 1094 bp, Glycine max; identical to SEQ ID NO: 7995
  Gm_smallRNAprecursor_829

SEQ ID NO: 7997 - DNA, 1053 bp, Glycine max
  Gm_smallRNAprecursor_830
atcttgtagtacctctggtactagttatcgtttaatatatatattattttagcagttcaaaaaaaaaaaaaaaacactgtggatctatacttatacataatgtgaagaaaaatattttcataaaggcttatggtaccaaataagtgcttgtaaacaaaaaaaatactgtccaagggttcattcttatagaaacaacctttctgtcttcttgagctttctggatagatacatagatacatacgaatcaatttctgggccttaattcctgaattttagagaattctcaatattctaactttaagatatatgatcatgcttttctgttgaatgatttttgtgtttgttttcttgctggaggacatttattctctaaatgggtatcttgctctcgttgcctctttaataatatttcttctttaatcctccctccccaacacacaacacgctgttttctagtactctatgaagcaccgacaccgacacggacatcggacacgacacggatacggacacgtggacacctgtaatgtccaaaatatagaacgtaatacgggtgtcgtgtcggtgtcggacactaacacggacgcgtgtcggacaccggacacggcaaagggctgaagtgtccgtgcttcatagctagtacttcatcttgagtcactaaataataagggtaataagttataaaaagaggtgatactaatataagtttcaaaagaatatatatgctcgtaatccttattttcttcttgaagttgaagaatattggccttgctgtcttctttgtgttgcagttatgggttggtcccgggagtaaggcagctgaagagaaagagttttttgatagccaccttgctccattctacagaatagaacaggtttcaagtggctggaaattaattttacttttctttctagtttttaaatcccaggtgtgggttctggttcctgaaatttaagctcctttttatgaaaataatttatttaccatccctgttcattgccatttttgccttttacccccccccccccccccccacacacacacacacagac

SEQ ID NO: 7998 - DNA, 1054 bp, Glycine max
  Gm_smallRNAprecursor_831
atcttgtagtacctctggtactagttatcgtttaatatatatattattttagcagttcaaaaaaaaaaaaaaaacactgtggatctatacttatacataatgtgaagaaaaatattttcataaaggcttatggtaccaaataagtgcttgtaaacaaaaaaaatactgtccaagggttcattcttatagaaacaacctttctgtcttcttgagctttctggatagatacatagatacatacgaatcaatttctgggccttaattcctgaattttagagaattctcaatattctaactttaagatatatgatcatgcttttctgttgaatgatttttgtgtttgttttcttgctggaggacatttattctctaaatgggtatcttgctctcgttgcctctttaataatatttcttctttaatcctccctccccaacacacaacacgctgttttctagtactctatgaagcaccgacaccgacacggacatcggacacgacacggatacggacacgtggacacctgtaatgtccaaaatatagaacgtaatacgggtgtcgtgtcggtgtcggacactaacacggacgcgtgtcggacaccggacacggcaaagggctgaagtgtccgtgcttcatagctagtacttcatcttgagtcactaaataataagggtaataagttataaaaagaggtgatactaatataagtttcaaaagaatatatatgctcgtaatccttattttcttcttgaagttgaagaatattggccttgctgtcttctttgtgttgcagttatgggttggtcccgggagtaaggcagctgaagagaaagagttttttgatagccaccttgctccattctacagaatagaacaggtttcaagtggctggaaattaattttacttttctttctagtttttaaatcccaggtgtgggttctggttcctgaaatttaagctcctttttatgaaaataatttatttaccatccctgttcattgccatttttgccttttacccccccccccccccccccacacacacacacacagaca

SEQ ID NO: 7999 - DNA, 1055 bp, Glycine max
  Gm_smallRNAprecursor_832
atcttgtagtacctctggtactagttatcgtttaatatatatattattttagcagttcaaaaaaaaaaaaaaaacactgtggatctatacttatacataatgtgaagaaaaatattttcataaaggcttatggtaccaaataagtgcttgtaaacaaaaaaaatactgtccaagggttcattcttatagaaacaacctttctgtcttcttgagctttctggatagatacatagatacatacgaatcaatttctgggccttaattcctgaattttagagaattctcaatattctaactttaagatatatgatcatgcttttctgttgaatgatttttgtgtttgttttcttgctggaggacatttattctctaaatgggtatcttgctctcgttgcctctttaataatatttcttctttaatcctccctccccaacacacaacacgctgttttctagtactctatgaagcaccgacaccgacacggacatcggacacgacacggatacggacacgtggacacctgtaatgtccaaaatatagaacgtaatacgggtgtcgtgtcggtgtcggacactaacacggacgcgtgtcggacaccggacacggcaaagggctgaagtgtccgtgcttcatagctagtacttcatcttgagtcactaaataataagggtaataagttataaaaagaggtgatactaatataagtttcaaaagaatatatatgctcgtaatccttattttcttcttgaagttgaagaatattggccttgctgtcttctttgtgttgcagttatgggttggtcccgggagtaaggcagctgaagagaaagagttttttgatagccaccttgctccattctacagaatagaacaggtttcaagtggctggaaattaattttacttttctttctagtttttaaatcccaggtgtgggttctggttcctgaaatttaagctcctttttatgaaaataatttatttaccatccctgttcattgccatttttgccttttacccccccccccccccccccacacacacacacacagacac

SEQ ID NO: 8000 - DNA, 1082 bp, Glycine max
  Gm_smallRNAprecursor_833
atcttgtagtacctctggtactagttatcgtttaatatatatattattttagcagttcaaaaaaaaaaaaaaaacactgtggatctatacttatacataatgtgaagaaaaatattttcataaaggcttatggtaccaaataagtgcttgtaaacaaaaaaaatactgtccaagggttcattcttatagaaacaacctttctgtcttcttgagctttctggatagatacatagatacatacgaatcaatttctgggccttaattcctgaattttagagaattctcaatattctaactttaagatatatgatcatgcttttctgttgaatgatttttgtgtttgttttcttgctggaggacatttattctctaaatgggtatcttgctctcgttgcctctttaataatatttcttctttaatcctccctccccaacacacaacacgctgttttctagtactctatgaagcaccgacaccgacacggacatcggacacgacacggatacggacacgtggacacctgtaatgtccaaaatatagaacgtaatacgggtgtcgtgtcggtgtcggacactaacacggacgcgtgtcggacaccggacacggcaaagggctgaagtgtccgtgcttcatagctagtacttcatcttgagtcactaaataataagggtaataagttataaaaagaggtgatactaatataagtttcaaaagaatatatatgctcgtaatccttattttcttcttgaagttgaagaatattggccttgctgtcttctttgtgttgcagttatgggttggtcccgggagtaaggcagctgaagagaaagagttttttgatagccaccttgctccattctacagaatagaacaggtttcaagtggctggaaattaattttacttttctttctagtttttaaatcccaggtgtgggttctggttcctgaaatttaagctcctttttatgaaaataatttatttaccatccctgttcattgccatttttgccttttacccccccccccccccccccacacacacacacacagacacacagacaccaaaaaaaagagaaataaa

SEQ ID NO: 8001 - DNA, 1088 bp, Glycine max
  Gm_smallRNAprecursor_834
atcttgtagtacctctggtactagttatcgtttaatatatatattattttagcagttcaaaaaaaaaaaaaaaacactgtggatctatacttatacataatgtgaagaaaaatattttcataaaggcttatggtaccaaataagtgcttgtaaacaaaaaaaatactgtccaagggttcattcttatagaaacaacctttctgtcttcttgagctttctggatagatacatagatacatacgaatcaatttctgggccttaattcctgaattttagagaattctcaatattctaactttaagatatatgatcatgcttttctgttgaatgatttttgtgtttgttttcttgctggaggacatttattctctaaatgggtatcttgctctcgttgcctctttaataatatttcttctttaatcctccctccccaacacacaacacgctgttttctagtactctatgaagcaccgacaccgacacggacatcggacacgacacggatacggacacgtggacacctgtaatgtccaaaatatagaacgtaatacgggtgtcgtgtcggtgtcggacactaacacggacgcgtgtcggacaccggacacggcaaagggctgaagtgtccgtgcttcatagctagtacttcatcttgagtcactaaataataagggtaataagttataaaaagaggtgatactaatataagtttcaaaagaatatatatgctcgtaatccttattttcttcttgaagttgaagaatattggccttgctgtcttctttgtgttgcagttatgggttggtcccgggagtaaggcagctgaagagaaagagttttttgatagccaccttgctccattctacagaatagaacaggtttcaagtggctggaaattaattttacttttctttctagtttttaaatcccaggtgtgggttctggttcctgaaatttaagctcctttttatgaaaataatttatttaccatccctgttcattgccatttttgccttttacccccccccccccccccccacacacacacacacagacacacagacaccaaaaaaaagagaaataaataaagg

SEQ ID NO: 8002 - DNA, 1088 bp, Glycine max; identical to SEQ ID NO: 8001
  Gm_smallRNAprecursor_835

SEQ ID NO: 8003 - DNA, 1089 bp, Glycine max
  Gm_smallRNAprecursor_836
atcttgtagtacctctggtactagttatcgtttaatatatatattattttagcagttcaaaaaaaaaaaaaaaacactgtggatctatacttatacataatgtgaagaaaaatattttcataaaggcttatggtaccaaataagtgcttgtaaacaaaaaaaatactgtccaagggttcattcttatagaaacaacctttctgtcttcttgagctttctggatagatacatagatacatacgaatcaatttctgggccttaattcctgaattttagagaattctcaatattctaactttaagatatatgatcatgcttttctgttgaatgatttttgtgtttgttttcttgctggaggacatttattctctaaatgggtatcttgctctcgttgcctctttaataatatttcttctttaatcctccctccccaacacacaacacgctgttttctagtactctatgaagcaccgacaccgacacggacatcggacacgacacggatacggacacgtggacacctgtaatgtccaaaatatagaacgtaatacgggtgtcgtgtcggtgtcggacactaacacggacgcgtgtcggacaccggacacggcaaagggctgaagtgtccgtgcttcatagctagtacttcatcttgagtcactaaataataagggtaataagttataaaaagaggtgatactaatataagtttcaaaagaatatatatgctcgtaatccttattttcttcttgaagttgaagaatattggccttgctgtcttctttgtgttgcagttatgggttggtcccgggagtaaggcagctgaagagaaagagttttttgatagccaccttgctccattctacagaatagaacaggtttcaagtggctggaaattaattttacttttctttctagtttttaaatcccaggtgtgggttctggttcctgaaatttaagctcctttttatgaaaataatttatttaccatccctgttcattgccatttttgccttttacccccccccccccccccccacacacacacacacagacacacagacaccaaaaaaaagagaaataaataaagga

SEQ ID NO: 8004 - DNA, 1089 bp, Glycine max; identical to SEQ ID NO: 8003
  Gm_smallRNAprecursor_837

SEQ ID NO: 8005 - DNA, 1090 bp, Glycine max
  Gm_smallRNAprecursor_838
atcttgtagtacctctggtactagttatcgtttaatatatatattattttagcagttcaaaaaaaaaaaaaaaacactgtggatctatacttatacataatgtgaagaaaaatattttcataaaggcttatggtaccaaataagtgcttgtaaacaaaaaaaatactgtccaagggttcattcttatagaaacaacctttctgtcttcttgagctttctggatagatacatagatacatacgaatcaatttctgggccttaattcctgaattttagagaattctcaatattctaactttaagatatatgatcatgcttttctgttgaatgatttttgtgtttgttttcttgctggaggacatttattctctaaatgggtatcttgctctcgttgcctctttaataatatttcttctttaatcctccctccccaacacacaacacgctgttttctagtactctatgaagcaccgacaccgacacggacatcggacacgacacggatacggacacgtggacacctgtaatgtccaaaatatagaacgtaatacgggtgtcgtgtcggtgtcggacactaacacggacgcgtgtcggacaccggacacggcaaagggctgaagtgtccgtgcttcatagctagtacttcatcttgagtcactaaataataagggtaataagttataaaaagaggtgatactaatataagtttcaaaagaatatatatgctcgtaatccttattttcttcttgaagttgaagaatattggccttgctgtcttctttgtgttgcagttatgggttggtcccgggagtaaggcagctgaagagaaagagttttttgatagccaccttgctccattctacagaatagaacaggtttcaagtggctggaaattaattttacttttctttctagtttttaaatcccaggtgtgggttctggttcctgaaatttaagctcctttttatgaaaataatttatttaccatccctgttcattgccatttttgccttttacccccccccccccccccccacacacacacacacagacacacagacaccaaaaaaaagagaaataaataaaggaa

SEQ ID NO: 8006 - DNA, 1033 bp, Glycine max
  Gm_smallRNAprecursor_839
agcagttcaaaaaaaaaaaaaaaacactgtggatctatacttatacataatgtgaagaaaaatattttcataaaggcttatggtaccaaataagtgcttgtaaacaaaaaaaatactgtccaagggttcattcttatagaaacaacctttctgtcttcttgagctttctggatagatacatagatacatacgaatcaatttctgggccttaattcctgaattttagagaattctcaatattctaactttaagatatatgatcatgcttttctgttgaatgatttttgtgtttgttttcttgctggaggacatttattctctaaatgggtatcttgctctcgttgcctctttaataatatttcttctttaatcctccctccccaacacacaacacgctgttttctagtactctatgaagcaccgacaccgacacggacatcggacacgacacggatacggacacgtggacacctgtaatgtccaaaatatagaacgtaatacgggtgtcgtgtcggtgtcggacactaacacggacgcgtgtcggacaccggacacggcaaagggctgaagtgtccgtgcttcatagctagtacttcatcttgagtcactaaataataagggtaataagttataaaaagaggtgatactaatataagtttcaaaagaatatatatgctcgtaatccttattttcttcttgaagttgaagaatattggccttgctgtcttctttgtgttgcagttatgggttggtcccgggagtaaggcagctgaagagaaagagttttttgatagccaccttgctccattctacagaatagaacaggtttcaagtggctggaaattaattttacttttctttctagtttttaaatcccaggtgtgggttctggttcctgaaatttaagctcctttttatgaaaataatttatttaccatccctgttcattgccatttttgccttttacccccccccccccccccccacacacacacacacagacacacagacaccaaaaaaaagagaaataaat

SEQ ID NO: 8007 - DNA, 1038 bp, Glycine max
  Gm_smallRNAprecursor_840
gttcaaaaaaaaaaaaaaaacactgtggatctatacttatacataatgtgaagaaaaatattttcataaaggcttatggtaccaaataagtgcttgtaaacaaaaaaaatactgtccaagggttcattcttatagaaacaacctttctgtcttcttgagctttctggatagatacatagatacatacgaatcaatttctgggccttaattcctgaattttagagaattctcaatattctaactttaagatatatgatcatgcttttctgttgaatgatttttgtgtttgttttcttgctggaggacatttattctctaaatgggtatcttgctctcgttgcctctttaataatatttcttctttaatcctccctccccaacacacaacacgctgttttctagtactctatgaagcaccgacaccgacacggacatcggacacgacacggatacggacacgtggacacctgtaatgtccaaaatatagaacgtaatacgggtgtcgtgtcggtgtcggacactaacacggacgcgtgtcggacaccggacacggcaaagggctgaagtgtccgtgcttcatagctagtacttcatcttgagtcactaaataataagggtaataagttataaaaagaggtgatactaatataagtttcaaaagaatatatatgctcgtaatccttattttcttcttgaagttgaagaatattggccttgctgtcttctttgtgttgcagttatgggttggtcccgggagtaaggcagctgaagagaaagagttttttgatagccaccttgctccattctacagaatagaacaggtttcaagtggctggaaattaattttacttttctttctagtttttaaatcccaggtgtgggttctggttcctgaaatttaagctcctttttatgaaaataatttatttaccatccctgttcattgccatttttgccttttacccccccccccccccccccacacacacacacacagacacacagacaccaaaaaaaagagaaataaataaaggaaga

SEQ ID NO: 8008 - DNA, 1034 bp, Glycine max
  Gm_smallRNAprecursor_841
ttcaaaaaaaaaaaaaaaacactgtggatctatacttatacataatgtgaagaaaaatattttcataaaggcttatggtaccaaataagtgcttgtaaacaaaaaaaatactgtccaagggttcattcttatagaaacaacctttctgtcttcttgagctttctggatagatacatagatacatacgaatcaatttctgggccttaattcctgaattttagagaattctcaatattctaactttaagatatatgatcatgcttttctgttgaatgatttttgtgtttgttttcttgctggaggacatttattctctaaatgggtatcttgctctcgttgcctctttaataatatttcttctttaatcctccctccccaacacacaacacgctgttttctagtactctatgaagcaccgacaccgacacggacatcggacacgacacggatacggacacgtggacacctgtaatgtccaaaatatagaacgtaatacgggtgtcgtgtcggtgtcggacactaacacggacgcgtgtcggacaccggacacggcaaagggctgaagtgtccgtgcttcatagctagtacttcatcttgagtcactaaataataagggtaataagttataaaaagaggtgatactaatataagtttcaaaagaatatatatgctcgtaatccttattttcttcttgaagttgaagaatattggccttgctgtcttctttgtgttgcagttatgggttggtcccgggagtaaggcagctgaagagaaagagttttttgatagccaccttgctccattctacagaatagaacaggtttcaagtggctggaaattaattttacttttctttctagtttttaaatcccaggtgtgggttctggttcctgaaatttaagctcctttttatgaaaataatttatttaccatccctgttcattgccatttttgccttttacccccccccccccccccccacacacacacacacagacacacagacaccaaaaaaaagagaaataaataaagga

SEQ ID NO: 8009 - DNA, 1036 bp, Glycine max
  Gm_smallRNAprecursor_842
ttcaaaaaaaaaaaaaaaacactgtggatctatacttatacataatgtgaagaaaaatattttcataaaggcttatggtaccaaataagtgcttgtaaacaaaaaaaatactgtccaagggttcattcttatagaaacaacctttctgtcttcttgagctttctggatagatacatagatacatacgaatcaatttctgggccttaattcctgaattttagagaattctcaatattctaactttaagatatatgatcatgcttttctgttgaatgatttttgtgtttgttttcttgctggaggacatttattctctaaatgggtatcttgctctcgttgcctctttaataatatttcttctttaatcctccctccccaacacacaacacgctgttttctagtactctatgaagcaccgacaccgacacggacatcggacacgacacggatacggacacgtggacacctgtaatgtccaaaatatagaacgtaatacgggtgtcgtgtcggtgtcggacactaacacggacgcgtgtcggacaccggacacggcaaagggctgaagtgtccgtgcttcatagctagtacttcatcttgagtcactaaataataagggtaataagttataaaaagaggtgatactaatataagtttcaaaagaatatatatgctcgtaatccttattttcttcttgaagttgaagaatattggccttgctgtcttctttgtgttgcagttatgggttggtcccgggagtaaggcagctgaagagaaagagttttttgatagccaccttgctccattctacagaatagaacaggtttcaagtggctggaaattaattttacttttctttctagtttttaaatcccaggtgtgggttctggttcctgaaatttaagctcctttttatgaaaataatttatttaccatccctgttcattgccatttttgccttttacccccccccccccccccccacacacacacacacagacacacagacaccaaaaaaaagagaaataaataaaggaag

SEQ ID NO: 8010 - DNA, 1037 bp, Glycine max
  Gm_smallRNAprecursor_843
ttcaaaaaaaaaaaaaaaacactgtggatctatacttatacataatgtgaagaaaaatattttcataaaggcttatggtaccaaataagtgcttgtaaacaaaaaaaatactgtccaagggttcattcttatagaaacaacctttctgtcttcttgagctttctggatagatacatagatacatacgaatcaatttctgggccttaattcctgaattttagagaattctcaatattctaactttaagatatatgatcatgcttttctgttgaatgatttttgtgtttgttttcttgctggaggacatttattctctaaatgggtatcttgctctcgttgcctctttaataatatttcttctttaatcctccctccccaacacacaacacgctgttttctagtactctatgaagcaccgacaccgacacggacatcggacacgacacggatacggacacgtggacacctgtaatgtccaaaatatagaacgtaatacgggtgtcgtgtcggtgtcggacactaacacggacgcgtgtcggacaccggacacggcaaagggctgaagtgtccgtgcttcatagctagtacttcatcttgagtcactaaataataagggtaataagttataaaaagaggtgatactaatataagtttcaaaagaatatatatgctcgtaatccttattttcttcttgaagttgaagaatattggccttgctgtcttctttgtgttgcagttatgggttggtcccgggagtaaggcagctgaagagaaagagttttttgatagccaccttgctccattctacagaatagaacaggtttcaagtggctggaaattaattttacttttctttctagtttttaaatcccaggtgtgggttctggttcctgaaatttaagctcctttttatgaaaataatttatttaccatccctgttcattgccatttttgccttttacccccccccccccccccccacacacacacacacagacacacagacaccaaaaaaaagagaaataaataaaggaaga

SEQ ID NO: 8011 - DNA, 1087 bp, Glycine max
  Gm_smallRNAprecursor_844
gttgcagggataggaatagggcaggtcagaccaggctttaaaaggcctgacgttagtctacgatgaatttttgaggtctgagtcttgcctatagcctatcaaagacttttattttggttcggtctcacctttttaaaagcctagtctgtcctgataatctctttaaaagtcttctttagattaaatctttaatatttctttgctttggggagtaggaacgtgataggaaagttaaagaaaaactaaacattaataaataggaaagtcaataaaaataacgagaaatataaaagacacatgactcacacctaaattgtaattaaagtgttacttgattataggaattgaagttatggaacacggatgtgtaatcaaagtctgctagtttaaaaaaaataattaattatacccaaaaaataatattaatataaattggtaccaaaaaataatataaatatatataggccggcctatcaggtttataagactttttaataaacctaagtctgatctatttaatttaatagacttttaaaaaagtctgagcctaaccttttaattaaataagttaatttagactaagttttatataggtcagatcataggtctctgtagaccggccttctttatttccactcctaattggttatacactttgttgtataatttattagacaagtattattgctctttaagtaatttaaaatttataataataaaaaaattgaaggacgacaaaaattaaatataattatatttacatatagtaattaaaacatattttaactttttcttaaatttccttttcagtttaatatgtttaaatataatttttttatatataattacttacaatattaataatcaattattgtcacaatcaattattaaatgaatttattttttaactaagcctaaaaaggcttagcctactttttgttgaggtggatcattgtcaatgcgcttacgcatgtacagtaattactaattagtgaacggagcaaagaaatcctttttaacaaataggtcggccgacgaatcttctttcaatttctgatgaattaaaaataatataaaaatttgtatg

SEQ ID NO: 8012 - DNA, 1174 bp, Glycine max
  Gm_smallRNAprecursor_845
tgatgaagagaactttgatattaagtttgattagatgttgcacttggagttgaagtatggtatgattcatcacttaattatttatgttactttctaaaactccatgaattattaattgatgatgttttaatttttacatgatgtagctattggcaagacctattgatgggtgttaggttgttgactattgttaatttgttatggttttatgtccatgtaacacatggtgtagtgttctattatatgttttgagattttgagttaattaacaaaggatgtgggtgtgacacctacatggagttttagggtgttgctaggtgcacccaacattattgttggtgcacccagcacttaatggtaaaagtcaaaaatgtccctgcttaaaaggcttatagatcaagttgatctgtatgcttaaaatatcaatatacggatcaacttgatccatatgcttaaaatatcaacatatggatcaatttgatccataaaaggcttacggatcaacttgatccgtaagccttttacagatcaagttgattcgtatgcttaaaatatcaacatacggatcaacttgatccataaaaggcttatggatcaacttgatctataatctttttatggatcaacttgatctgtatgcttaaaatatcaacatacagatcaacttgatctgtaaaaggcttacagatcaacttgatccgtaaggattttacggatcaagttgatccgtatgcttaaaatatcaacatatggatcaagttgatccgtaaaagacttacagatcaagttgatccataaagattttacggatcaagttgatctgtatgtttaaaatatcagcatatggatcaacttgatccgtacgcttaaaatatcaacatatgaatcaacttgattcgtaagtcttttacgaaccaccctctcacgcacacccagcacaaatgagggacagttttaacattttgaaaaaatgctggatgcacctagcaacaccctttgtttattcatggagagtacaattatttagttgggttgttttactttactcatgtcattcttggtgacttgggtaaacaagtattatgttcactttattgctagtactatataatattttgactttttaaaaagtgttataaaggcatcaatgataatttttactatgagatatgac

SEQ ID NO: 8013 - DNA, 1174 bp, Glycine max; identical to SEQ ID NO: 8012
  Gm_smallRNAprecursor_846

SEQ ID NO: 8014 - DNA, 1214 bp, Glycine max
  Gm_smallRNAprecursor_847
taggttgttgactattgttaatttgttatggttttatgtccatgtaacacatggtgtagtgttctattatatgttttgagattttgagttaattaacaaaggatgtgggtgtgacacctacatggagttttagggtgttgctaggtgcacccaacattattgttggtgcacccagcacttaatggtaaaagtcaaaaatgtccctgcttaaaaggcttatagatcaagttgatctgtatgcttaaaatatcaatatacggatcaacttgatccatatgcttaaaatatcaacatatggatcaatttgatccataaaaggcttacggatcaacttgatccgtaagccttttacagatcaagttgattcgtatgcttaaaatatcaacatacggatcaacttgatccataaaaggcttatggatcaacttgatctataatctttttatggatcaacttgatctgtatgcttaaaatatcaacatacagatcaacttgatctgtaaaaggcttacagatcaacttgatccgtaaggattttacggatcaagttgatccgtatgcttaaaatatcaacatatggatcaagttgatccgtaaaagacttacagatcaagttgatccataaagattttacggatcaagttgatctgtatgtttaaaatatcagcatatggatcaacttgatccgtacgcttaaaatatcaacatatgaatcaacttgattcgtaagtcttttacgaaccaccctctcacgcacacccagcacaaatgagggacagttttaacattttgaaaaaatgctggatgcacctagcaacaccctttgtttattcatggagagtacaattatttagttgggttgttttactttactcatgtcattcttggtgacttgggtaaacaagtattatgttcactttattgctagtactatataatattttgactttttaaaaagtgttataaaggcatcaatgataatttttactatgagatatgacatctatttataaatatgaaaacttgaaaatatgaatatgttagtaagtatgaaggctttatttagtaaatttatattataaaatggtcaacaattttatagcgacaaaaattgtaaaaaacgaactaactaaattgtaaaagattgatttgattcagtttaaattttattttaaatgaaaattagatcaaactaaattgcatattttttaaat

SEQ ID NO: 8015 - DNA, 1086 bp, Glycine max
  Gm_smallRNAprecursor_848
tcttcaaaagaacaaggtgagaatcaacctgttgacgtccaaccaccttcgactgatgctggcggcgctgaaacagaaactactccctctattgctgagatgggcaaccttgtcgaacaaccggacttaccacaagaacaccctaccgtcgaggtatcattcttaatatgattttaatcatagctaatacgaaactatttgttaaccttttccatgacaactcgaatcaggtacaacaaaatgtttctgtagaagaaataccctcatgtgctcgaacctctcctgctcctgagacggatgcagtgaatgttgaggaacagggtgaaggtcaaggtattggacccagcagtcctcaggggtcgagtcaaagaagttcatctgaagaacacttttctgatgaagaggccatacaagaggctgaagctggaggttcagacattttcccagcgtcttcgacatctaagctttccgctagcatagggatcgcagaggatacattcattcaaatgcaagacgaagaccctgctgcagcccttcgactcctgctgaacaccagtcaagccaacacctcaagtgaaaagaatcctggtgcttcgtcctcatctgatgctgatataacctctacagtacgccaagattgcctgcttttgaagttatcaatggaatacgcacgggcagacgtacttaaatccattgaagagaacccttctgctgcttttgggcacctgaactttttgaagaaattgcataacccccttacttctgatgagattctgggtaaagttatacaaatcgagtccattatcgatcaatttgcaaatactgtgcagaaaaaacgcgaaaatggcgccagactcgatgcccagaaacaggcacatatccttctgctcgagaaagcccgagcggctcaacgtgaagtcgagcgtctcaccaaagaagcgaaagaaggatcttctgagatcaaagcctgtgatgataacatctcctcctgggaggcaactattacaaatttgctgtctcaggtcgatgatctaaggcagaaaattgtaacagagcaggccaaacgcaaagaactccaggagaagg

SEQ ID NO: 8016 - DNA, 1110 bp, Glycine max
  Gm_smallRNAprecursor_849
tgatcaacatttggcaaagggactgcttcgatccattttgtaaagtaatcgataccaactataatataacgctggttcttagaagaggcaggcttgatttcaccaattaagtccaaagcccatcctctgaaaggccaaggtttgattatggagtgtaactcactagcaggtacatgctgtatccctgcatgcttttggcattcttgacagcctttagcaaattctatacagtcttttaacatcgaaggccaatacaaaccttgtcgaaataaaagccatttcattttatggcctgcttgatgtgatccacaagccccactgtgaacatgggaaactgccaagtatgcttctgattcacttagacattttagcaacactccttctgcagtctttttgaacaaatcattccccacaatcacgtaatttaaagccctatatttgatctttcgagccacattgcctattggattttccaaatattcaataatggactttctccaatcattatctaacatattgtcaatggccaaaatttgaattttttcctgaagatcattcatactttcatctttattattttgtggtgtacttgcccccacaagttttggcattggcaatttagtgcttaatggctctagtaacaccagtttatcttttatttcgatcaactgagttagtttttccttcgacattttgtaccctgaagctatttgggctaaatcatttgcttcttggttttctagtcgaggtatatgctcaatgttaatgtaatcgaaatgattcagaagagaactggccataacaaaatattttgctaagtgttcattaacacatttgtattcttgtgttaattgcttcactactaattctgaatcaccccttatgttaacatttcttgcccccaggctaattaaaatttcaaggcctgtaattagagcctcatactcagcctcattattagaacaaagccctttgattttatatttgaatttagttggaactttattgggggatattattaaaactccaattccagttccatatttgtgtttcgaaccatcgaaatacaaaatccaaggctctgtatcgacatagtcttgcggcatttcg

SEQ ID NO: 8017 - DNA, 1083 bp, Glycine max
  Gm_smallRNAprecursor_850
caaagggactgcttcgatccattttgtaaagtaatcgataccaactataatataacgctggttcttagaagaggcaggcttgatttcaccaattaagtccaaagcccatcctctgaaaggccaaggtttgattatggagtgtaactcactagcaggtacatgctgtatccctgcatgcttttggcattcttgacagcctttagcaaattctatacagtcttttaacatcgaaggccaatacaaaccttgtcgaaataaaagccatttcattttatggcctgcttgatgtgatccacaagccccactgtgaacatgggaaactgccaagtatgcttctgattcacttagacattttagcaacactccttctgcagtctttttgaacaaatcattccccacaatcacgtaatttaaagccctatatttgatctttcgagccacattgcctattggattttccaaatattcaataatggactttctccaatcattatctaacatattgtcaatggccaaaatttgaattttttcctgaagatcattcatactttcatctttattattttgtggtgtacttgcccccacaagttttggcattggcaatttagtgcttaatggctctagtaacaccagtttatcttttatttcgatcaactgagttagtttttccttcgacattttgtaccctgaagctatttgggctaaatcatttgcttcttggttttctagtcgaggtatatgctcaatgttaatgtaatcgaaatgattcagaagagaactggccataacaaaatattttgctaagtgttcattaacacatttgtattcttgtgttaattgcttcactactaattctgaatcaccccttatgttaacatttcttgcccccaggctaattaaaatttcaaggcctgtaattagagcctcatactcagcctcattattagaacaaagccctttgattttatatttgaatttagttggaactttattgggggatattattaaaactccaattccagttccatatttgtgtttcgaaccatcgaaatacaaaatccaaggctctgtatcgacatagtc

SEQ ID NO: 8018 - DNA, 1176 bp, Glycine max
  Gm_smallRNAprecursor_851
agccacaatttgacccttaacagatttcaaaggcttgtatgttaaagaatattctgttaaggctaaagcccattttccaattctactgtgtaaaataggttttgacaacatgtgtttaataatatcataatgagaatacacataaacatcaacaggctttatatattgcttaagttttgcacaagagaaatacagacaaagacaaagtttttctatggccgtatatctagtttctgcatcatttagtacacgactaagataataaattgcatgttctatgccatcatcatcttcctgagccaacatgctaccaatggtcttgtcagacgcagcaatatacaacttcatagtcttgtttcgactaggaggcactaacacaggaggcttgatcagatattctttaatttcatcgaaagccttttgatgctcttcattccatttgaatggttcatctttcttgagtcgaagtaatggcaaaaaaatctgagctttgccacttagattcgaaatgaatcgcctcaagaagttgatttttcctagcaaagactgaagctgttttttggtcgaaggaggctttgtctcaagaatagcctttgtcttattttgatttatctcaatgccttttttatgcaccacaaatcccaggaaatctcctgcacgcacacaaaaagcacactttaatggattcatttttaatccatgtttcctcattcgttcgaaagattgcctaagataatccaaatggctatcttctgaggaggatttgatgattatatcatcaatataaatttgcataaatgtgtcaataaaatcatgaaacatggaattcatggccctttgataagtggccccagcatttttcaacccaaagggcataaccacccattcataagtgcctaaagcaccagggcatcgaaatgctgttttcgacacatcattttcagcaataaatatttggttataaccagaataaccatctaacatgctcaaaaattcgaaaccagctgccgaatctaccaacatttccgctactggcatagcatattcatctttaggtgtagcattatttaaatccctaaaatctatgcatactctaagagttccattctttttaatgacagggactatatttgctaaccattcgacatacctggcagccctgatgaatttacacct

SEQ ID NO: 8019 - DNA, 1157 bp, Glycine max
  Gm_smallRNAprecursor_852
caattctactgtgtaaaataggttttgacaacatgtgtttaataatatcataatgagaatacacataaacatcaacaggctttatatattgcttaagttttgcacaagagaaatacagacaaagacaaagtttttctatggccgtatatctagtttctgcatcatttagtacacgactaagataataaattgcatgttctatgccatcatcatcttcctgagccaacatgctaccaatggtcttgtcagacgcagcaatatacaacttcatagtcttgtttcgactaggaggcactaacacaggaggcttgatcagatattctttaatttcatcgaaagccttttgatgctcttcattccatttgaatggttcatctttcttgagtcgaagtaatggcaaaaaaatctgagctttgccacttagattcgaaatgaatcgcctcaagaagttgatttttcctagcaaagactgaagctgttttttggtcgaaggaggctttgtctcaagaatagcctttgtcttattttgatttatctcaatgccttttttatgcaccacaaatcccaggaaatctcctgcacgcacacaaaaagcacactttaatggattcatttttaatccatgtttcctcattcgttcgaaagattgcctaagataatccaaatggctatcttctgaggaggatttgatgattatatcatcaatataaatttgcataaatgtgtcaataaaatcatgaaacatggaattcatggccctttgataagtggccccagcatttttcaacccaaagggcataaccacccattcataagtgcctaaagcaccagggcatcgaaatgctgttttcgacacatcattttcagcaataaatatttggttataaccagaataaccatctaacatgctcaaaaattcgaaaccagctgccgaatctaccaacatttccgctactggcatagcatattcatctttaggtgtagcattatttaaatccctaaaatctatgcatactctaagagttccattctttttaatgacagggactatatttgctaaccattcgacatacctggcagccctgatgaatttacacctcagcagcctttcgatctcttccttaatcttggacatgatttctggtgcgaatcttctt

SEQ ID NO: 8020 - DNA, 1039 bp, Glycine max
  Gm_smallRNAprecursor_853
atttctggtgcgaatcttcttggtagttgttttactggtctttttccctccttaataggtaatttcatttcgaccatttctctgcttaacccaggcatttcgtggtagtcccaagcaaaacagtctttaaactctctaagaagaggcaccagcttttcttttaaacttgaggtgatattggcactgatataagttggccttttaatcgagccatctccaatatcaacctcttccaaaggatcttgagcctgcatctttggcgcctcacttatgggatttttctcaaaacccagcggctcatcatcataaatacaatccagtcttcgatcctttgtttctttgttttcatgatcttcgatcttggcttcaactgccatattttgttgagattcagcctcaaaggccgtatttagtctattttcggccatataagccgtaattctggcccatgcagtggcctcagtcatattaatcttcgtatgtattccacccagttggtggaatgactccatcttcagagggaacagcatcaatttcctccctctcccatataaacccataggtaggatggagtttgacagagtggacaacattgtcactcgattcgacaacagcctccttgtcaccacaaggtgctatgttagccaactttttgtcaaaggtttgtgcagtaacattatcgacctctgacttatagaagctttgatccgcctctatattttccacaatcccatcctccctccagataatgagcttctggtgaagggtagatggcacagccccaactccatgaatccactcccttcctaatagcaagttaaaattagccttagactgtatcaccaggaaaagagttggtcgaactacactgcctacagcaacatctacttgaatggctcccaaagaatagccagttttaccctcataattcgaaagcacaatgttgtgggcagatagatctgtgtcatgtttcccgatcttgtagagcatagatcgaggcattaagttgacagccgctcctccatcaatgagcactttg

SEQ ID NO: 8021 - DNA, 1046 bp, Glycine max
  Gm_smallRNAprecursor_854
tccttctataattcaatgattgtactttgactgcaattcttatcaaatttgatgtatagtatttatttatttatatatttgatggatatttaccattgaaagattggctgttgtttattttggtctgaggagaaatacttttgccattaattccaggtaatggattaaaacaaaaggggatggtccagaggaagcccagtcgtggtgatacaaccctgtcagttagttgctctgacaagatagctcgttggaggcaaatttactgttgagggttacttttaaaaactaattacaaaagagggtctgtttttaaactttttacaagggggtctgttcctccatggatgtcgccagaagaactggcgagaagcttgtaccgccatcagcagtggcgagaaagctgctgacatggctgggtgccgccattgttacgggcgagatgcagtccaggtggaaggatgccgccattgttatgggcgagacgcgtccacgtaggaaccgccattgctgctggcgagaaccatgctgacttggcaccccgtgagcaggtctcgcctgtcccattggcgagacaggttgtgcccaactgcaggggtgcatgagttcagtgttgcaggggtgcagggggtaggtttcaggctagggcttgcatgctgctgcagtgtttttaaacgttgcttttcgaacgttaggtgttgaatgttgggcattttttcctataaaaaaaatcttcataataacttgaacttacatttcaaacttacagctgctcctccccgaaattgctgagcttctcctcctccagtgctatcctttgctttcttcttcaatttttcgtgtactccttctcctccgtaattactggtaagtattttttaattaaataatatttatgtattatgttcttaatattataaaaagattaagttagttagtattaataggtatttcaagattaggttagttagttttaatatgtattctattgttaatttttatgtattaataggtatttgaaggttaggttaattagcatgaaaatatta

SEQ ID NO: 8022 - DNA, 1053 bp, Glycine max
  Gm_smallRNAprecursor_855
gtcagccaacttaatttaaccacactacctttaatttcaccctcttgtggtctgactcccaataattcctcacataaatcagcccaatcaagatttgttggaccgattaatggtaaaccatctacagatatacctaacaatacacagacgtcttggagagtaatagtacactctccgcatctcatgtgaaacctatgtgtttccggcctccatctttttatcatagcactaattaatgaggcatttatttttaagtatcacatcttcataataaaaaccagattgtcgaagaaaaggaaaaatttgctctggaatttcttcttccccttgatacgtggggacagctcgtctgatatataatttccgatcttctttcccatcccaaatatgttctgaaacatgcttaggttgcatccataatacattaccatcaatggggccagacttaattttaatatgtgatgaacatgacgatgatgataccattactactgcaaaataaaatataatacaataaatttacaaatcaatttatacattatttgtagataatataaattaaactacgcacatttataaaaacgttattaaatatatattatacaaatttaaataaataacaaaatattattatttcataacaaaatatattatacaaataataaaatttaaatatattctacaaataatttcaaatacatgcacacacaaatttaaataattaacataatatattcttcaattaacaaatagataattcaataaaatatttactaacaaataaattaaaatacaaacaaatattgaaatgccaaaaattatttaaacaatatatatacaaaaataataataatgtacaatgcatcatatatttaataacgtaaattttctaaaacaaagaatattaacctacaaactaaaaataaaatctaccatgtactaatgtaaactaccctatcatatatatatatatatattaaaaaaattcaaactaacaataactaaatcaaataatataactaatcaattcatttatttaaaactcaaaattgt

SEQ ID NO: 8023 - DNA, 1237 bp, Glycine max
  Gm_smallRNAprecursor_856
aaatttaaataattaacataatatattcttcaattaacaaatagataattcaataaaatatttactaacaaataaattaaaatacaaacaaatattgaaatgccaaaaattatttaaacaatatatatacaaaaataataataatgtacaatgcatcatatatttaataacgtaaattttctaaaacaaagaatattaacctacaaactaaaaataaaatctaccatgtactaatgtaaactaccctatcatatatatatatatatattaaaaaaattcaaactaacaataactaaatcaaataatataactaatcaattcatttatttaaaactcaaaattgtttagcctaatattattacaaaacctaaaaattatttagcctaatattaacaaagctcaaaatttacgtgtgtctaaattttaggtatatatacctaaagttaatattaacttgtgtctaatattacaaaagttaatattacgtgtgcctaactaaagctaatatgtctaactaaaatatcatacatatataacacatataatatctcagaatatatatttaataacgtaaatttcgtaaaacaaaaaatattaacttacaaactaaaaataaaacctaccatataccaacgtaaactagcctatcatatatatatatatatatatatatatatatatatatatatatatatatattaaaaaaattcaaactaaaaataactaaatcaaataatataacttatcaactcatttatttaaaactcaaaattgtttagcttaatattattacaaaagctcaaaatttacgtgtgtctaaattttagatatatatacctaaaactaatattaacttgtgtctaatattacaaaaactaatattatgtgcctaactaaagctaatatgtcgaactaaaatatcatacatatacaacacatataatatctcagaatatatacaataatcaaataatattttcatactaactaaccaaataatattttcatgctaattaacctaaccttcgaatacctattaatacataaaaattaacaatagaatacatattaaaagtaactaacctaatcttgaaatacctattaatactaactaacttaatctttttataatattaagaacataatacataaatattatttaattaaaaaatacttaccagtaattatggaggagaaggagcacacgaaaaattttgaagaagaaagcaaaggatag

SEQ ID NO: 8024 - DNA, 1110 bp, Glycine max
  Gm_smallRNAprecursor_857
tgatcaacatttggcaaagggactgcttcgatccattttgtaaagtaatcgataccaactataatataacgctggttcttagaagaggcaggcttgatttcaccaattaagtccaaagcccatcctctgaaaggccaaggtttgattatggagtgtaactcactagcaggtaaatgctgtatccctgcatgcttttggcattcctgacagcctttagcaaattctatacagtcttttaacatcgaaggccaatacaaaccttgtcgaaataaaagccatttcattttatggcctgcttgatgtgatccacaagccccactgtgaacatgggaaactgccaagtatgcttctgattcacttagacattttagcaacactccttctgcagtctttttaaacaaatcatttcccacaatcacgtaatttaaagccctatatttgatctttcgagccacattgcctattggattttccaaatattcaataatggactttctccaatcattatctaacatattgtcaatggccaaaatttgaattttttcctgaagatcattcatactttcatcttcattattttgtggtatacttgcccccacaagttttggcattggcaatttagtgcttaatggctctggtaacaccagtttatcttttatttcgatcaactgagttaacttttccttcgacattttgtaccctgaagctatttgggctaaatcatttgcttctcggttttcttgtcgaggtacatgctcaatgttaatataatcgaaatgattcagaagagaacttgctataacaaaatattttgctaagtgttcattaacacatttgtattcttgtgttaattgcctcaacactaattctgaatcacctcttatattaacatttcttgcccccaggctaattaaaatttcaaggcctgtaattagagcttcatactcagcctcattattagaacaaagccctttgattttatatttgaacttagttggaactttattgggggatattattaaaactccaattccagttccatgtttgtgtttcgatccatcgaaatacaaaattcaaggctctgtatcgacataatcttgcggcatctcg

SEQ ID NO: 8025 - DNA, 1083 bp, Glycine max
  Gm_smallRNAprecursor_858
caaagggactgcttcgatccattttgtaaagtaatcgataccaactataatataacgctggttcttagaagaggcaggcttgatttcaccaattaagtccaaagcccatcctctgaaaggccaaggtttgattatggagtgtaactcactagcaggtaaatgctgtatccctgcatgcttttggcattcctgacagcctttagcaaattctatacagtcttttaacatcgaaggccaatacaaaccttgtcgaaataaaagccatttcattttatggcctgcttgatgtgatccacaagccccactgtgaacatgggaaactgccaagtatgcttctgattcacttagacattttagcaacactccttctgcagtctttttaaacaaatcatttcccacaatcacgtaatttaaagccctatatttgatctttcgagccacattgcctattggattttccaaatattcaataatggactttctccaatcattatctaacatattgtcaatggccaaaatttgaattttttcctgaagatcattcatactttcatcttcattattttgtggtatacttgcccccacaagttttggcattggcaatttagtgcttaatggctctggtaacaccagtttatcttttatttcgatcaactgagttaacttttccttcgacattttgtaccctgaagctatttgggctaaatcatttgcttctcggttttcttgtcgaggtacatgctcaatgttaatataatcgaaatgattcagaagagaacttgctataacaaaatattttgctaagtgttcattaacacatttgtattcttgtgttaattgcctcaacactaattctgaatcacctcttatattaacatttcttgcccccaggctaattaaaatttcaaggcctgtaattagagcttcatactcagcctcattattagaacaaagccctttgattttatatttgaacttagttggaactttattgggggatattattaaaactccaattccagttccatgtttgtgtttcgatccatcgaaatacaaaattcaaggctctgtatcgacataatc

SEQ ID NO: 8026 - DNA, 1176 bp, Glycine max
  Gm_smallRNAprecursor_859
agccacaatttgacccttaacagatttcaaaggcttgtacgttaaagaatattctgttaatgctaaagcccattttccaattctactgtgtaaaatcggttttgacaacatgtgcttaataatatcataatgagaatacacataaacatcaacaggctttatatattgcttaagttttgcacaagagaaatacagacaaagacaaagtttttctatggcagtatatctaatttctgcatcatttagtacacgactaagataataaattgcatgttctatgccatcatcatcttcctgagccaacatgctaccaatggtcttgtcagacgcagcaatatacaacttcatagacttgtttcgactaggaggcattaacacaggaggcttgatcagatattctttaatttcatcgaaagccttttgatgctcttcattccatttgaatggttcatctttcttgagtcgaagtaatggcgaaaaaatctgagctttgccacttagattcgaaatgaatcgcctcaagaagttgatttttcctagcaaagactgaagctgttttttggtcgaaggaggcttcgtctcaagaatagcctttgtcttattttgatttatctcaatgccttttttatgcaccacaaaaccaaggaaatctcctgcacgcacacaaaaagcacactttaatggattcatttttaatccatgtttcctcattcgttcgaaagattgcctaagataatccaaatggctatcttctgaggaggatttgatgattatatcatcaatataaatttgcataaatgtgtcaataaaatcatgaaacatggaattcatggccctttgataagtggccccagcatttttcaacccaaagggcataaccacccattcataagtgcctaaagcaccagggcatcgaaatgctgttttcgacacatcattttcagcaataaatatttggttataaccagaataaccatctaacatgcttaaaaattcgaaaccagctgccgaatctaccaacatttccgctactggcatagcatattcatctttaggtgtagcattatttaaatccctaaaatctatgcatactttaagagttccattctttttaatgacagggactatatttgctaaccattcgacatacctggcagccctgatgaatttacacct

SEQ ID NO: 8027 - DNA, 1157 bp, Glycine max
  Gm_smallRNAprecursor_860
caattctactgtgtaaaatcggttttgacaacatgtgcttaataatatcataatgagaatacacataaacatcaacaggctttatatattgcttaagttttgcacaagagaaatacagacaaagacaaagtttttctatggcagtatatctaatttctgcatcatttagtacacgactaagataataaattgcatgttctatgccatcatcatcttcctgagccaacatgctaccaatggtcttgtcagacgcagcaatatacaacttcatagacttgtttcgactaggaggcattaacacaggaggcttgatcagatattctttaatttcatcgaaagccttttgatgctcttcattccatttgaatggttcatctttcttgagtcgaagtaatggcgaaaaaatctgagctttgccacttagattcgaaatgaatcgcctcaagaagttgatttttcctagcaaagactgaagctgttttttggtcgaaggaggcttcgtctcaagaatagcctttgtcttattttgatttatctcaatgccttttttatgcaccacaaaaccaaggaaatctcctgcacgcacacaaaaagcacactttaatggattcatttttaatccatgtttcctcattcgttcgaaagattgcctaagataatccaaatggctatcttctgaggaggatttgatgattatatcatcaatataaatttgcataaatgtgtcaataaaatcatgaaacatggaattcatggccctttgataagtggccccagcatttttcaacccaaagggcataaccacccattcataagtgcctaaagcaccagggcatcgaaatgctgttttcgacacatcattttcagcaataaatatttggttataaccagaataaccatctaacatgcttaaaaattcgaaaccagctgccgaatctaccaacatttccgctactggcatagcatattcatctttaggtgtagcattatttaaatccctaaaatctatgcatactttaagagttccattctttttaatgacagggactatatttgctaaccattcgacatacctggcagccctgatgaatttacacctcagcagcctttcgatctcttccttaatcttggacatgatttctggtgcgaatcttctt

SEQ ID NO: 8028 - DNA, 1039 bp, Glycine max
  Gm_smallRNAprecursor_861
atttctggtgcgaatcttcttggtagttgttttactggtctttttccttccttaataggtaacttcatttcgaccatttctctgctcaacccaggcatttcgtggtagtcccaagcaaaacagtctttaaactctctaagaagaggcaccagcttttcttttaaacttgaggtgatattggcactgatataagttggcctattaatcgagccatctccaatatcgacctcttccaaaggatcttgagcctgcatctttggcgcctcacttatgggatttttctcaaaacccaacggctcatcatcataaatacaatccagtcttcgatcctttgtttctttgttttcatgatcttcgatcttggcttcaactgccatattttgttgagattcagcctcaaaggccgtatttagtctattttcggccatataagccgtaattctggcccatgcagtggcctcagtcatattaatcttcatatgtattccacccagttggtggaatgactccatcttcagagggaacagcatcaatttcctccctctcccatataaacccataggtaggatggagtttgacagagtggacaacattgtcactcgattcgacaacagcctccttgtcaccacaaggtgctatgttagccaactttttgtcaaaggtttgtgcagtaacattatcgacctctgacttatagaagctttgatccgcctctatattttccacaatcccatcctccctccagataatgagcttctggtgaagggtagatggcacagccccaactccatgaatccactcccttcctaatagcaagttaaaattagccttagactgtatcaccaggaaaagagttggtcgaactatactgcctacagcaacatctacttgaatggctcccaaagaatagccagttttaccctcataattcgaaagcacaatgttgtgggcagatagatcagtgtcatgtttcccgatcttgtagagcatagatcgaggcattaagttgacagccgctcctccatcaatgagcactttg

SEQ ID NO: 8029 - DNA, 1042 bp, Glycine max
  Gm_smallRNAprecursor_862
attaaattcaaatcagtttttatgattaaaaaattggattaccatcaaacacatacatcaattaatgtcattttatttaattattttaatttaactagtgatttatagaaagatcaacaaacagagtcaatccagtttgggcctagaaaacccaatctaacctaaacagcgggtaggaatttgcagacacaaatccatccaagtatactttcgattagttcaggttgcaggttaggcaattatgggcccaagtgggcaaaaatatatttacatggtacaaatcaaattttcaacctttttttttaaaaaaaaatatatgcttttcaatccaattattccaggggtgttgctaggtgcatccagcattttttaaaaatgttaaaactgcccttgtgctttcttcacatttgtgataggtgtgcgtgagggtggttcataaatcgtacgaatcaagttgattcataaggttaatatggatcaagttgatctgtatgttgatattaagcgcatacggatcaacttgattcataaaagacttacggatcaaggatatttcagtctttttctcttaagttctggatgcccctagtaacacccttattccagcttctatacctttttacatagctttgtttggcccatttcaaattttgtttatccgaatccaaataagggataaaacggtaaaaacaaatttaagtttaagcaatataactattgtatagttgaaagaaaaacaaattcagaacattagaaaattaaatgcaaatataatatcatcatgcatttactataacatcaaagttagtaagttttagttttacatagccagatctaaaagtgtccttattgggctaaaaagtaaagacaatactttcatagtttcagcactttgcaatgagatataacaagctacaaagagttattggaatgtagaagctaaggacagcaagtcttccacatcatatggcttgagttccatatccatcaagacatgcacaattcctgcaagtccaaaagtagcatcccagttcaacaaaac

SEQ ID NO: 8030 - DNA, 1042 bp, Glycine max
  Gm_smallRNAprecursor_863
aattaatcaccaatttcggtgctagaaagtagaaagaagaaataatttcttagctatatattgaaaacatacgaaacaactattaacaaaatcatgtaatgaacagataatacatgtcacttgcttaacaagcataaactaacgtggagtagtctcagcagatataaaaggttcattttgaaatgaagaatgccacttctgaatctcagattttgcagccttaagttcattctggaaaatccagtgatccaggaaaacgattttaggaaacaaaaaggtacaaatcaacctatatgcaaaactttgggccaggctggtaagatactcaactctaacaacttacggtaatgttgctaggtacacccagcattattgctggtgcacccagtattctttgaaaatggtaaaattgtccctgttaatttcttcccttacggattaagttgatccgtaagttgatttttaagacttacggatcaaattgatccataagttaatttttaagacttacggatcaagttgatccgtaaaagacttacggatcaagttgatccgtaagtcttaaaaattaacttacggatcaacttgatctgtaaaaagtatttctatcttttcgtgattagtgttgggtgcactaacaataatgctgggtgcacctaacagcactcaacttagggtctgctatgtgaattatctctaatctagaagagtgtatatgggcattcttttatccacatcattcataatcatagagttaatagaaaaattataactaaagtacggttcctttaataatagtaacattagttcaatttttattagcaatttgttaaaggaaaacatacttggcatgtagcaagcatgcctttacagttctgaagactgcaaaaaacaaagttagagaaaaattttaggcacaaacagttcaatgcaattttacatacaaataatctatgaacgttgcagtaaaagtaacacgttataagctcaaatcctcacttgtaactggtacaaagcaaatccaccgcaagtgaacataaaa

SEQ ID NO: 8031 - DNA, 1121 bp, Glycine max
  Gm_smallRNAprecursor_864
gcaagttaacaagattgcacatgtcactaggcaacttagtcagctttctgcaactacacaacttcaaagtttgcagattgtataaattacataatgactttggcagtgtttctacacttgaaaaagagagatctaaatagcgcagatggatcaatttacctattgagtcaggcaaagaatccagactttggaagtcacaaaatgataaaactctcaagtacataagcttcgacattatgatacattgtgcctcctcattgttgaatggagcagcttcaaaatttataatggacaagaaagttctcagaaattttgctctaccaacaacatcaaagttgtccaagactgaagaattgaatttggcaaatgacaaatgacgagtcttggtgttgatctttgtttctttcccaagttcttctgatctaaagtaaaaatctccaccgagtgatgtggctagatcatgcatgaggtcatgcatcacaaaacatttgccataaggccaactacttctacttgtgtttgaacgttggaaaaatgatctcgaaaccaaatcatcaaaatactcatgaccaacctcttctaaagtcctacctttccttggtttcttcaaaagatcttcagccatccacaacaagattaattcatttttttcaaattcgtaatcttgtggatacaacgaacaataaacaaagcatcgttttaaatgtggagggagataatgataactaagtctcagtgctggaataactttacactcactttcagaaagttcccaaatgtcactattgagaatattattccaatccccaatgtcatgctttcttctcaacatgcctccaagcgactctgctgctaaaggcagtccgttgcactttttaacaatctcctttccaattttttctagtgttgctgtgttctcgttagattccgtggaaagacatgcatggttcgcaaacactgaccaacaatcttcattcgacaattggtttagatgataggtgtgaacagtttggactacagatgctgttttttcactgcgggttgttagaagaattttacttctcctaataatcccacggttaaatggtttcttaagaagacgccaatcaacataatcctct

SEQ ID NO: 8032 - DNA, 1121 bp, Glycine max
  Gm_smallRNAprecursor_865
gcaagttaacaagattgcacatgtcactaggcaacttagtcagctttctgcaactacacaacttcaaagtttgcagattgtacaaattacacaatgactctggcagtgtatctatacttgaacgagagagatctaaatagcgcagatggatcaatttacctattgaatcaggcaaagaatccagactttggaagtcatgaaatgataaaactctcaagtacataagcttcgacactatgatacattgtgcctcctcgttgttgaatggagcagcttcaaaattgataatggacaagaaagttctcagaaattttgctctaccaacaacatcaaagttgtccaagactgaagaattgaatttcgtaaatgacaaatgacgagtcttggtcttgatctttgtttctttcccaagttcttctgatctaaagtaaaaatctccaccgagtgatgtggctagatcatgcatgaggtcatgcatcacaaaacatttgccataaggccaactacttctacttgtgtttgaacgttggaaaaatgatctcgaaaccaaatcatcaaaatactcatgaccaacctcttctaaagtcctacccttgcttgatttcttcaaaagatcttcggccatccacaacaagattaattcatatttttcaaattcgtaatcttgtggatacaaggaacaataaacaaagcaccgttttaaatgtggagggagataatgataactaagtctcagtgctggaataacttcacactcactttcagaaagttcccaaatgtcactattgagaatattattccaatccatgatgtcatgctttcttctcaacatgcctccaagcgactgtgctgctaaaggcagtccgttgcactttttaacaatctcctttccaattttttctagtgttgttgtgttcccgttcgattcggaggaaagacacgcatggttcgcaaacactgaccaacaatcttcattcgacaattggtttagatgatagatgtgaacagtttggactatagaggctgttttttcactgcgggttgttagaagaatcttacttctcttaatcccacggttaaatggtttcttaagaagtctccagttaacataattctctgtc

SEQ ID NO: 8033 - DNA, 1121 bp, Glycine max
  Gm_smallRNAprecursor_866
gttaacaagattgcacatgtcactaggcaacttaattagtcagctttctgcaactacacaacttcaaagtttgcagattgtacaaattacacaatgactctggcagtgtatctatacttgaatgagagagatctaaatagcgcagatggatcaatttacctattgaatcaggcaaagaatcctgactttggaagtcatgaaatgataaaactctcaagtacataagcttcgacactatgatacattgtgcctcctcgttattgaatggagcagcttcaaaattgataatcgacaagaaagttctcagaaattttgctctaccaacaacatcaaagttgtccaagactgaagaattgaatttcgtaaatgacaaatgacgagtcttggtcttgatctttgtttctttcccaagttcttctgatctaaagtaaaaatctccaccgagtgatgtggctagatcatgcatgaggtcatgcatcacaaaacatttgccataaggccaactacttctacttgtgtttgaacgttggaaaaatgatctcgaaaccaaatcatcaaaatactcatgaccaacctcttctaaagtcctacctttgcttgatttcttcaaaagatcttcggccatccacaacaagattaattcatatttttcaaattcgtaatcttgtggatacaaggaacaataaacaaagcaccgttttaaatgtggagggagataatgataactaagtctcagtgctgaaataacttcacactcactttcagaaagttcccaaatgtcactattgagaatattattccaatccacgatgtcatgctttcttctcaacatgcctccaagcgactgtgctgctaaaggcagtccgttgcactttttaacaatctcctttccaattttttctagtgttgttgtgttcccgtccgattccgaggaaagacacgcatggttcgcaaacactgaccaacaatcttcattcgacaattggtttagatgatagatgtgaacagtttggactatagaggctgttttttcactgcgggttgttagaagaatcttacttctccgaatcccacggttaaatggtttcttaagaagtctccagttaacataattctctgtc

SEQ ID NO: 8034 - DNA, 1184 bp, Glycine max
  Gm_smallRNAprecursor_867
caactaactaatcatcatctaatgatataccaaaacagtcgtcctcattctggtagaatggatcatcatcttggtcatcattattttctgatgattcggcctccttttttgggggttcttcatcttcttcttgttgaagtagttggagaacttccttgagattctgggcaagactctctttagattttgagcttgccaagaatgctgcaagttgagacttctgattcagaaataaggatgtctctggatcagcaggtttgagaaactcagggttgctctgaaaccaattcttgacctgatctggagcagcctttgaggtatcgaattgtgaccaccattttacaaaggcatgtctttgtaatggcggatactgcttgcaattttcagtttttccatatttgtattgccatgaaaaaatccatgacaaagcaaagctggaaaagtacttcaaatctgctggaattcttgattctttgctattgaagagtttgttgaactgttggaatccctgttggacttcttctggaaatatctgtggtattggtccgaagtagttccaccattggaggaaccaatttggaaaattgtacacggtgttatttttgaagtaaatcagccatgaatgcttgaatttactattttgatgccagaatacattggtccaggcgtcaatgtaatcccaataattatatcctgcagggtcaaaaggtgcagaaaatttcttgggttggttcaagttggagccataatgtcatggctgcattacttttaggatctggattgtggagtgggtgtttagatttgggtctttggggtccttgaaatgtttaatagatacggagttcgtatctattaggatgaattcatagaattttctggttttgtttatggctgttggcctataatgaaatcctggggggaatactttggcggtggccttgaaaggattcttatcccagtattttggttccatttgtaagacattgaagaatttgttttttgaaatgtagctgttgttgggttgtgatgttgagtcttgttgagtcaacggttggctttgtttttggttacagatggttttggtctgtttggctttttgaatttgtttttgcagatccattttagaatcatcgtctgattctgaggccatttctgcccaggtccttttggctaattttggtact

SEQ ID NO: 8035 - DNA, 1054 bp, Glycine max
  Gm_smallRNAprecursor_868
aattttttgaaagtaaatgaaattcttcccatatgtcttgtcctagaggaatattattttctactgttttgattatgtaatcaaagttgtgtttatctttaattgtttcaggaacgtatagttgatcctgagggatttctgggatgttccagtcatccatgttttgattgatatcttcgaatcggacttcctcatcgaagagattgtgtttaggggcgacctcatgggtctggttatcttgatcacttaataagtttgaatttctggaagaagttgatgaagaggaattagatcgaaaggaaatacgtgaaaaagaacgcagaagtctagacatgattatcaaattctctaatatctttgccctcatttggttccatagaaatatttccgtaagtaaatacgtaacaaaattttttggatctgaaatatttttaagcaaaaactcctttttttttaaatagtttgaacggcaatcctataaccaccagtatattatgtgttgatattttggttaaacagtacaccttagccttactgtcctttatccatcacgggtcttactgctacagtaccattcaactaaaatattagactactgtacttccagaaagtactgttcaaacatctattgtacagatcaaaataaaatattactcatagtatacaaggttccagatccataaaatttgtttacatatgtccttacggaccgtatttctacttccccatcaggctctgataccagttatatatatatatatatatatatatatatatatatatatatatatatatatatatatatatatatattattttttgggtaccaatatataatattattttttggatacaattaattttttttttttgaaactatcagactttgattacactccataacttctattcctataatcaaggactttaattgcaatttaggcgagtcatgtgtccttttatattcctgattattttgattgactttcctttttctttaactttcctattatgttcctactccataaaatattaaatatttattgtgaagaag

SEQ ID NO: 8036 - DNA, 1121 bp, Glycine max
  Gm_smallRNAprecursor_869
gcaaattaacaagattgcacatgtcactaggcaacttagtcagctttctgcaactacgcaacttcaaagtttgcagattgtataaattacacaatgactttggcagtgtttctacacttgaatcagaaagatctaaatagcgcagatggatcaatttacctattgaatcaggcaaagaatccaaacttcggaagtcacaaaatgataaaactctcaagtacataagcttcgacactatgatacatcgtgcctcctcgttgttgaatggagcagcttcaaaattgataatggacaaaaaagttctcagaaattttgctctaccaacaacatcaaagttgtccaagactgaagaattgaatttcgtaaatgacaaatgacgagtcttggtcttgatctttgtttctttcccaagttcttctgatctaaagtaaaaatctccaccgagtgatgtggctagatcatggatgaggtcatgcatcacaaaacatttgccataaggccaactacttctacttgtgtttgaacgttggaaaaatgatctcgaaaccaaatcgtcaaaatactcatgaccaacctcttctaaagtcctacctttgcttgatttcttcaaaagatcttcggccatccacaacaagattaattcatttttttcaaattggtaatcttgtggatacaaggaacaataaacaaagcaccgttttaaatgtggagggagataatgataactaagtctcagtgctggaataactttacactcactttcagaaagttcccaaatgtcactattcagaatattattccaatccacgatgtcatgcttttttctcaacatgcctccaagcgactgtgctgctaaaggcagtccgttgcaccttttaacaatctcctttccaattttttctagtgttgttgtgttctcgttcgattcagaggaaagacacgcatggttcacaaacactgaccaacaatcttcattcgacaattggtttagatgataggtgtgaacagtttggactatagatgctgttttttcactgcgggttgttagaagaatcttacttctcctaatcccacggttaaatggtttcttaataagactccaatcaacataatcctctgtc

SEQ ID NO: 8037 - DNA, 1073 bp, Glycine max
  Gm_smallRNAprecursor_870
tgcctcctcgttgttgaatggagcagcttcaaaattgataatggacaaaaaagttctcagaaattttgctctaccaacaacatcaaagttgtccaagactgaagaattgaatttcgtaaatgacaaatgacgagtcttggtcttgatctttgtttctttcccaagttcttctgatctaaagtaaaaatctccaccgagtgatgtggctagatcatggatgaggtcatgcatcacaaaacatttgccataaggccaactacttctacttgtgtttgaacgttggaaaaatgatctcgaaaccaaatcgtcaaaatactcatgaccaacctcttctaaagtcctacctttgcttgatttcttcaaaagatcttcggccatccacaacaagattaattcatttttttcaaattggtaatcttgtggatacaaggaacaataaacaaagcaccgttttaaatgtggagggagataatgataactaagtctcagtgctggaataactttacactcactttcagaaagttcccaaatgtcactattcagaatattattccaatccacgatgtcatgcttttttctcaacatgcctccaagcgactgtgctgctaaaggcagtccgttgcaccttttaacaatctcctttccaattttttctagtgttgttgtgttctcgttcgattcagaggaaagacacgcatggttcacaaacactgaccaacaatcttcattcgacaattggtttagatgataggtgtgaacagtttggactatagatgctgttttttcactgcgggttgttagaagaatcttacttctcctaatcccacggttaaatggtttcttaataagactccaatcaacataatcctctgtccaaacatcatccaagacaattaagaattttttatctttcagcttgtccatcaattcaagatgaagtagattcagatcattcaatttacaaggctctccagtaatcgcctctatcatagtttttgtgatcttcagaacatcaaattctttagaaatacaaacccatgccttaaagtcaaatatctctaccagattctcat

SEQ ID NO: 8038 - DNA, 1049 bp, Glycine max
  Gm_smallRNAprecursor_871
tcaaagtttgcagattgtacaaattagacactgactctggcagtgtttctacacttgaacgagagagatctaaatagcgcagatggatcaatttacctattgaatcaggcaaagaatccagacttcggaagtcatgaaatgataaaactctcaagtacataagcttcgacactatgatacatcgtgcctcctcgttgttgaatggagcagcttcaaaattgataatggacaagaaagttctcagaaattttactctaccaacaatatcaaagttgtccaagactgcagaattgaatttggtaaatgacaaatgacgagtcttagtattgatctctgtttctttcccaagttcttctgatctaaaataaaaatctccaccgagtgatgtggctagatcatgcatgaggtcatgcatcacaaaccattttcgatgagacaaactacttgaatttgaacgttggaaaaatgatctcgaaaccaaatcatcaaaatactcatgaccaacctcttctaaagtcctacctcttcttggtttcttcaaaagatcttcagccatccacaacaaggttaattcatttttttcaaattggtaatcttgtggatacaaggaacaataaacaaagcaccgttttaaatgtggagggagataatgataactaagtctcagtgctggaataactttacactcactttcagaaagttcccaaatgtcactattgagaatattataccaatccccaatgtcatgctttcttctcaacatgcctccaagcgactgtgctgctaaaggcagtccgttgcactttttaacaatctcctttccaattttttctagtgttgttctgttctcgttcgattcggaggaaaaacacgcatggttcgcaaacactgaccaacaatcttcattcgacaattggtttagatgataggtgtgaacagtttggactatagatgctgttttttcactgcgggttgttagaagaatcttacttctcctaatcccacggttaaatggtttcttaagaagactccaatcaacataatcctct

SEQ ID NO: 8039 - DNA, 1036 bp, Glycine max
  Gm_smallRNAprecursor_872
tttggatattaattaaaccttaactacaattagtgtacacacacataaaatatatataagtagaacttttatttaaatcacgtatcttaacaacaatccacctagcagcagccttggatttaggttgtggagtatcatcaaatcctttcaaagcactagtgttgaatatgaggaacattaaaatattgatgttgttgagttatgccaatgaaaatgtattgaaaacaatactgacctgttaattattcccttaaggtagttgtctggcctgttatgtaaagaacaaaaccagacaactaggttttccttaggcagaatgacgaccatttgccagtgtctgctgcaatagagatgaatatgggttattgtagtagtatagattatttaaattcaattgttgtgtttgacttacccattcaggtaggctccaaggtaaacatctcgttttgaactctgtatccaactcttgatgtaactttcagattcaaattgtgattgcccagatctctgaatggactgtggctcgaggaatccatacacatcagaattccccgctcacacacttgtctcagtcagatggctgtgttgttaagccaaagttaattatgtatgaatttaaaacaattactttggtaattaacagtaatctaaaatgacttacagaatccacaactgtataacagatatgctgagacattgaccaccgtgtgcaatttcagagaaatctttgtgctttatatacaacgggaagttttgattaaacaccctgaatatggtagcatcccacataacctggagaggcttcaaaaacagttgtgggatggtcaatgtcatcaggtacagggaatcatcgacctcttcatccgggctttctggaggttttgctggagacacagctgtctgttgatcaaacatagttaattaggaagttttgattacagtgaacaaattaattgaaaaaaataaacatataatacttgttctgataaacacttcacaagatgtgttggccaagcaaggaaggtgtgaagtgtct

SEQ ID NO: 8040 - DNA, 1051 bp, Glycine max
  Gm_smallRNAprecursor_873
ttaagatattttttgggtgaatatatgttttaaaatatgaattttgtataataatatatttattttagtaaatatttattttgtataataatctgaattttaaaatttttaatttaattattttactaaatataattagtttgtttatgttattagatttaattagaaatgataaaactaaagtttttaacaatttatttatataagaacattatactacgtcatcaataaaatatttaaacaatgacatttttctaaggaaaaacttaagatgaggatatattaggacaattatttctgctatcaccatgttgccggcaaagtccacatttttttctacttgctcgttcattttcgtcttcgtccatctcagtaggaatgcgagttgaaacgggatgaccctttacagtcctctttcttcttggatcaggaccccactgatctccttcatattcttgccacattgattcgtgtggcaataaatcaaaggagttgtcgtagatgtgcaaaatgtgttgtaaagtgaatatcatcagcacataggtcatgggatcaacattgacagatttacagacagccatgacgtgagaacacggtaaatgtttagcctgatattcaccacaatcacactttttgggattgtaacattactctaaaccttccaggtggtctgggtgtttcgagtgggggttgagtctctgttataataaaagtgtgattgtgtctgtcgaattcatttacaatgtgtatattagattcttgttgaccactattgattgcattgaagacgatttcagaatactgtgagccggagttgatcattgcctgagtttgtcgacctctattagcaaagagttgtgcggtcttgaaataggtctcctcaaccaacgatgacaccggcaagtgtcttatgtttttgaacatggaattaacagactccgacaaattggtagtcatatgtccccaacgtttcccctcatcaaagcattgtacccatttttgtttgggtaatagatcaagccattcaactgcacttggcttattcgcacga

SEQ ID NO: 8041 - DNA, 1168 bp, Glycine max
  Gm_smallRNAprecursor_874
ataatatatttattttagtaaatatttattttgtataataatctgaattttaaaatttttaatttaattattttactaaatataattagtttgtttatgttattagatttaattagaaatgataaaactaaagtttttaacaatttatttatataagaacattatactacgtcatcaataaaatatttaaacaatgacatttttctaaggaaaaacttaagatgaggatatattaggacaattatttctgctatcaccatgttgccggcaaagtccacatttttttctacttgctcgttcattttcgtcttcgtccatctcagtaggaatgcgagttgaaacgggatgaccctttacagtcctctttcttcttggatcaggaccccactgatctccttcatattcttgccacattgattcgtgtggcaataaatcaaaggagttgtcgtagatgtgcaaaatgtgttgtaaagtgaatatcatcagcacataggtcatgggatcaacattgacagatttacagacagccatgacgtgagaacacggtaaatgtttagcctgatattcaccacaatcacactttttgggattgtaacattactctaaaccttccaggtggtctgggtgtttcgagtgggggttgagtctctgttataataaaagtgtgattgtgtctgtcgaattcatttacaatgtgtatattagattcttgttgaccactattgattgcattgaagacgatttcagaatactgtgagccggagttgatcattgcctgagtttgtcgacctctattagcaaagagttgtgcggtcttgaaataggtctcctcaaccaacgatgacaccggcaagtgtcttatgtttttgaacatggaattaacagactccgacaaattggtagtcatatgtccccaacgtttcccctcatcaaagcattgtacccatttttgtttgggtaatagatcaagccattcaactgcacttggcttattcgcacgaatatccccaagatgtcgccaatgcatcttctccgtgtatgtgtatcctgtaaatatttaatcaatgtattatgttataaaatttgattgaaagaaaattataatgaataaataaaatagattctcaccagccaacataagtggtttctttaaatgtttgcagtttga

SEQ ID NO: 8042 - DNA, 1079 bp, Glycine max
  Gm_smallRNAprecursor_875
taaggaaattcctagaaccttctcttcttctggaagtttctccataatttttctttcctccattttctttgttttggggctgaaatttaaactttgactggaagacattttcaattgtatcttcgttatccctatacagtctttgctcatatgcttcaagagagcccacaagttgtgtctctgatagagtggacagatctttggtttcctcaatcgttgtcacgattgggtcaaacttttgggacatagtaattagaattttctcaataattttcttgtcaagaatatcttccccagaagctctcatttgattaactatttctttaactttagaatagtaatttttaactgtctcagactctttcatcttcaatagttcaaaatctcttcttagagattgaagtttaacggcacgtaccttaatacttccatgaaactcctcctgcaatgtgttccacgcttctttggcagtcttagctcccataattcttgggaaaattggatcagtcaccgcttgttgcaaggtgaacaacgcctttgaatttttctgtttatttttcttcaactctttttcttgagatgcattaagagctgaagtatccgcgggaatggtgaaaccttcttctactatgtcccataaatcttgaaatgaaaaatgtgtttccattttaatatgccagaaatcataattttcaccattgaaaatagggacaaaaataattgatgattgagtagtgttatccatagcttagaaaaaatattattagagtgggttaatagtacaaaggaaatttttgaagtagttgggaggattttggaatggtaggtaggtaatataactacgtccaatgtatgactgaacgtagctcagataccactgttggtagttgatagttgatagttttagagaattgttttagaaagaaggctatgtcattaatttcttggatcatcaattacaacataccaattgcctatttataggctcaagtcaccaacctctcaatggtgacgaatgtttttacattactttaggtctttctagagttttcatgataaattagtatcatgatagttct

SEQ ID NO: 8043 - DNA, 1084 bp, Glycine max
  Gm_smallRNAprecursor_876
gataaaatcagaagattataattcaagagttttgttttggtcttgtatgttttgtcacccgttatgctttctaaaccagaatgattatttatgatcaaagaacaggtattttttggcggttgatggaagttttttctttttaaaaactgccgttgatggaagttttagtaacttccatgtaacttccaaccgttgatggaagttttagtaacttccatgtaacttccaaaattttgcctaaaccgaacatctcattattacattaaaacaagcgtgcactcttattttaacataataaagagatcaattactgatggcttcaagcttgtgcctcttcacgtatggaatatgaatgtagcatatagatccaaagacccttaggtgctttgctgatggcttcttcccgttccaagcttcaattggagtcttgtcttttacagacttagttggacatctgttgagtaagtaaacaacattgtagactgcttcagcctagaatgtgttaggtagtcccttctccttgagcatcgatctagccatcttcataactgtgcgattctttctctcggacactccattttgttgaggagaatatgcgactgtaagttgtcactcaatgcttcatcctcacaaaatctttcaaactcgcgagaggtgtactctttgccgcgatcacttcttagtacttttatccgttttccactttgattttcagcaagggccttgaactttttgaatactccaaagacttctgatttttcttttagaaaatatacccatgtcattctagagaagtcatcaatgaagagtatgaagtacttgttgttctcatgtgatggcgtcctcattggtccacaaacgtccgtatgtatcagctccaatagatctttcgctctccatgctccgcttgttgagaaaggaaattggtgttgcttaccaaggagacatccttcacacacttcattgttctcctttatgcttggaagatctctcatcatgttcttctcatgtaacaacttcaaggcatgtgtgttgaagtcgccaaatcttcgatgccatagccatgaatcatcaacctgtacct

SEQ ID NO: 8044 - DNA, 1084 bp, Glycine max
  Gm_smallRNAprecursor_877
caagttacaggtttcatatatgtccaccaaagatcttactcgtcttggagtagactctggtgatgatggttcttgatcttgttgttgtggtggaggtgaaggtggttcacctgggtcttcttcctcagcttcttcttgtggtagttgagcgggtataagaacgttcttctccactttttcttcatcccaattccaagaagcgtactcatcaacttcaacatctcgactgatgacgagtttcttagtttgcaagttgtagacacagtagcccttagagatattgctatacccaaggaagatacctcgtatagtcttgtcttcaagcttatgcctcttcacgtctggaatatgaatgtagcatatagatccaaagacccttaggtgctttgctgatgacttcttcccgttccaagcttcaattggagtcttgtcttttacagacttagttagacatctgttgagtttgtaaacagcagtgtagactgcttcagcctagaatgtgttaggtagtcccttctccttgagcatcgatctagccatttccacaacagtgtgattctttctctcggacactccattttgttgaggagaatatgcgactgtaagttgtcgctcaatgccttcatcctcacaaaatctttcaaactggcaagaggtgtactctttgccgcgatcacttcttagtacttttatccgttttccactttgattttcagcaagggccttgaactttttgaatactccaaagacttctgatttttcttttagaaaatatacccatgtcattctagagaagtcatcaatgaagagtatgaagtacctgttgttctcatgtgatggcatcctcattggtccacagacgtctgtatgtattagctccaatagatctttcgctctccatgctccgcttgttgagaaaggacatcggtgttgcttaccaaggaggcatccttcacacacttcattgttctcctttatgcttggaagatctctcatcatgttcttctcatgtaacaacttcaaggcatgtgtacgtgttgaagtggccaaatcttcgatgccaaagccatgaatcatcaacttg

SEQ ID NO: 8045 - DNA, 1058 bp, Glycine max
  Gm_smallRNAprecursor_878
ctagaaaacagttcaaggtttgtaaagagaaccattcatttgatcttctctgagtttacttgaacctatattgtaacatatatggatagtgttagctagaaattaacagataccaaatttttttggctagtcatcaacttttaaaacacactttgaaaagagaaaactttgaagtaaattaaagagtcactctacacaacccaagaggatttgacacattttggtttctacctttcttccacttacttcatctttaggctctctctttcacttaggaaaacaaaaagaaaagaaaagatgttagtcattaaaattgccataacaaacaaaaatgaaagaagtagaacaacaaaagaagtagtaaaactgaaagaacctttgagtagtgtagagtagtgcatgatgattaagaccaacaattttatttttatttttatttatttttcttttggggggtttctcctgaaaactgaagatccattgtgtgaagatagaagccatgaaactcaggatggatagcgcaagagaagatcaagagtgaagagaagatcatccatggcgctatccctcctgagctttacagattcttccacactaaaaaacaagagcagcacaacacaacagcacacacacaaggtgcagaagctaataacccttttcttaaaaaaaagctggctatagctagctaccattatggaacattaaatgcttctgatacatggtggggagggacgtagcagaggtatttatagaagcagagaaggggacgtgggaaatttcagacacaaacacaaaagggaaaaaaaataacaaaagaaattaaaaaatgattaaattaagggagaaaaagaaaaagaaaaagcaaaagatatacttttatcttgttttatagtttcagtttcattcttcaaatttacaagtttcactttctatctctttaaatattttttttaaaaaaatcaaattaatcatttcattagtttatcagacaaacttggctaatttagtaacactgacaaactgtgaaaaatgttactatatcatataagcatttgtta

SEQ ID NO: 8046 - DNA, 1058 bp, Glycine max; identical to SEQ ID NO: 8045
  Gm_smallRNAprecursor_879

SEQ ID NO: 8047 - DNA, 1057 bp, Glycine max
  Gm_smallRNAprecursor_880
tagaaaacagttcaaggtttgtaaagagaaccattcatttgatcttctctgagtttacttgaacctatattgtaacatatatggatagtgttagctagaaattaacagataccaaatttttttggctagtcatcaacttttaaaacacactttgaaaagagaaaactttgaagtaaattaaagagtcactctacacaacccaagaggatttgacacattttggtttctacctttcttccacttacttcatctttaggctctctctttcacttaggaaaacaaaaagaaaagaaaagatgttagtcattaaaattgccataacaaacaaaaatgaaagaagtagaacaacaaaagaagtagtaaaactgaaagaacctttgagtagtgtagagtagtgcatgatgattaagaccaacaattttatttttatttttatttatttttcttttggggggtttctcctgaaaactgaagatccattgtgtgaagatagaagccatgaaactcaggatggatagcgcaagagaagatcaagagtgaagagaagatcatccatggcgctatccctcctgagctttacagattcttccacactaaaaaacaagagcagcacaacacaacagcacacacacaaggtgcagaagctaataacccttttcttaaaaaaaagctggctatagctagctaccattatggaacattaaatgcttctgatacatggtggggagggacgtagcagaggtatttatagaagcagagaaggggacgtgggaaatttcagacacaaacacaaaagggaaaaaaaataacaaaagaaattaaaaaatgattaaattaagggagaaaaagaaaaagaaaaagcaaaagatatacttttatcttgttttatagtttcagtttcattcttcaaatttacaagtttcactttctatctctttaaatattttttttaaaaaaatcaaattaatcatttcattagtttatcagacaaacttggctaatttagtaacactgacaaactgtgaaaaatgttactatatcatataagcatttgtta

SEQ ID NO: 8048 - DNA, 1057 bp, Glycine max; identical to SEQ ID NO: 8047
  Gm_smallRNAprecursor_881

SEQ ID NO: 8049 - DNA, 1086 bp, Glycine max
  Gm_smallRNAprecursor_882
tcaaaagaacaaggtgacaatcaacctgttgacgtccaaccaccttcgaccgatattgacggtactgaagtagagactactccttctattgctgagatgggcaaccttatcgagccaccgaactcaccacaaaaacaacctgccgtcgaggtatcatcctcttaatgtgttttaaatcatagcttatacgaaactatttgttaacctttttccatgataattcgaatcaggtacaacaaaatgtttctgtagaagaaataccctcacatgctcgaacatctcccgctcctgagacggatgcagtgaatgttgaggaacagggtgaaggtcaaggcattggatccagcagtcctcatggatcgagtcagaaaagttcatccgaagaaaacttttccgatgaagcggccatagaagaggctgaagctggaggttcggacatttacccggcgtcttcgacatctaagctttctgctagcatagggatcgcagaagataccttcattcaaatgcaagacgaagaccctgctgcagcccttcgactcctgctgaccacaagtcaagccaacacctcaagtgaaaagattcctggtgcttcgtcctcatctgatgctgaaataaactcttcagtacgccaagattgcctgctcttgaagttatcaatggaatacgcacgggaagacgtacttaaatccattgaagagaacccctccgctgcttttgggcacctgaactttttgaagaaattgcacaacccccttacctctgatgagattctaggcaaagttatccaaatcgagtccattatcgatcaatttgcaagtactgtgcagaaaaaacgcgaaaatggcgccagactagatgcccagaaacaggcacatatccttctgctcgaaaaagcccgagctgctcaacatgaagtcgaacgtcttaccaaagaggcgaaagaaggaacttctgagatcaaagattgtgatgataacatctcctcctgggaggcaactattacgaatttgctgtctcaggtcgatgatctaaagcagaaaattgtaacagagcaggccaaacgcaaagaactccaggagaagg

SEQ ID NO: 8050 - DNA, 1157 bp, Glycine max
  Gm_smallRNAprecursor_883
caattctactgtgtagaataggttttgacaacatgtgcttaataatatcataatgagaatatacataaacatcaacaggctttatatattgcttaagtttcgcacaagagaaatacaaacaaagacaaagtttttctatggcagtatatctagtttctgcatcatttagtacacgactaagataataaattgcatgctctacgccatcatcatcttcctgagccaacatgctaccaatggtcttgtcagatgcagcaatatacaacttcatagtcttgtttcgactaggaggcattaacacaggaggcttgatcagatattctttaatttcatcgaaagccttttgatgctcttcattccatttgaatggttcatctttcttgagtcgaagtaatggcgaaaaaatttgagctttgccacttagattcgaaatgaatcgcctcaagaagttgatttttcctagcaaagactgaagctgttttttggtcgaaggaggctttgtctcaagaatagcctttgtcttattttgatttatctcaatgccttttttatgcaccacaaaaccaaggaaatctcctgcacgcacacaaaaagcacactttaatggattcatttttaatccatgtttcctcattcgttcgaaagattgcctaagataatccaaatggctatcttctgaggaggatttgatgattatatcatcaatataaacttgcataaatgtgtcaataaaatcatgaaacatggaattcatggccctttgataagtggccccagcatttttcaacccaaaaggcataaccacccattcataagtgcctaaagcgccagggcatcgaaatgctgttttcgacacatcactttcagcaataaatatttggttataaccagaataaccatctaacatgcttaaaaattcgaaaccagctgccgaatctaccaacatttccgctactggcatagcatattcatctttaggtgtagcattatttaaatccctaaaatctatgcatactctaagagttccattctttttaatgacagggactatatttgctaaccattcgacatacctggcagatctgataaatttacacctcagcagcctttcgatctcatccttaattttggacatgatttctggtgcgaatcttctt

SEQ ID NO: 8051 - DNA, 1035 bp, Glycine max
  Gm_smallRNAprecursor_884
aattgcattgcattcgaaaggtaaagtttatagaaatttaaaatggttcgcaaacatacattctccttgtgtactcgtttctctctgcgctgggtactttgagtgtataaggatttgtataaatgatttgcgacctcgaaatctgactaaaaactgttatatatagacattcgaaaataaactgccctaacggtcgaacactatcctaatgccaagtgtcctgctacgtataccttgcatgcatataactgctccttagaacggttatccacattactcgaaatcgaactgattttgtgaagttttgtcagaaattgcgctaagtccagaaatcttgctgcctcgacttcgactcgagtatacaccagttcgaatcgcccaatggttcgaagccctctttcttgtcttagccttatacttcataaatacttctttgatcccgtgaatccctttcaataaactcttctttcttttcgattcgaacaggatctgacaagactcttgctctttaatacgcttcgaaattcaagatgacatctaatgcgtatttagagcatattttagctcatcaaaaatatgggctaacaatttcataattgtgcaataattctttaactccatggttgcctttggaccaccactttttatcacaaatcctcggttaaatgattaagaaggtacctaatggtataatgagttaaacttgcactatgcaaagcattaacacgaatttaacacaaaacaaatataagaatcgaattgaccaactttaatttccaaaataatcatacatgtacatacacttacctaattgctatttcgaatttgccatcaatgtctccttactgagactaacaatgtagttaattccatcatggccccctttgacaacataagggtaaaaaataaagaaaaaggagtgaacgattatttccatcacatgttttttttatttaatgagtttaacgacggtcctgtaaaacaattttaaaataataaaagttgatataaatttgaagatatttatgataaaat

SEQ ID NO: 8052 - DNA, 1084 bp, Glycine max
  Gm_smallRNAprecursor_885
ccaagttacaggtttcatatatgtccacccaagatcttactcatcttggagtagactctggtgatgatagttcttgatcttgttgttgtggtggaggtgaaggtggttcacctaggtcttcttcctcagcttcttcttgaggtagttgagcgggtataagaacatttttctccactttttcttcatcccaattccaagaagcgtactcatcaacttcaacatctcgactgatgacgagtttcttagtttgcaagttgtagacacggtagcccttagagatatttctatacctaaggaagatcctcgtatagtcttgtcttcaagcttgtgcctcttcatgtctagaatatgaatgtagcatatagatccaaagacccttaggtgcttttctgatggcttcttcccgttctaagcttcaattggagtcttgtcttttacagacttagttggacatctgttgagtatgtaaatagtagtgtagattgcttcagcccagaatgtgttaggtagtcccttctccttgagcatcgatctagtcatttccataactgtgtgattctttctctcggacactctattttgttgaggagaatatgcgactgtaagttgtcgctcaatgccttcatcctcacaaaatctttcaaactcacgagaggtgtactctttgtcgcgatcacttcttagtacttttatccgttttccactttgattttcagcaagggccttgaactttttgaatactccaaagacttctgatttttcttttagaaaatatacccatgtcattctagagaagtcatcaatgaagagtatgaagtacctgttgttctcatgtgatggcgtcctcattggtccacagacgtccgtatgtatcagctccaatagatcttttgctctccatgctctgcttgttgagaaaggaaatcggtgttgctaaccaaggagacatccttcacacacttcattgttctcatttatgcttggaagatctctcatcatgttcttctcatgtaacaacttcaaggcatgtgtgttgaagtggccaaatcttcgatgccatagccatgaatcatcaacttgtacc

SEQ ID NO: 8053 - DNA, 1125 bp, Glycine max
  Gm_smallRNAprecursor_886
tcattcccttcgttatcgaaccgatacaggttcgctttcctataacaacaacaacaacaagctcaattcaaattcaaaatacaacaaacaattcaagaacagtgagagtcagtgtgcgtgtgtttacgtacagatcaaggatgggatcctcttcctcttcaccagtggagacggcgacctcttcgagcttcacgatcggagcgacctgcgctcccgtgtcctcgtcctccgctggcacatggtcatcgtcgtcattgtggtggctcggtggtggccattgatgctgctggttgatacgcaatgaggcagcgaggagtgcagtgagtgcatgacttatagtgagtgagagtgcactgttgtattgctggttgctgcattattatgtggagtgttgctaggtgcacccagccttctttaaaaatggcaaaattacacctgttttctttctctctttacggatcaacttgattcgtaagaagcttgcggattaagttgatccgtaaaagacttacggatcaagttgatcagtaaaagacttactgatcaacttaatccgtaagttttaaaaatcaacttgcggatcaacttgatccgtaagaagcttacggatcaagttgatccgtaaaagacttacggatcaacttgacccgtaagtctaaaaaattaactaaaaaattaacttgcggaccaacttgatccataagaagcttgcggatcatttatatcaactgcggatcaactaaaacctatgcggatcaacctgaatgagctgggtgcacaaaaatatttttaaaaacacataggggtatttttgtcttttcatgttaaatgttgagtgcattagcaaccctattatctgctgtgtagtttatcttctgcttttcctcttctttttttttttcaaaattaaaattgagtgatgatgacaaattcacaattagaactttatttattttgataagcattgagttcaaactctatagacacttgttaatggtataattattttttgtttgaaaaatagcactaacagaacccaagaattgtatctaagctttatcttcattgtaaaaaaatcatttttttttgtaaaataggtaacttattttttattgaagaataaca

SEQ ID NO: 8054 - DNA, 1125 bp, Glycine max; identical to SEQ ID NO: 8053
  Gm_smallRNAprecursor_887

SEQ ID NO: 8055 - DNA, 1234 bp, Glycine max
  Gm_smallRNAprecursor_888
acagaaagaaacatattgttgatctcccctatgagaaagactttagggaaaaacaaattcccacaaaagccagaccgatccaaatgaatgaagaacttcttcaatactgtcaaaaagaaatcaaggatttgcttgataaaggcctaatccggaaaagcaaaagcccatggtcttgtgcggctttttatgtcaacaaacaatctgagattgagcgtggaacaccccgcttagtcataaattacaaaccactaaatcaagcattacaatggattagatatcctattccaaacaaaagagatttgcttaacaaattaaattctgcaaagatattttcaaagtttgatatgaaatctggattttggcaaatccaaatccaagaatcagataggtacaaaacagcgtttactgtacctttcgggcaatatgagtggaacgtaatgccattcggactgaagaatgccccttcagaatttcaaaaaattatgaatgatatttttaatccctattcaaaatttgtcattgtctacatagatgatgttttaatcttttcccaaaacattgaccagcatttcaaacatctccaaaccttcatccatatcatcaaacaaaatggtttggcagtctccaaatcaaaaatcaatcttttccaaacacgaattcgattccttggtcacaatatttatcaaggtacaattgttccaatcgaaaggtctattgagtttgctagcaaattccccaaccaaatcttagacaaaacccagttacaaagatttctaggttgtctaaattacgtaggtgaatttgtcccctacttaaacaatattgtcaaaccattgcatgataggctaaagaaaaatccgcctccttggtctgacctccatacccaaacagttaaagaaatcaaagtcaaagtccaatccataaaatgtctgtatcttcccattccacaggcattcaaaattgtcgaaactgatgcatcagacatcggttacggtggcatcctcaaacaacaagtacatggccaagaacatgtcatcgcatatacttcaaaacactggaatcctgcacaattaaagtattcaactgttaaaaaagaagttttagcaattgttttgtgcatttccaaatttcaatctgatttattaaatcaaaaatttttagtaagagttgactgcaaatcagccaaagatattttacagaaggatgtaaaaaaccttgcctcaaaacaaatttt

SEQ ID NO: 8056 - DNA, 1157 bp, Glycine max
  Gm_smallRNAprecursor_889
cctattccaaacaaaagagatttgcttaacaaattaaattctgcaaagatattttcaaagtttgatatgaaatctggattttggcaaatccaaatccaagaatcagataggtacaaaacagcgtttactgtacctttcgggcaatatgagtggaacgtaatgccattcggactgaagaatgccccttcagaatttcaaaaaattatgaatgatatttttaatccctattcaaaatttgtcattgtctacatagatgatgttttaatcttttcccaaaacattgaccagcatttcaaacatctccaaaccttcatccatatcatcaaacaaaatggtttggcagtctccaaatcaaaaatcaatcttttccaaacacgaattcgattccttggtcacaatatttatcaaggtacaattgttccaatcgaaaggtctattgagtttgctagcaaattccccaaccaaatcttagacaaaacccagttacaaagatttctaggttgtctaaattacgtaggtgaatttgtcccctacttaaacaatattgtcaaaccattgcatgataggctaaagaaaaatccgcctccttggtctgacctccatacccaaacagttaaagaaatcaaagtcaaagtccaatccataaaatgtctgtatcttcccattccacaggcattcaaaattgtcgaaactgatgcatcagacatcggttacggtggcatcctcaaacaacaagtacatggccaagaacatgtcatcgcatatacttcaaaacactggaatcctgcacaattaaagtattcaactgttaaaaaagaagttttagcaattgttttgtgcatttccaaatttcaatctgatttattaaatcaaaaatttttagtaagagttgactgcaaatcagccaaagatattttacagaaggatgtaaaaaaccttgcctcaaaacaaatttttgcaagatggcaagcaattttaagtgtctttgattttaatatagaatatatcaagggctcttccaactctctacctgactacctcacccgtgaatttttacagaaaattcccgatgcctcctaaggtgtctagttcctccggcagaggaggaagatccagtacgaaaggtaaagaagttctactggctctaccagagctaa

SEQ ID NO: 8057 - DNA, 1038 bp, Glycine max
  Gm_smallRNAprecursor_890
tacctttcgggcaatatgagtggaacgtaatgccattcggactgaagaatgccccttcagaatttcaaaaaattatgaatgatatttttaatccctattcaaaatttgtcattgtctacatagatgatgttttaatcttttcccaaaacattgaccagcatttcaaacatctccaaaccttcatccatatcatcaaacaaaatggtttggcagtctccaaatcaaaaatcaatcttttccaaacacgaattcgattccttggtcacaatatttatcaaggtacaattgttccaatcgaaaggtctattgagtttgctagcaaattccccaaccaaatcttagacaaaacccagttacaaagatttctaggttgtctaaattacgtaggtgaatttgtcccctacttaaacaatattgtcaaaccattgcatgataggctaaagaaaaatccgcctccttggtctgacctccatacccaaacagttaaagaaatcaaagtcaaagtccaatccataaaatgtctgtatcttcccattccacaggcattcaaaattgtcgaaactgatgcatcagacatcggttacggtggcatcctcaaacaacaagtacatggccaagaacatgtcatcgcatatacttcaaaacactggaatcctgcacaattaaagtattcaactgttaaaaaagaagttttagcaattgttttgtgcatttccaaatttcaatctgatttattaaatcaaaaatttttagtaagagttgactgcaaatcagccaaagatattttacagaaggatgtaaaaaaccttgcctcaaaacaaatttttgcaagatggcaagcaattttaagtgtctttgattttaatatagaatatatcaagggctcttccaactctctacctgactacctcacccgtgaatttttacagaaaattcccgatgcctcctaaggtgtctagttcctccggcagaggaggaagatccagtacgaaaggtaaagaagttctactggctctaccagagctaataaccaaaaag

SEQ ID NO: 8058 - DNA, 1086 bp, Glycine max
  Gm_smallRNAprecursor_891
taaatacccattccacaatccaaatcctgaaggttatgcagccacgacattatggctcaaacttaaaccaacccaaaaaattctctgcaccatttgatcctgcagggtataattattgggattacgttgacgcctggaccaatgtgttctggcatcaaaatagtaaattcaagcattcatggctgatttacttcaaaaataatactgcatataattttccaaattggttcctccaatggtggaactacttcggaccaattccacaaatatttccagaagaagtccaacagggattcgaacaattcaacaagctctataatagcaaggaatcacgaattccggcagatttaaagtatttttccagttttgccttatcatggatcttttcatggcaatacagatacggaaaaactgaaaacaacaagcaatatccaccgttacagagacatgcctttgtaaaatggtggtcacaattcgatacttcaaaggctgctccagaccaagtcaagaactggttccagagcaatcctgagttccttaaacctgctgatccggagacatctttgtttctaaattagaagtcacaactggcagcattcttagcaagctcaaaatctaaagaaagtcttgctcagaatctcaaagaagttctccaactacttcaacaggaagtggaagaagaaccttccaagaaggaagctgaatcatcagagactaatgatgaccaagaagatgatccattctaccagaatgaagatgactgttttggtatatcattggacgacgattaattagttgtaataatcatgaattattgtaactaatttgtcagtttcttttaaataatgtaatttgtaaaaagttttgtaacagttccggtaaacattaccgatactgtagaaacagtaaaatttgggtctatttaaaggagtcctcgtcccctttgtgagacaccctttcagatagtctcagaatcaggttttagagagagaagttctgcctagggaaaaactctttgtaagcttttctttcggtttcaataaatttcaagttctatttttcatatctcccttctcccctcaccga

SEQ ID NO: 8059 - DNA, 1137 bp, Glycine max
  Gm_smallRNAprecursor_892
taaatacccattccacaatccaaatcctgaaggttatgcagccacgacattatggctcaaacttaaaccaacccaaaaaattctctgcaccatttgatcctgcagggtataattattgggattacgttgacgcctggaccaatgtgttctggcatcaaaatagtaaattcaagcattcatggctgatttacttcaaaaataatactgcatataattttccaaattggttcctccaatggtggaactacttcggaccaattccacaaatatttccagaagaagtccaacagggattcgaacaattcaacaagctctataatagcaaggaatcacgaattccggcagatttaaagtatttttccagttttgccttatcatggatcttttcatggcaatacagatacggaaaaactgaaaacaacaagcaatatccaccgttacagagacatgcctttgtaaaatggtggtcacaattcgatacttcaaaggctgctccagaccaagtcaagaactggttccagagcaatcctgagttccttaaacctgctgatccggagacatctttgtttctaaattagaagtcacaactggcagcattcttagcaagctcaaaatctaaagaaagtcttgctcagaatctcaaagaagttctccaactacttcaacaggaagtggaagaagaaccttccaagaaggaagctgaatcatcagagactaatgatgaccaagaagatgatccattctaccagaatgaagatgactgttttggtatatcattggacgacgattaattagttgtaataatcatgaattattgtaactaatttgtcagtttcttttaaataatgtaatttgtaaaaagttttgtaacagttccggtaaacattaccgatactgtagaaacagtaaaatttgggtctatttaaaggagtcctcgtcccctttgtgagacaccctttcagatagtctcagaatcaggttttagagagagaagttctgcctagggaaaaactctttgtaagcttttctttcggtttcaataaatttcaagttctatttttcatatctcccttctcccctcaccgatcctgtgcggctctgccgccacttcggtttctttgttttcaaaaacctggg

SEQ ID NO: 8060 - DNA, 1121 bp, Glycine max
  Gm_smallRNAprecursor_893
cattccacaatccaaatcctgaaggttatgcagccacgacattatggctcaaacttaaaccaacccaaaaaattctctgcaccatttgatcctgcagggtataattattgggattacgttgacgcctggaccaatgtgttctggcatcaaaatagtaaattcaagcattcatggctgatttacttcaaaaataatactgcatataattttccaaattggttcctccaatggtggaactacttcggaccaattccacaaatatttccagaagaagtccaacagggattcgaacaattcaacaagctctataatagcaaggaatcacgaattccggcagatttaaagtatttttccagttttgccttatcatggatcttttcatggcaatacagatacggaaaaactgaaaacaacaagcaatatccaccgttacagagacatgcctttgtaaaatggtggtcacaattcgatacttcaaaggctgctccagaccaagtcaagaactggttccagagcaatcctgagttccttaaacctgctgatccggagacatctttgtttctaaattagaagtcacaactggcagcattcttagcaagctcaaaatctaaagaaagtcttgctcagaatctcaaagaagttctccaactacttcaacaggaagtggaagaagaaccttccaagaaggaagctgaatcatcagagactaatgatgaccaagaagatgatccattctaccagaatgaagatgactgttttggtatatcattggacgacgattaattagttgtaataatcatgaattattgtaactaatttgtcagtttcttttaaataatgtaatttgtaaaaagttttgtaacagttccggtaaacattaccgatactgtagaaacagtaaaatttgggtctatttaaaggagtcctcgtcccctttgtgagacaccctttcagatagtctcagaatcaggttttagagagagaagttctgcctagggaaaaactctttgtaagcttttctttcggtttcaataaatttcaagttctatttttcatatctcccttctcccctcaccgatcctgtgcggctctgccgccacttcggtttctttgttttcaaa

SEQ ID NO: 8061 - DNA, 1080 bp, Glycine max
  Gm_smallRNAprecursor_894
attccacaatccaaatcctgaaggttatgcagccacgacattatggctcaaacttaaaccaacccaaaaaattctctgcaccatttgatcctgcagggtataattattgggattacgttgacgcctggaccaatgtgttctggcatcaaaatagtaaattcaagcattcatggctgatttacttcaaaaataatactgcatataattttccaaattggttcctccaatggtggaactacttcggaccaattccacaaatatttccagaagaagtccaacagggattcgaacaattcaacaagctctataatagcaaggaatcacgaattccggcagatttaaagtatttttccagttttgccttatcatggatcttttcatggcaatacagatacggaaaaactgaaaacaacaagcaatatccaccgttacagagacatgcctttgtaaaatggtggtcacaattcgatacttcaaaggctgctccagaccaagtcaagaactggttccagagcaatcctgagttccttaaacctgctgatccggagacatctttgtttctaaattagaagtcacaactggcagcattcttagcaagctcaaaatctaaagaaagtcttgctcagaatctcaaagaagttctccaactacttcaacaggaagtggaagaagaaccttccaagaaggaagctgaatcatcagagactaatgatgaccaagaagatgatccattctaccagaatgaagatgactgttttggtatatcattggacgacgattaattagttgtaataatcatgaattattgtaactaatttgtcagtttcttttaaataatgtaatttgtaaaaagttttgtaacagttccggtaaacattaccgatactgtagaaacagtaaaatttgggtctatttaaaggagtcctcgtcccctttgtgagacaccctttcagatagtctcagaatcaggttttagagagagaagttctgcctagggaaaaactctttgtaagcttttctttcggtttcaataaatttcaagttctatttttcatatctcccttctcccctcaccgatcc

SEQ ID NO: 8062 - DNA, 1120 bp, Glycine max
  Gm_smallRNAprecursor_895
attccacaatccaaatcctgaaggttatgcagccacgacattatggctcaaacttaaaccaacccaaaaaattctctgcaccatttgatcctgcagggtataattattgggattacgttgacgcctggaccaatgtgttctggcatcaaaatagtaaattcaagcattcatggctgatttacttcaaaaataatactgcatataattttccaaattggttcctccaatggtggaactacttcggaccaattccacaaatatttccagaagaagtccaacagggattcgaacaattcaacaagctctataatagcaaggaatcacgaattccggcagatttaaagtatttttccagttttgccttatcatggatcttttcatggcaatacagatacggaaaaactgaaaacaacaagcaatatccaccgttacagagacatgcctttgtaaaatggtggtcacaattcgatacttcaaaggctgctccagaccaagtcaagaactggttccagagcaatcctgagttccttaaacctgctgatccggagacatctttgtttctaaattagaagtcacaactggcagcattcttagcaagctcaaaatctaaagaaagtcttgctcagaatctcaaagaagttctccaactacttcaacaggaagtggaagaagaaccttccaagaaggaagctgaatcatcagagactaatgatgaccaagaagatgatccattctaccagaatgaagatgactgttttggtatatcattggacgacgattaattagttgtaataatcatgaattattgtaactaatttgtcagtttcttttaaataatgtaatttgtaaaaagttttgtaacagttccggtaaacattaccgatactgtagaaacagtaaaatttgggtctatttaaaggagtcctcgtcccctttgtgagacaccctttcagatagtctcagaatcaggttttagagagagaagttctgcctagggaaaaactctttgtaagcttttctttcggtttcaataaatttcaagttctatttttcatatctcccttctcccctcaccgatcctgtgcggctctgccgccacttcggtttctttgttttcaaa

SEQ ID NO: 8063 - DNA, 1041 bp, Glycine max
  Gm_smallRNAprecursor_896
tgcaccatttgatcctgcagggtataattattgggattacgttgacgcctggaccaatgtgttctggcatcaaaatagtaaattcaagcattcatggctgatttacttcaaaaataatactgcatataattttccaaattggttcctccaatggtggaactacttcggaccaattccacaaatatttccagaagaagtccaacagggattcgaacaattcaacaagctctataatagcaaggaatcacgaattccggcagatttaaagtatttttccagttttgccttatcatggatcttttcatggcaatacagatacggaaaaactgaaaacaacaagcaatatccaccgttacagagacatgcctttgtaaaatggtggtcacaattcgatacttcaaaggctgctccagaccaagtcaagaactggttccagagcaatcctgagttccttaaacctgctgatccggagacatctttgtttctaaattagaagtcacaactggcagcattcttagcaagctcaaaatctaaagaaagtcttgctcagaatctcaaagaagttctccaactacttcaacaggaagtggaagaagaaccttccaagaaggaagctgaatcatcagagactaatgatgaccaagaagatgatccattctaccagaatgaagatgactgttttggtatatcattggacgacgattaattagttgtaataatcatgaattattgtaactaatttgtcagtttcttttaaataatgtaatttgtaaaaagttttgtaacagttccggtaaacattaccgatactgtagaaacagtaaaatttgggtctatttaaaggagtcctcgtcccctttgtgagacaccctttcagatagtctcagaatcaggttttagagagagaagttctgcctagggaaaaactctttgtaagcttttctttcggtttcaataaatttcaagttctatttttcatatctcccttctcccctcaccgatcctgtgcggctctgccgccacttcggtttctttgttttc

SEQ ID NO: 8064 - DNA, 1172 bp, Glycine max
  Gm_smallRNAprecursor_897
gaccaatgtgttctggcatcaaaatagtaaattcaagcattcatggctgatttacttcaaaaataatactgcatataattttccaaattggttcctccaatggtggaactacttcggaccaattccacaaatatttccagaagaagtccaacagggattcgaacaattcaacaagctctataatagcaaggaatcacgaattccggcagatttaaagtatttttccagttttgccttatcatggatcttttcatggcaatacagatacggaaaaactgaaaacaacaagcaatatccaccgttacagagacatgcctttgtaaaatggtggtcacaattcgatacttcaaaggctgctccagaccaagtcaagaactggttccagagcaatcctgagttccttaaacctgctgatccggagacatctttgtttctaaattagaagtcacaactggcagcattcttagcaagctcaaaatctaaagaaagtcttgctcagaatctcaaagaagttctccaactacttcaacaggaagtggaagaagaaccttccaagaaggaagctgaatcatcagagactaatgatgaccaagaagatgatccattctaccagaatgaagatgactgttttggtatatcattggacgacgattaattagttgtaataatcatgaattattgtaactaatttgtcagtttcttttaaataatgtaatttgtaaaaagttttgtaacagttccggtaaacattaccgatactgtagaaacagtaaaatttgggtctatttaaaggagtcctcgtcccctttgtgagacaccctttcagatagtctcagaatcaggttttagagagagaagttctgcctagggaaaaactctttgtaagcttttctttcggtttcaataaatttcaagttctatttttcatatctcccttctcccctcaccgatcctgtgcggctctgccgccacttcggtttctttgttttcaaaaacctgggtttgtaagccgtttcggtgtgcccttgatatctgctttccaagtttataattcttacgtttgattttatcatactgcattcttacttcctatctgtccgtttgatcttactccgctgatctctggtatatatatatatatatatatatatatatatatatatatatatata

SEQ ID NO: 8065 - DNA, 1051 bp, Glycine max
  Gm_smallRNAprecursor_898
tataagatattttgtgggtaaatatatgttttaaaatctgaattttgtataataatatatttattttagtaaatatttattttgtataataatctaaattttaaaatttttaatttaactattttactaaatataattagtttgtttatgttattagatttaattaaaaatgataaaactaaagcttttaacaatttatttatataagaacattatactacgtcatcaataaaatatttaaacaatgacatttgtctaaggaaaaactaagatgaggatatattaggacaattatttttgctatgaccatgttgccggcaaagtccacatttttttctacttgctcgttcatttttgtcttcgtccatctcagtaggaatgcgagttgaaacgggacgaccctttgcagtcctctttctccttggatcaggaccccactgatctccttcatattcttgtcacattgattcgtgtggcaataaaccaaaggagttgtcgtagatgtgcaaaatgtgttgtaaagtgaatatcatcggcacataggtcatgggatcaacattgacagatttacaggcagtcatgacgtgagaacacggtaaatatttagcctgaaattcaccacaatcacacttttgggattgtaacattactctctaaaccttccaggtggtctgggtgtttcaagtggggattgagtctctgttataataaaagtgtgattgtgtctgtcgaattcattttacaatgtgtgtattagattcttgttgaccactattgattgcatcgaagacgacttcagaatactgtgagccggagttgatgcaaagagttgtgcggtcttgaaataggtctcctcaaccaatgatgacaccgacaaatgtcttgtgtttttgaacatgaaattaatagactctgacaaattggtagtcatatgtccccaacgtttcccctcatcaaagcattgtacccatttttgtttgggtaattgatcaagccattcagctgcacttggcttattcgcacgaatatccccaagatgtggccagtgcat

SEQ ID NO: 8066 - DNA, 1169 bp, Glycine max
  Gm_smallRNAprecursor_899
aataatatatttattttagtaaatatttattttgtataataatctaaattttaaaatttttaatttaactattttactaaatataattagtttgtttatgttattagatttaattaaaaatgataaaactaaagcttttaacaatttatttatataagaacattatactacgtcatcaataaaatatttaaacaatgacatttgtctaaggaaaaactaagatgaggatatattaggacaattatttttgctatgaccatgttgccggcaaagtccacatttttttctacttgctcgttcatttttgtcttcgtccatctcagtaggaatgcgagttgaaacgggacgaccctttgcagtcctctttctccttggatcaggaccccactgatctccttcatattcttgtcacattgattcgtgtggcaataaaccaaaggagttgtcgtagatgtgcaaaatgtgttgtaaagtgaatatcatcggcacataggtcatgggatcaacattgacagatttacaggcagtcatgacgtgagaacacggtaaatatttagcctgaaattcaccacaatcacacttttgggattgtaacattactctctaaaccttccaggtggtctgggtgtttcaagtggggattgagtctctgttataataaaagtgtgattgtgtctgtcgaattcattttacaatgtgtgtattagattcttgttgaccactattgattgcatcgaagacgacttcagaatactgtgagccggagttgatgcaaagagttgtgcggtcttgaaataggtctcctcaaccaatgatgacaccgacaaatgtcttgtgtttttgaacatgaaattaatagactctgacaaattggtagtcatatgtccccaacgtttcccctcatcaaagcattgtacccatttttgtttgggtaattgatcaagccattcagctgcacttggcttattcgcacgaatatccccaagatgtggccagtgcatcttctccgtttatgcgtaccctgtaaatatttaatcaatgtattatgttataaaatttgattgaaagaaaattataacgaataaataaaatagattctcaccagccaacataagtggtttctttaaatgtttgcagtttgagttaccacgaagaaagttttgtgcaat

SEQ ID NO: 8067 - DNA, 1064 bp, Glycine max
  Gm_smallRNAprecursor_900
caattatttttgctatgaccatgttgccggcaaagtccacatttttttctacttgctcgttcatttttgtcttcgtccatctcagtaggaatgcgagttgaaacgggacgaccctttgcagtcctctttctccttggatcaggaccccactgatctccttcatattcttgtcacattgattcgtgtggcaataaaccaaaggagttgtcgtagatgtgcaaaatgtgttgtaaagtgaatatcatcggcacataggtcatgggatcaacattgacagatttacaggcagtcatgacgtgagaacacggtaaatatttagcctgaaattcaccacaatcacacttttgggattgtaacattactctctaaaccttccaggtggtctgggtgtttcaagtggggattgagtctctgttataataaaagtgtgattgtgtctgtcgaattcattttacaatgtgtgtattagattcttgttgaccactattgattgcatcgaagacgacttcagaatactgtgagccggagttgatgcaaagagttgtgcggtcttgaaataggtctcctcaaccaatgatgacaccgacaaatgtcttgtgtttttgaacatgaaattaatagactctgacaaattggtagtcatatgtccccaacgtttcccctcatcaaagcattgtacccatttttgtttgggtaattgatcaagccattcagctgcacttggcttattcgcacgaatatccccaagatgtggccagtgcatcttctccgtttatgcgtaccctgtaaatatttaatcaatgtattatgttataaaatttgattgaaagaaaattataacgaataaataaaatagattctcaccagccaacataagtggtttctttaaatgtttgcagtttgagttaccacgaagaaagttttgtgcaatgtggcgcaggcaaaagaaatgggatgtgtcctggacccataagttacttgggttgttgtaggcacttataattgaggagtgtcgttctgaaataagagaaatgttaatttgcggagtaacatgtcttctcaaa

SEQ ID NO: 8068 - DNA, 1041 bp, Glycine max
  Gm_smallRNAprecursor_901
tcttcctagggcaaccaggcgggaagaattttcttcaatgtatagccctcatttgtctgagtcacccgtccctggatcgttccctgagggagtaacacaactctcctttgtgcttacacgagcacctgagggaccaacctctggcttcggaggtagtgcaagtccctatgattgcatctgagactgaaactgggactgcatctggctgaaggatgccatcagctttcgagtcacttttttttttattgactcctccagttggtccctgatttgttgggtcagctgttgtaggtcttcaggaggcatggaggaagaactgcgggacgttcgtgaagccgatccaaagtattgctttatggtgacaccggctccagcagcacgaacatggccagggtgctctagtcgcccaatggcaatagtcaggacatcctgacgtgcatgggggacgaacgatccctgtgacgcctgctcgtccaaagaatcctgtacaaaacacatatttgtccaaggaattcacagaatacacaaacataattacaattattaattaaaaatgacttacaatcttgttagctatttcctttgctgcctcagacgtcatctgcccagttttcttcgtgcgggccatcttacacttcacgtggcgtctgataggagatggagggtcaatgacaccctcaatgcttccggactgggcagcttcttccagtcttttctttgtcttctcaaccatgagcttttgttctaaatattcataacccccacgagacaacacgtggggggcagtgttttgcttctggatggcctgtgcctttttccgcacattctgcaaaagttgaacattaatgaaaatgattattacaatgaattataagaagttattttgttgtggaaaacaactaaaatgaaaaagtacatacctcccacgaggggtctctgtgggtctaacaaaactgggcccatttctccttgctaatgtcgtatttttcacagacgatgtcatccacaccgtccttgtcggctgcaagtgcccatttccta

SEQ ID NO: 8069 - DNA, 1092 bp, Glycine max
  Gm_smallRNAprecursor_902
aataaaatatgtgaaggtgcagagtaaaatggaacttagagtgtacttgttggaaacccgctcaacctaggcccttagtgtgtgtcggtttgtcattggtaaactaccaatgttgttaatggcggatggcggttcatggcggaaagtcaaaaatccgccataaaaatatggcggatggcgtagcggaaaatggcggatgttatggcggacacaaaaaaaaaaaaaacatatatataaactcattgaaattgaaaaaaacaaaggattgcattcaaataaactaaaaaagtttcatgagttcatacaataatcaagtaccaacaccaaataaactcattaaagagttcaaaataagaaaatgataaaaacataatgcaaagtgcaaagtgaaggttaaggctctaatcatcttctccaatcccaacataatcatcttcgttgttatcatatggtaatggagcatctccctctccctcttccccatcagacgcctcaaaattgaccatgatttcttcttcttcagattcaacatcaatattctcctcaacatctagatcctcatcattttcttggactgctttttgcttccttgatgaagatccaacaaccattgcctgttttttagaagtttgggcagcagcaacacttgttttttgctttttccgcctagtatacatcctacactctccaacccccgaagcctgatacacagttgcccaatttagagcatcatcatcttcaaataccaaatcatttccaacatcattatcatcatcttgatccatctctcccacgagccattcattgcatacatcaatatcattaagagaaattggatcaatttcatctcttgcattatatctttgcttcaattgttggttgtatttgacaaacaccaaatcatgcaacctcttgtgctcaagcctatttctttttttggaatgaatctacaacataacaaataaatgttgatttcaatctcaaatatactccaaatataacttgatcatcaaaattaaataaaattaaaaagtatagttagagttttgtcacaattacttgctcaaacacactccaatttctttcacatcc

SEQ ID NO: 8070 - DNA, 1133 bp, Glycine max
  Gm_smallRNAprecursor_903
ggaaaatggcggatgttatggcggacacaaaaaaaaaaaaaacatatatataaactcattgaaattgaaaaaaacaaaggattgcattcaaataaactaaaaaagtttcatgagttcatacaataatcaagtaccaacaccaaataaactcattaaagagttcaaaataagaaaatgataaaaacataatgcaaagtgcaaagtgaaggttaaggctctaatcatcttctccaatcccaacataatcatcttcgttgttatcatatggtaatggagcatctccctctccctcttccccatcagacgcctcaaaattgaccatgatttcttcttcttcagattcaacatcaatattctcctcaacatctagatcctcatcattttcttggactgctttttgcttccttgatgaagatccaacaaccattgcctgttttttagaagtttgggcagcagcaacacttgttttttgctttttccgcctagtatacatcctacactctccaacccccgaagcctgatacacagttgcccaatttagagcatcatcatcttcaaataccaaatcatttccaacatcattatcatcatcttgatccatctctcccacgagccattcattgcatacatcaatatcattaagagaaattggatcaatttcatctcttgcattatatctttgcttcaattgttggttgtatttgacaaacaccaaatcatgcaacctcttgtgctcaagcctatttctttttttggaatgaatctacaacataacaaataaatgttgatttcaatctcaaatatactccaaatataacttgatcatcaaaattaaataaaattaaaaagtatagttagagttttgtcacaattacttgctcaaacacactccaatttctttcacatcctgaagcactgcaagtcaaactcaaaatcttaatagccagcttctgcaaatttggagtttgtgacccaaacattcgccaccaatatgctgcaataccaattaccaaccaagagcataacttagaattctgaattctaacactaatacataaaaaaaatagtatgataaaagtttcttactaggagaatgggttttcctttgagccattgcaaagtcggaaccaaag

SEQ ID NO: 8071 - DNA, 1165 bp, Glycine max
  Gm_smallRNAprecursor_904
ggtctttgttcttttattggttgactgccaggagctcgcctgtttaggtacgtcacaggttctcactgactgactatgctcgggttgggtcgggattggtcaagcttggtattgggcaatagcaccccacatgacgtccccaaggtctcctgacccccgcgacatatctccaggtaccactttgtggtcaacaaaaaaaagtaggaagactgactcttccacgctttctcacttcaagcttgttggattatggggtacccctcaacacccaatttaccctagaaatggctcttgctttcacctttgtcactcatttttttctcatttgctctgcccaagctttcccacaagtcctaaatgacattttaaactaggattaactcactttagcctccaattaccactaaccccaaatttagcttttcaaaccctcaaaaccttacacttttccactcacatcactaccattcccacatttaaccctaggttaactctccccatcatctctaccagttttctaccaaaaatttcagcacacaagcatcacaaaacatcattataaaaccctaaaacagaatgggttaatttggctcacatcaaacatgtcaagtttagcatgctttcaacaaattccttcacaaataactaccataaggcataaacctagtagaactacccatcatatctcccaaaaacccaatacccacgaaattcatgtgagaagaagtcaacccaaacctgaaatttgaagtcccacaacgtagaggtatgcttcacgactccgaaaatggcttccttttgcaatttggagtagaaatggtgagcaaagtttggggctttgatgggcaacaatggtggaggagaaagggagaagaaaagcaacgtgggagatgagaagagcttctgaattttctctgctgagtcaagagagagagaacgtggctttttattttaaaaagacttcctctttccttttcctaaaagctatgccacatgtctccttttgagtggagcaaaaaggggcccactttttctcttgatgtgactcatactcagccacaaggagagaaaaatttgactttttgaatgttaaaatcctaccccggtttacgtgtcatttctctggttccagtccctcgcgtttctctgcacatgtcgggacctg

SEQ ID NO: 8072 - DNA, 1165 bp, Glycine max
  Gm_smallRNAprecursor_905
cgtcttacccacatccaattttgctcaaattggatcctacaagtcctaaatcatgtataaatcatatttaaaccaaaagcaagcttcaaaccaagacaattcaaaatctaggtatctaaaacccatcaatttagtggattttcaaggtttgagaagtgaaaatgagaatggggtaattttagagtaaactctcatctcaaacaagtctacaacattaatttaaacttgctcaaactggttttacagcgaaaatttgacccctcaacacctaatttaccctagaaatggctcttgctttcacctttgtcactcatttttttctcatttgctctgcccaagctttcccacaagtcctaaatgacattttaaactaggattaactcactttagcctccaattaacactaaccccaaatttagcttttcaaaccctcaaaaccttacacttttccactcacatcactaccattcccacacttaaccctaggttaactctccccatcatctctaccagttttctaccaacaatttcagcacacaagcatcacaaaacatcattataaaaccctaaaacagaatgggtaaatttggctcacatcaaacatgtcaagtttagcatgctttcaacaaattccttcacaaataactaccataaggcataaacctagtagaactacccatcatatctcccaaaaacccaatacccacgaaattcatgtgagaagaagtctacccaaacctgaaatttgaagtcccacaacgtagaggtgtgcttcacgactccgaaaatggcttccttttgcaatttggagtagaaatggtgagcaaagtttggagctttgatgggcaacaatggtggaggagaaagggagaagaaaagcaatgtgggagatgagaagagcttctgaattttctctgctgagtcaagagagggagaacctggcttttattttataaagacttcctctttccctttcctaaaagctatgccacatgtctccttttgagtggagcaaaaaggggcccactttttctcttgatgtgactcatactcagccacaaggagagaaaaatttgactttttgaatgttaaaatcctgcctcggtttacgtgtcatttctctggttccagtccctcgcgtttctctgcacccgtcggggctcat

SEQ ID NO: 8073 - DNA, 1189 bp, Glycine max
  Gm_smallRNAprecursor_906
gatggaggccgaaaacacatacgtttcacaggagatgcaaagagtgtactattactctccaagacgtctctgtattgttaggtatacgtgtggatggtttaccattaatcggtccaacaaatcttaattgggctgatttatgtgaggaattattgggagtcagaccacaagaaggtgaaattaaaggtagtgtggttaaattaagttggctggctcaccattttgcacaaataaataacgacgacgacgaagaacaagtacgaaggtttgctcgtgcatggatactgaggttcattggaggtgccttgttcgttgacaaaagcagtaacaaagtttcgctaaggtaccttcaatttttacgtgactttcaagattgttgcacatatgcatggggagctgccgtacttgcttttctatacagagaaatgtgcagtgccaccgattataaaactaatcaatcggaggtatgtgcatcttactacaaatgtgggcatgggaatgatgtccaaccttggctccaaaaaggactccttcccaagtagaaaataaaccattggggcacaggttagtcatttttaaaagcgtctttcatttcaatagaataaatggttttagggtatattaaattttaatctttgcaggtggctgcgacgtggaaaccaacatatcggcaatgatgatgtgagagtttttcgtcgcaagttggatattatgaaacatcatgaggtaagaacatggtattgtatttgtaaaataaaaaatgatatgtgctattttactaaaatgttgacaactatgttgttatatccagtttgtgtgggaaccttacacaacaaccgttatatcattgttgcctcccatttgtgtactcggaagtatcgcgtggtacgcggtagtgccactaatttgtttccaagttattgagtggcaccaaccggacaaagtattaagacaatttgggatacaacaaccaattccagagtctccttcgcaacccttaaacattcatggcataacattaaaagggaaacatgacgaaaattggggacaattgttcgccccaatgattgatcagcggaacaatcgtcatgcttttagggtcgacgcttatccccgacaagaaggcctattgagctttaactcggactacatggtctggtataggcgaaagacaaagatgtttgttgac

SEQ ID NO: 8074 - DNA, 1062 bp, Glycine max
  Gm_smallRNAprecursor_907
ggaagtaagaatgatgcaatatgaaagatgaagatgcagttctcaaaacaaatatcaagggcacacctttacaggcttacaaattccagggttttgcaaaaaaagaaaccgaagtggcggcagagccgcacaggatcgatagaaagagggagaagggagatgatagaaaacttcaaatttattgaaattggaagaagagcttacaaagttgttcttatcaaagcacctctctctcaagactcctgaaaatggctaaatcaaaaggtgcctcacaatatggctgaggactccatatataaccaaaattttccataagaccggtagtttctggtagttttaaccaaaactatttgactgtttgttacaagactattggttttgaccggtacttatttgctacaggacaggtgatacttatttgctataggacaggtagtattgtctggaactatttcaaaatacaaacggttatgtgaccgtaattacaattaaattttaatctaaacaaataccaaaacaatcatcttcattctggtaaaaaaggatcttcttcttcttcaacagaacttgtttcttccttctttgaggatgaaccttcttcttcttgttgcaatatttgcaaaacttctttaagatttttagttaggacttcttttgattttgatcctgctacaaatgcagccagatgggacttttggttcaaaaacacaaaagtctctagatcagctgctttgagaaattctggaagggattggaaccaaagtttcacttattctggatcagccttggacgaatcaaactgagtccaccattttataaacgcatgcctttgtagtgatggatattggtttgttttcttaattttactataacaatattgccatgaaaaaattgatgacagagcaaaactggaaaaatatctaagatttgctagaattcgtgattcctgagaattgtattattttttaaattgagcaaatccttgttgaacctgctctgagaaaatcttcgaaattggaccaaagaaataccaccattgtaggaaccaatttagattatgtt

SEQ ID NO: 8075 - DNA, 1130 bp, Glycine max
  Gm_smallRNAprecursor_908
ttacatctttacaagattggtgctgaccactttgattccgactttacaatggctcaaatgaaaacccattctcctagtaagaaacttttatcatactattttttttatgtattagtgttataattcaaaattctaagttatgctcttggttggtaattggtattgcagcatattggtggcgaatgtttgggtcacaaactccaaatttgcaaaagctagctattaaaattttgagtttgacttgcagtgcttcaggatgtgaaagaaattggagtgtgttagagcaagtaattgtgacaaaactctaactatactttttaattttatttaattttgatgatcaaattttatttggagtatatttgagattcatttatttgttatgttgtagattcattccaaaaaaagaaatagggttgagcacaagaggttgcatgatttggtgtttgtcaaatacaaccaacaattgaagcaaagatataatgcaagagatgaaattgatccaatttctcttaatgatattgatgtatgcaatgaatggctcgtgggagagatggatcaagatgatgataatgatgctggaaatgatttggtatttgaagatgatgatgctctaaattaggcaactgtgtatcaggcttcgggggttggagagtgtaggatgtatactaggcggaaaaagcaaaaaacaagtgttgctgctgcccaaacttctaaaaaacaggcaatggttgttggatcttcatcgaggaagcaaaaagcagtccaagaaaatgatgaagatctagatgttgaggagaatattgatgttgaatctgaagaagaagaaatcatggtcaattttgaggcgtctgatgggaaagagggagagggagatgctccattaccatatgataacaacgaagatgattatgttgggattggagaagatgattagagcctcaaccttcactttgcactttgcattatgtttttatcattttcttattttgaaatttgaactctttaatgagtttatttggtgttggtacttgattattgtatgaactcatgaaacttttttagtttatttgaatgcaatcctttgtttttttcaatttcaatgagtttatatatatgttttttttttt

SEQ ID NO: 8076 - DNA, 1195 bp, Glycine max
  Gm_smallRNAprecursor_909
ttccccacacaatttgacctctcattgattgtttcaagacgatgtgattggacaatgctttctacaagatgatttgattgaacactatttttcaaattatgaaaaccaaacgtaattaattaagacttaatctaaactgtttatattgtcagtgcaatctcaatcgttggtatttgtcaagggaaaacagtagatcatctaacatagatatatatatatatatatatatatatatatttgtaagccgtttcggtgtgcccttgatatctgctttacagtttatatttcgctttttcatttatcatactgcattcttacttcctatctgtctgtttgatcttattccgctgatctctggtatcagagcctgatggggaagtaggaatactgtccgtaaggacatatgttaacaagttttatggatctggaactaaagtcttgtatagtacacgtaatattttactttgatttgtacagtaagtgtttgaacagtacttcctggaagtacagcagtctaatattttagttgaatggtactgtagcagtaagacccgtgtgggataaagggcggtaaggctaaggtgtattgtttaaccaaaatatcaagacataatacactggtggctataggattgccgttcaaactattattaaaaaaaaaagagtttttcttaaaaataattcagatccagaaaaattttgtgacatatttacttacggaggtatttctatggaaccaaatgaaggcaaagatattagagaatattataatcatgtctagactattacgatctttttcccgtatctcttttcgctcaaactcctcctcatccccttcttcaagaaactccaatttattaaatgatcaagataaccagacccaagaggtcgccccaaaacacaatctcttcgatgaggaagtccgattcgaagatatcaatcaaaacatggatgactggaacattccagaaatccctcaggatcaactatacgttcctgaaacaataaaggacaaacacaactttgattacataatcaaaacaatagaaaacaatattcctctaggacaagatataggggaagaatttcatttactttcaaaaaattcaatttatgaacatagccgtaagtataaatatctacacatcggttgtgtacaagtagccatcaagcccttaattgacatgggcataga

SEQ ID NO: 8077 - DNA, 1179 bp, Glycine max
  Gm_smallRNAprecursor_910
ttaatctaaactgtttatattgtcagtgcaatctcaatcgttggtatttgtcaagggaaaacagtagatcatctaacatagatatatatatatatatatatatatatatatttgtaagccgtttcggtgtgcccttgatatctgctttacagtttatatttcgctttttcatttatcatactgcattcttacttcctatctgtctgtttgatcttattccgctgatctctggtatcagagcctgatggggaagtaggaatactgtccgtaaggacatatgttaacaagttttatggatctggaactaaagtcttgtatagtacacgtaatattttactttgatttgtacagtaagtgtttgaacagtacttcctggaagtacagcagtctaatattttagttgaatggtactgtagcagtaagacccgtgtgggataaagggcggtaaggctaaggtgtattgtttaaccaaaatatcaagacataatacactggtggctataggattgccgttcaaactattattaaaaaaaaaagagtttttcttaaaaataattcagatccagaaaaattttgtgacatatttacttacggaggtatttctatggaaccaaatgaaggcaaagatattagagaatattataatcatgtctagactattacgatctttttcccgtatctcttttcgctcaaactcctcctcatccccttcttcaagaaactccaatttattaaatgatcaagataaccagacccaagaggtcgccccaaaacacaatctcttcgatgaggaagtccgattcgaagatatcaatcaaaacatggatgactggaacattccagaaatccctcaggatcaactatacgttcctgaaacaataaaggacaaacacaactttgattacataatcaaaacaatagaaaacaatattcctctaggacaagatataggggaagaatttcatttactttcaaaaaattcaatttatgaacatagccgtaagtataaatatctacacatcggttgtgtacaagtagccatcaagcccttaattgacatgggcatagatgcagcagttttaatgtgtctaagagacattaggcataatcaatttgaagactccctaatatgaacagtcgaaaccagcctaggacaaggtccaatatattttaactgtt

SEQ ID NO: 8078 - DNA, 1157 bp, Glycine max
  Gm_smallRNAprecursor_911
acatatgttaacaagttttatggatctggaactaaagtcttgtatagtacacgtaatattttactttgatttgtacagtaagtgtttgaacagtacttcctggaagtacagcagtctaatattttagttgaatggtactgtagcagtaagacccgtgtgggataaagggcggtaaggctaaggtgtattgtttaaccaaaatatcaagacataatacactggtggctataggattgccgttcaaactattattaaaaaaaaaagagtttttcttaaaaataattcagatccagaaaaattttgtgacatatttacttacggaggtatttctatggaaccaaatgaaggcaaagatattagagaatattataatcatgtctagactattacgatctttttcccgtatctcttttcgctcaaactcctcctcatccccttcttcaagaaactccaatttattaaatgatcaagataaccagacccaagaggtcgccccaaaacacaatctcttcgatgaggaagtccgattcgaagatatcaatcaaaacatggatgactggaacattccagaaatccctcaggatcaactatacgttcctgaaacaataaaggacaaacacaactttgattacataatcaaaacaatagaaaacaatattcctctaggacaagatataggggaagaatttcatttactttcaaaaaattcaatttatgaacatagccgtaagtataaatatctacacatcggttgtgtacaagtagccatcaagcccttaattgacatgggcatagatgcagcagttttaatgtgtctaagagacattaggcataatcaatttgaagactccctaatatgaacagtcgaaaccagcctaggacaaggtccaatatattttaactgttatccaaacaaaacagtgagtctgatggacagaaacattcttgactctctgttcttaaacatccactttcatggccttgacatgaaagaaggatcaatcccagcagccttaatttataggatccaatacaaggtcatgaatacttgtgcatctagagtcctgttaaaacctcaaaaaggagaaacaactttgattatcactgatatgacaaaggctaacgtttctctcccgagaaaaataaaatgggatgaa

SEQ ID NO: 8079 - DNA, 1198 bp, Glycine max
  Gm_smallRNAprecursor_912
gacagaaagaaacatattgttgatctcccctatgagaaagactttagggaaaaacaaattcccacaaaagccagacaatccaaatgaatgaagaacttcttcaatactgtcaaaaggaaatcaaggatttgcttgataaaggcctaatccagaaaagcaagagcccatggtcttgtgcggctttttatgtcaacaaacaatctgagattgagcgtggaacaccccgcttagtcataaattacaaaccactaaatcaagcattacaatggattagatatcctattccaaacaaaaaagatttgcttaacagattaaattctgcaaagatattttcaaaatttgatatgaaatctggattttggcaaatccaaatccaagaatcagataggtacaagacagcgtttactgtacctttcggggaatatgaatggaatgtaatgccattcggactaaagaatgccccttcagaatttcaaaaaattatgaatgacatttttaatccctattcaaaatttgtcattgtctacatagatgatgttttaatcttttcccaaaacattaaccaacatttcaaacatctccaaaccttcatccatatcatcaaacaaaatggtttggcagtctccaaatcaaaaatcaatcttttccaaactcgaattcgattccttggtcacaatatttatcaaggtacaatcattccaatcgaaaggtcaatagaatttgctagtaaattccccaaccaaatcttagacaaaacccagttacaaagatttctaggttgtctaaattacgtaggagaatttgtcccctacttaaacaatattgtcaaaccattgcatgataggctaaagaaaaatccgcctccttggtctgacctccatacccaaacagttaaagaaatcaaagtcaaagtccaatccataaaatgtctgtatcttcccattccacaggcattcaaaattgtcgaaactgatgcatcagacatcggttacggtggcatcctcaaacaacaagtacatggtcaagaacatgtcattgcatatacttcaaaacactggaatcctgcacaattaaagtattcaactgtcaaaaaagaagttttagcaattgttttgtgcatttccaaatttcaaactgatttattaaataaaaaaattttagtaagggttgactgcaaatcagccaaagacattttaca

SEQ ID NO: 8080 - DNA, 1234 bp, Glycine max
  Gm_smallRNAprecursor_913
gacagaaagaaacatattgttgatctcccctatgagaaagactttagggaaaaacaaattcccacaaaagccagacaatccaaatgaatgaagaacttcttcaatactgtcaaaaggaaatcaaggatttgcttgataaaggcctaatccagaaaagcaagagcccatggtcttgtgcggctttttatgtcaacaaacaatctgagattgagcgtggaacaccccgcttagtcataaattacaaaccactaaatcaagcattacaatggattagatatcctattccaaacaaaaaagatttgcttaacagattaaattctgcaaagatattttcaaaatttgatatgaaatctggattttggcaaatccaaatccaagaatcagataggtacaagacagcgtttactgtacctttcggggaatatgaatggaatgtaatgccattcggactaaagaatgccccttcagaatttcaaaaaattatgaatgacatttttaatccctattcaaaatttgtcattgtctacatagatgatgttttaatcttttcccaaaacattaaccaacatttcaaacatctccaaaccttcatccatatcatcaaacaaaatggtttggcagtctccaaatcaaaaatcaatcttttccaaactcgaattcgattccttggtcacaatatttatcaaggtacaatcattccaatcgaaaggtcaatagaatttgctagtaaattccccaaccaaatcttagacaaaacccagttacaaagatttctaggttgtctaaattacgtaggagaatttgtcccctacttaaacaatattgtcaaaccattgcatgataggctaaagaaaaatccgcctccttggtctgacctccatacccaaacagttaaagaaatcaaagtcaaagtccaatccataaaatgtctgtatcttcccattccacaggcattcaaaattgtcgaaactgatgcatcagacatcggttacggtggcatcctcaaacaacaagtacatggtcaagaacatgtcattgcatatacttcaaaacactggaatcctgcacaattaaagtattcaactgtcaaaaaagaagttttagcaattgttttgtgcatttccaaatttcaaactgatttattaaataaaaaaattttagtaagggttgactgcaaatcagccaaagacattttacagaaagatgtaaaaaaaccttgcctcaaaacagattt

SEQ ID NO: 8081 - DNA, 1038 bp, Glycine max
  Gm_smallRNAprecursor_914
tacctttcggggaatatgaatggaatgtaatgccattcggactaaagaatgccccttcagaatttcaaaaaattatgaatgacatttttaatccctattcaaaatttgtcattgtctacatagatgatgttttaatcttttcccaaaacattaaccaacatttcaaacatctccaaaccttcatccatatcatcaaacaaaatggtttggcagtctccaaatcaaaaatcaatcttttccaaactcgaattcgattccttggtcacaatatttatcaaggtacaatcattccaatcgaaaggtcaatagaatttgctagtaaattccccaaccaaatcttagacaaaacccagttacaaagatttctaggttgtctaaattacgtaggagaatttgtcccctacttaaacaatattgtcaaaccattgcatgataggctaaagaaaaatccgcctccttggtctgacctccatacccaaacagttaaagaaatcaaagtcaaagtccaatccataaaatgtctgtatcttcccattccacaggcattcaaaattgtcgaaactgatgcatcagacatcggttacggtggcatcctcaaacaacaagtacatggtcaagaacatgtcattgcatatacttcaaaacactggaatcctgcacaattaaagtattcaactgtcaaaaaagaagttttagcaattgttttgtgcatttccaaatttcaaactgatttattaaataaaaaaattttagtaagggttgactgcaaatcagccaaagacattttacagaaagatgtaaaaaaaccttgcctcaaaacagatttttgcaagatggcaagcaattttaaatgtctttgattttaatatagaatatatcaagggctcttccaactctctacctgactacctcacccgtgaatttttacagaaaattcccgatgcctcctaaggtgtctagttcctccggcagaggaggaagatccagtacaaaaggaaaagaggttctactagctctaccagagccaataaccaaaaa

SEQ ID NO: 8082 - DNA, 1108 bp, Glycine max
  Gm_smallRNAprecursor_915
aaatgtctttgattttaatatagaatatatcaagggctcttccaactctctacctgactacctcacccgtgaatttttacagaaaattcccgatgcctcctaaggtgtctagttcctccggcagaggaggaagatccagtacaaaaggaaaagaggttctactagctctaccagagccaataaccaaaaaggcaactacaacatcttctgggtcacctacctagactgggtcatcaacccagaaaggaaagcttgaagggtcattgacccagacaaataccgtcaaacctgagtcatcaactcaggaatccccaaaaccaacaacaaccaaacagaccgtggctgactatgcctggtcaatacaaactctcttggccttagaggatataggcctcactaaaataccaaaattagccaaaaagacctgggcagaaatggcctcagaatcagacgaagattctgaaacagatctacaaaaacaaatccaaaaggccaaacagaccaaaactgtctgtaaccaaaaaccaagccaatcgttgactcaacaagaatcaacaccacaacccagcaacagttatatttcaaaaaacaaatttttcaatgttttacaaatggaaccagaatactgggacaagaatcctttcaaagcaaccgccaaagtattccccccgggattccattgcaggccaatagccacaaataaaacccggaaattctatgaattcattcaaatagatacaaactcagtatctattaaacacttcaaagaccctttcaaatagtctcagaatcaggtttttagagagagaagctctgcctagggaaaaactctttgtaagcttttctttcggtttcaataaatttcaagttcggtttcaataaatttcaagttctgttttcaaaaacctgggtttgtaagccgtttcggtgtgcccttgatatctgctttacagtttatatttcactttttcatttatcatactgcattcttacttcctatctgtccgtttgatcttattccgctgatctatatatatatatatataggtaaaacagtaagggtttgatgcaattcatgcctagagaaaggtaacaacccatcttttga

SEQ ID NO: 8083 - DNA, 1086 bp, Glycine max
  Gm_smallRNAprecursor_916
tcttcaaaagaacaaggtgagaatcaacctgctgacgtccaaccaccttcgactgatgttggcggcgctgaaacagaaactactccctctattgctgagatgggcaaccttgtcgaacaaccggacttaccacaagaacaccctaccgtcgaggtatcattcttaatatgattttaatcataactaatacgaaactatttgttaaccttttccatgacaattcgaatcaggtacaacaaaatgtttctgtagaagaaataccctcatgtgctcgaacctctcctgctcctgagacggatgcagtgaatgttgaggaacagggtgaaggtcaaggtattggacccagcagtcctcagggatcgaatcagagaagttcatctgaagaacacttttccgatgaagaggccatacaagaggctgaagctggaggttcagacattttcccagcgtcttcgacatctaagctttccgctagcatagggatcgcagaggatacattcattcaaatgcaagacgaagaccctgctgcagcccttcgactcctgctgaacaccagtcaagccaacacctcaagtgaaaagaatcctggtgcttcgtcctcatctgatgctgatataacctctacagtacgccaagattgcctgcttttgaagttatcaatggaatacgcacgggcagacgtacttaaatccattgaagagaacccttctgctgcttttgggcacctgaactttttgaagaaattgcataacccccttacttctgatgagattctgggcaaagttatacaaatcgagtccattatcgatcaatttgcaaatactgtgcagaaaaaacgcgaaaatggcgccagactcgatgcccagaaacaggcacatatccttctgctcgagaaagcccgagcggctcaacgtgaagtcgagcgtctcaccaaagaggcgaaagaaggatcttctgatatcaaagcctgtgatgataacatctcctcctgggaggcaactattacaaatttactgtctcaggtcgacgatctaaggcagaaaattgtaacagagcagaccaaacgcaaagaactccaggagaagg

SEQ ID NO: 8084 - DNA, 1110 bp, Glycine max
  Gm_smallRNAprecursor_917
tgatcaacatttggcaaagggactgcttcgatccattttgtaaagtaatcgataccaactataatataacgctggttcttagaagaagcaggcttgatttcgccaattaaatccaaagcccatcctctgaaaggccaaggtttaattatggagtgtaactcactagcaggtacatgctgtatccctgcatgcttttggcattcctgacagcctttagcaaattctatgcagtcttttaacatcgaaggccaatacaaaccttgtcgaaataaaagccatttcattttatggcctgcttgatgtgatccacaagccccactgtgaacatgggaaactgctaagtatgcttctgattcatttagacattttaacaacactccttctgcagtctttttaaacaaatcatttcccataatcacgtaatttaaggccctatatttaatctttcgagccacattgcctattggattttccaaatattcaataatggactttctccaatcattatctaacatattgtcaatggccaaaatttgaatttcttcctgaagatcattcatactttcatcttcattattttgtggtatacttgcccccacaagttttggcattggcaatttagtgcttaatggctctggtaacaccagtttatcttttatttcgatcaactgagttaacttttccttcgacattttgtaccctgaagctatttgggctaaatcatttgcttctcggttttcttgtcgaggtacatgctcaatgttaatataatcgaaataattcagaagagaacttgctataacaaaatatttggctaagtgttcattaacacatttgtattcttgtgttaattgcctcaacactaattctgaatcacctcttatattaacatttcttgcccccaggctaattaaaatttcaaggcctgtaattagagcttcatactcagcctcattattagaacaaagccctttgattttatacttgaatttagttggaattttattgggggatattattaaaactccaattccagttccatgtttgtgtttcgaaccatcgaaatacaaaatccatggctctgtatcgacatagtcttgcgacatttcg

SEQ ID NO: 8085 - DNA, 1083 bp, Glycine max
  Gm_smallRNAprecursor_918
caaagggactgcttcgatccattttgtaaagtaatcgataccaactataatataacgctggttcttagaagaagcaggcttgatttcgccaattaaatccaaagcccatcctctgaaaggccaaggtttaattatggagtgtaactcactagcaggtacatgctgtatccctgcatgcttttggcattcctgacagcctttagcaaattctatgcagtcttttaacatcgaaggccaatacaaaccttgtcgaaataaaagccatttcattttatggcctgcttgatgtgatccacaagccccactgtgaacatgggaaactgctaagtatgcttctgattcatttagacattttaacaacactccttctgcagtctttttaaacaaatcatttcccataatcacgtaatttaaggccctatatttaatctttcgagccacattgcctattggattttccaaatattcaataatggactttctccaatcattatctaacatattgtcaatggccaaaatttgaatttcttcctgaagatcattcatactttcatcttcattattttgtggtatacttgcccccacaagttttggcattggcaatttagtgcttaatggctctggtaacaccagtttatcttttatttcgatcaactgagttaacttttccttcgacattttgtaccctgaagctatttgggctaaatcatttgcttctcggttttcttgtcgaggtacatgctcaatgttaatataatcgaaataattcagaagagaacttgctataacaaaatatttggctaagtgttcattaacacatttgtattcttgtgttaattgcctcaacactaattctgaatcacctcttatattaacatttcttgcccccaggctaattaaaatttcaaggcctgtaattagagcttcatactcagcctcattattagaacaaagccctttgattttatacttgaatttagttggaattttattgggggatattattaaaactccaattccagttccatgtttgtgtttcgaaccatcgaaatacaaaatccatggctctgtatcgacatagtc

SEQ ID NO: 8086 - DNA, 1114 bp, Glycine max
  Gm_smallRNAprecursor_919
tatctaacatattgtcaatggccaaaatttgaatttcttcctgaagatcattcatactttcatcttcattattttgtggtatacttgcccccacaagttttggcattggcaatttagtgcttaatggctctggtaacaccagtttatcttttatttcgatcaactgagttaacttttccttcgacattttgtaccctgaagctatttgggctaaatcatttgcttctcggttttcttgtcgaggtacatgctcaatgttaatataatcgaaataattcagaagagaacttgctataacaaaatatttggctaagtgttcattaacacatttgtattcttgtgttaattgcctcaacactaattctgaatcacctcttatattaacatttcttgcccccaggctaattaaaatttcaaggcctgtaattagagcttcatactcagcctcattattagaacaaagccctttgattttatacttgaatttagttggaattttattgggggatattattaaaactccaattccagttccatgtttgtgtttcgaaccatcgaaatacaaaatccatggctctgtatcgacatagtcttgcgacatttcgaccactgagtgatctacaataaaatctgccacaatttgacccttaacagatttcaaaggcttgtacgttaaagaatattctgttaatgctaaagcccattttccaattctactgtgtaaaatcggttttgacaacatgtgcttaataacatcataatgagaatacacataaacatcaacaggctttatatattgcttaagttttgcacaagagaaatacagacaaagacaaagtttttctatggcagtatatctagtttctgcatcatttagtacacgactaagataataaattgcatgttctatgccatcatcatcttcctgagccaacatgctaccaatggtcttgtcagacgcagcaatatacaatttcatagacttgtttcgactaggaggcattaacacaggaggcttgatcagatattctttaatttcatcgaaagccttttgatgctcttcattccatttgaatggttcatcttttttgagtcgaagtaatggcgaaaaaat

SEQ ID NO: 8087 - DNA, 1157 bp, Glycine max
  Gm_smallRNAprecursor_920
caattctactgtgtaaaatcggttttgacaacatgtgcttaataacatcataatgagaatacacataaacatcaacaggctttatatattgcttaagttttgcacaagagaaatacagacaaagacaaagtttttctatggcagtatatctagtttctgcatcatttagtacacgactaagataataaattgcatgttctatgccatcatcatcttcctgagccaacatgctaccaatggtcttgtcagacgcagcaatatacaatttcatagacttgtttcgactaggaggcattaacacaggaggcttgatcagatattctttaatttcatcgaaagccttttgatgctcttcattccatttgaatggttcatcttttttgagtcgaagtaatggcgaaaaaatctgagctttgccacttagattcgaaatgaatcgcctcaagaagttgatttttcctagcaaagactgaagctgttttttagtcgaaggaggcttcgtctcaagaatagcctttgtcttattttgatttatctcaatgccttttttatgcaccacaaaaccaaggaaatctcctgcacgcacacaaaaagcacattttaatggattcatttttaatccatgtttcctcattcgttcgaaagattgcctaagataatccaaatggctatcttctgaggaggatttgatgattatatcatcaatataaatttgcataaatgtgtcaataaaatcatgaaacatggaattcatagccctttgataagtggccccagcatttttcaacccaaagggcataaccacccattcataagtgcctaaagcaccagggcatcgaaatgctgttttcgacacatcattttcagcaataaatatttggttataaccagaataaccatctaacatgcttaaaaattcgaaaccagctgccgaatctaccaacatttccgctactggcatagcatattcatctttaggtgtagcattatttaaatccctaaaatctatgcatactctaagagttccattctttttaatgacagggactatatttgctaaccattcgacatacctggcagctctgatgaatttacacctcagcagcctttcgatctcttccttgatcttggacatgatttctggtgcgaatcttctt

SEQ ID NO: 8088 - DNA, 1039 bp, Glycine max
  Gm_smallRNAprecursor_921
atttctggtgcgaatcttcttggtagttgttttactggtctttttccctccttaataggtaacttcatttcgaccatttttctgcttaacccaggcatttcgtggtaatcccaagcaaaacagtctttaaactctctaagaagaggcaccagcttttcttttaaacttgaggtgatattggcactgatataagttggccttttaatcgagccatctccaatatcgacctcttccaaaggatcttgagcctgcatctttggcgcctcacttatgggatctttctcaaaacccagcggctcatcatcataaatacaatccagtcttcgatcctttgtttctttattttcatgatcttcgatcttggcttcaactgccatattttgttgagattcagcctcaaaggccgtatttagtctattttcggccatataagccgtaattctggcccatgcagtggcctcagtcatattaatcttcatatatattccacccagttggtggaatgactccatcttcagagggaacagcatcaatttcctccctctcccatataaacccataggtaggatggagtttgacagagtggacaacattgtcactcgattcgacaacagcctccttgtcaccacaaggtgctatgttagccaactttttgtcaaaggtttgtgcagtaacattatcgacctctgacttatagaagctttgatccgcctctatattttccacaatcccatcctccctccagataatgagcttctggtgaagggtagatggcacagctccaactccatgaatccactcccttcctaatagcaagttaaaattagccttagactgtatcaccaggaaaagagttggtcgaactatactgcctacagcaacatctacttgaatggctcccaaagaatagccagttttaccctcataattcgaaagcacaatgttgtgggcagatagatcagtgtcatgtttcccgatcttgtagagcatagatcgaggcattaagttgacagccgctcctccatcaatgagcactttg

SEQ ID NO: 8089 - DNA, 1053 bp, Glycine max
  Gm_smallRNAprecursor_922
gctgagtgacccgtccctggatcgttccctgagggagcaacacaactctcctttgtgctgacacgaggacctgagggaccaacctctggctctgaaggtagtgcaagtccctgtgattgcatctgagactgaaactggtactgcatctgtctgaaggatgccatcatctttcgagtcactttttctgtgattgggtcagttgttctaggtcttcaggaggcatggaggaagaactgcgagacgttcgtgaagccgatccaaagtattgctttatggtgacaccggctccaacaacacgaacatggccagggtgctctggtcgcccaatggcagcagtcaggatatcctgacgtccatgggggacgaacgatccctatgacgcctgctcgtccaaagaatcttataccgaacacatatttgtccaaggaattcacagaatacacaaagataattacaattattaattaaaaatgactttcaatcctgtcagctatttcctttgctgcctcagacgtcatctgtccagttttcttcgtgcgagccatcttccatttcacgtggcgtctgatgggagatggagggtcaatgatgccctcagtgcttctagactgggcaacttcttccagtcttttctttgtcttctcagccatgagcttttattctaaatattcataactcccacgagacaatatgtgggggcagtgttttgcttctgggaggcctgtgccttttttcgcacatcctgcataagtttaacattaatgaaaatgattattacaataaattataataagtgattttgttgtggaaaacaactaaaatgacaaagtacatacctcccatgaggggtctctgcgggtctgacaaaactgggtacatttctccttgctaatgtcatatttttcacagacaatgtcgtctacaccgtccttgtctgctgcaagtgcccatttcctagtcaagtcagatttaaactgcctccagcgctcgtcgacaatctgaagaattttcttctttgtcctactgtcagaagcttcagggatttcaaattcc

SEQ ID NO: 8090 - DNA, 1110 bp, Glycine max
  Gm_smallRNAprecursor_923
tgatcaacatttggcaaagggactgcttcgatccattttgtaaagtaatcgataccaactataatataacgctggttcttagaagaggcaggcttgatttcaccaattaagtccaaagcccatcctctgaaaggccaaggtttgattatggagtgtaactcactagcaggtaaatgctgtatccctgcatgcttttggcattcctgacagcctttagcaaattctatacagtcttttaacatcgaaggccaatacaaaccttgtcgaaataaaagccatttcattttatggcctgcttgatgtgatccacaagccccactgtgaacatgggaaactgccaagtatgcttctgattcacttagacattttagcaacactccttctgcagtctttttaaacaaatcatttcccacaatcacgtaatttaaagccctatatttgatctttcgagccacattgcctattggattttccaaatattcaataatggactttctccaatcattatctaacatattgtcaatggccaaaatttgaatttttccctgaagatcattcatactttcatcttcattattttgtggtatacttgcccccacaagttttgacattggcaatttagtgcttaatggctctggtaacaccagtttatcttttatttcgatcaactgagttaacttttccttcgacattttgtaccctgaagctatttgggctaaatcatttgcttctcggttttcttgtcgaggtacatgctcaatgttaatataatcgaaatgattcagaagagaatttgctataacaaaatattttgctaagtgttcattaacacatttgtattcttgtgttaattgcctcaacactaattctgaatcacctcttatattaacatttcttgcccccaggctaattaaaatttcaaggcctgtaattagagcttcatactcagcctcattattagaacaaagccctttgattttatatttgaacttagttggaactttattgggggatattattaaaactccaattccagttccatgtttgtgtttcgatccatcgaaatacaaaatccaaggctctgtatcgacataatcttgcggcatctcg

SEQ ID NO: 8091 - DNA, 1176 bp, Glycine max
  Gm_smallRNAprecursor_924
agccacaatctgacccttaacagatttcaaaggcttgtacgttaaagaatattctgttaatgctaaagcccattttccaattctactgtgtaaaatcggttttgacaacatgtgcttaataatatcataatgagaatacacataaacatcaacaggctttatatattgcttaagttttgcacaagagaaatacagacaaagacagagtttttctatggcagtatatctagtttctgcatcatttagtacacgactaagataataaattgcatgttctatgccatcatcatcttcctgagccaacatgctaccaatggtcttgtcagacgcagcaatatacaacttcatagacttgtttcgactaggaggcattaacacaggaggcttgatcagatattctttaatttcatcgaaagccttttgatgctcttcattccatttgaatggttcatctttcttgagtcgaagtaatggcgaaaaaatctgagctttgccacttagattcgaaatgaatcgcctcaagaagttgatttttcctagcaaagactgaagctgttttttggtcgaaggaggcttcgtctcaagaatagcctttgtcttattttgatttatctcaatgccttttttatgcaccacaaaaccaaggaaatctcctgcacgcacacaaaaagcacactttaatggattcatttttaatccatgtttcctcattcgttcgaaagattgcctaagataatccaaatggctatcttctgaggaggatttgatgattatatcatcaatataaatttgcataaatgtgtcaataaaatcatgaaacatggaattcatggccctttgataagtggccccagcatttttcaacccaaagggcataaccacccattcataagtgcctaaagcaccagggcatcgaaatgctgttttcgacacatcattttcagcaataaatatttggttataaccagaataaccatctaacatgcttaaaaattcgaaaccagctgccgaatctatcaacatttccgctactggcatagcatattcatctttaggtgtagcattatttaaatccctaaaatctatgcatactctaagagttccattctttttaatgacagggactatatttgctaaccattcgacatacctggcagccctgatgaatttacacct

SEQ ID NO: 8092 - DNA, 1157 bp, Glycine max
  Gm_smallRNAprecursor_925
caattctactgtgtaaaatcggttttgacaacatgtgcttaataatatcataatgagaatacacataaacatcaacaggctttatatattgcttaagttttgcacaagagaaatacagacaaagacagagtttttctatggcagtatatctagtttctgcatcatttagtacacgactaagataataaattgcatgttctatgccatcatcatcttcctgagccaacatgctaccaatggtcttgtcagacgcagcaatatacaacttcatagacttgtttcgactaggaggcattaacacaggaggcttgatcagatattctttaatttcatcgaaagccttttgatgctcttcattccatttgaatggttcatctttcttgagtcgaagtaatggcgaaaaaatctgagctttgccacttagattcgaaatgaatcgcctcaagaagttgatttttcctagcaaagactgaagctgttttttggtcgaaggaggcttcgtctcaagaatagcctttgtcttattttgatttatctcaatgccttttttatgcaccacaaaaccaaggaaatctcctgcacgcacacaaaaagcacactttaatggattcatttttaatccatgtttcctcattcgttcgaaagattgcctaagataatccaaatggctatcttctgaggaggatttgatgattatatcatcaatataaatttgcataaatgtgtcaataaaatcatgaaacatggaattcatggccctttgataagtggccccagcatttttcaacccaaagggcataaccacccattcataagtgcctaaagcaccagggcatcgaaatgctgttttcgacacatcattttcagcaataaatatttggttataaccagaataaccatctaacatgcttaaaaattcgaaaccagctgccgaatctatcaacatttccgctactggcatagcatattcatctttaggtgtagcattatttaaatccctaaaatctatgcatactctaagagttccattctttttaatgacagggactatatttgctaaccattcgacatacctggcagccctgatgaatttacacctcagcagcctttcgatctcttccttaatcttggacatgatttctggtgcgaatcttctt

SEQ ID NO: 8093 - DNA, 1039 bp, Glycine max
  Gm_smallRNAprecursor_926
atttctggtgcgaatcttcttggtagttgttttactggtctttttccctccttaataggtaacttcatttcgaccatttctctgcttaacccaggcatttcgtggtaatcccaagcaaaacagtctttaaactctctaagaagaggcaccagcttttcttttaaacttgaggtgatattggcactgatataagttggccttttaatcgagccatctccaatatcaacctcttccaaaggatcttgagcctgcatctttggcgcctcacttatgggatttttctcaaaacccagcggctcatcatcataaatacaatccagtcttcgatcctttgtttctttgttttcatgatcttcgatcttggcttcaactgccatattttgttgagattcagcctcaaaggccgtatttagtctattttcggccatataagccgtaattctggcccatgcagtggcctcagtcatactaatcttcatatgtattccacccagttggtggaatgactccatcttcagagggaacagcatcaatttcctccctctcccatataaacccataggtaggatggagtttgacagagtggacaacattgtcactcgattcgaaaacagcctccttgtcaccacaaggtgctatgttagccaactttttgtcaaaggtttgtgcagtaacattatcgacctctgacttatagaagctttgatccgcctctatattttccacaatcccatcctccctccagataatgagcttctggtgaagggtagatggcacagccccaactccatgaatccactcccttcctaatagcaagttaaaattagccttagactgtatcaccaggaaaagagttggtcgaactatactgcctacagcaacatctacttgaatggctcccaaagaatagccagttttaccctcataattcgaaagcacaatgttgtgggcagatagatcagtgtcatgtttcccgatcttgtagagcatagatcgaggcattaagttgacagccgctcctccatcaatgagcactttg

SEQ ID NO: 8094 - DNA, 1087 bp, Glycine max
  Gm_smallRNAprecursor_927
gattaagtatcttgtatgataattttcacacattaaagaaattagtctttagttgtcggtgaataataattaattttcacacattcattcaacgtaataaagagaaaacaagtttttggtttgcgtcatattcatattgacttgatcgaactaactaccttattgttcaaaatgattaattttttgtgtgactaaactaaatgaataaatagaacacctacaaagacattttgacattcaaattaatattaatcccactatagtgtatatgatacaatgacatacccatatttataagtgttgatcagagtgggctggatttctatgtttaaagctcatggtccttataagagaaatgatagggtgttgctaggtgcacccagcattattgctaatgcacccaacatttttttaaaataccaaaactgctcctgcatttttttcgcaatagtgatgggtgtgtgtgagggtggtccgtaaatcgtacggatcaagttgatccgtaaggttgatacaaatcaagttcatccgtaaggttgatacagatcaagttgatccgtatattgatattaagcatatggatcaacttgatccgtaagccttttacggaacaacacggatataatgatacatcaacttgatcaataaattgaatctcttattcttaatcatatggaattttgtggcttcaagtgtgtctccaaaggccaaaactcctcaaatttttaatttgatctcctaaagctcttgcttaatgtatggaaatctcaactatataacgatgcatcgccccaactccaatcagttgtaatttcttttactttgaactaaaaggttaaaaaagaacatctatcttagtaaagtgttacagaaggagaagagacgaattcaaagtaataccttataaaaggtggtttaaattgcaagcgtgaaaaactaagtttattttctaacagtttaaccccaatttcaggtgcataattagaatttcttatgaaattagaagcaaaatcacaagaaagttgtgagattcaattttccggcataggtttgttgaaacaatcttgataggagcacgattttatgc

SEQ ID NO: 8095 - DNA, 1079 bp, Glycine max
  Gm_smallRNAprecursor_928
taaggaaattcctagaaccttctcttcttctagaagtttctccataatttttctttcctctattttctttgttttggggctgaaatttaaactttgactggaagacattttcaattgtatcttctttatgcctatacagtctttgctcatatggttcaagagagcccacaagttctgtctctgatagagtggacagatctttggtttcctcaatcgttgtcacgattgggtcaaacttttggggcatagtaattagaattttctcaacaattttcttgtcaagaatatcttccccaaaagctctcatttgattaactattcctttaactttagaataataatctttaactgtctcggactccttcatcttcaatagttcaaaatctcttcttagagattgaagtttaacggcacgtaccttaacacttccttgaaactcctcttgcaatgtgttccacgcttctttggcagtcttagctcccataattcttgggaaaattggatcagtcaccgcttgttgcaaggtgaacaacgcctttgaatttttctgtatatttttcttcaactctttttcttgagatgcattaagagctgaagtatccgcgggaatggtgaagccttcttctactatgtcccataaatcttgagatgaaaaatatgtttccattttaacacgccagaaatcataattttcaccattgaagatagggacagaaatagttgacgattgagtagtgttatccatagcttagaaaaaatattattggagtgggttagtagtacaaaggaaatttttgaagtagttgggaggattttggaatggtaggtaggtaagataactacgcccaatgtatgaccgaacgtagctctgataccactgttggtagttgattagatgatagttgatagttcatagttttagagaattgttttagaaggaaggctatgtcattgatttcttggattgtcaattacaacataccaattgcctatttataggctcaagtcaccaacctctcaatggtggtgaatgtttctacattactttaggtctttctagaattttcatgatagattag

SEQ ID NO: 8096 - DNA, 1100 bp, Glycine max
  Gm_smallRNAprecursor_929
ttttttttgttcaaattggctatttgaatccccaaggttaaaattggatacgattaacaaaaaaaagtcatgtatctaccacgtgtgattgttttagtggttgttaattttcatttatcattttaccgaccaactagatatgacggtcaacgtttttctttaacaacgcccaatttttttatgaggacacaaatataaagggaccaatttaatagttgtgaaaaataggaagactatttttataattaatccaaatttatattagaagtattaatgctaaaaaaatttcgggccccttcccaacatgggcttagtgcggttgcacttccaaaccatgcccagggtcgggcctgggcctgagcccaacaaaaaaattaccaggggtgttgctaggtgcacctagcattattgttggtgcacctaacacttaaggtgaaatgacgaaaatatccttgattcgtaagccatttaagttgatatgtagaagccttacggatcaacttgatccgtaagccttttactgatcaagttgattcataagacttctatggatcaagttgattcgtattattccgtaaaagatttacggatcaagttgatccgtatcaaccttacggatcaacttgatccgtacgatttacggaccactctcacacacacccatcacaaatgcgaaaaaagtacagggatagttttggtattttaaaaaaatactgggtgcaccagcaataatgctgggtgcacctagcatcacccaattaccagcgggaacaacattcatggtcacctgccaacaggttgttgccactggtggtcgagttgtcgggttccaaaatcaatcactagctgccacaaaaagctactcgttgaggtgcaagagatggagcgaagaagaacacaagttgtttctgcttgggcttgagaaacatggaagaggagattgaaaagccatttcaagaatcgttgagacaagaaccccaactcaagttgctactcatgcccaaaagtatttccttggtcaggcatcgggcaataaaggcaaaagaagaagcattaatgacatagtcctaccagataatggccttgcccctcaccacatt

SEQ ID NO: 8097 - DNA, 1189 bp, Glycine max
  Gm_smallRNAprecursor_930
atggaggccggaaacacatacatttcacatgagatgcggagattgtactattactctccaagacgtctctgtattgttaggtataagtgtggatggtttaccattaatcggtctaacaaatcttgattgggctgatttatgtgaggagttattgggagtcagaccacaagaaggtgaaattaaaggtagtttggttaaattaagttggctggctcaccattttgcacaaataaataacgacgacgatgaagaacaagtacgaaggtttgcccgtgcatggatactgagattcattggaggtgtcttgttcgttgacaaaagcagtaacaaagtttcgctaaggtaccttcaatttttacgtgactttgaagaatgtggcagatttgcatggggagctgccgtacttggttttctatacagagagatgtgcaatgccaccgattataaaactaaatcaatcggaggtatgtgcatcttattacaaatgtgggcatgagaacgatgtccaaccttggctccaaagaggactccttcccaagtaaaaaatacaccactggggcacaggttagtcatttttaacagcgtctttcatttcaatagaataaatggttttaacatatattaaattttaatctttgtaggtggctacgacgtggaaaccaatatatcgacaatgatgatgtgagagtttttcgtcgcaagttggatattatgaaacgtcatgaggtaagaacatgctattgtatttgtaaaataaaaaattatatatgttattttactaaaatgttcacaactatgttgttatatgcaatttgtgtgggagccgtacccatcaaccgttatatcattgttgcctcccgtttgtttagtcggaagtctcacgtggtacgcggtggtgccactaatttgtttccaagttattgagtggcaccaaccggacagagtattgagacaatttgggatgcaacaaccaattccagagtcttcttcacaacccttaaacattcatggcataacattaaaagggaaacatgacgaaaattaggggcaattgttcgccccaatgattcatcagtggaataatcgccatgcatttagggtcgacgcttatccccgacaagaaggcctattgagctttaactcggattacatggtctggtataggcgaaagacaaagatgtttgttgac

SEQ ID NO: 8098 - DNA, 1055 bp, Glycine max
  Gm_smallRNAprecursor_931
acaggatcggtacaagagggagaggggagacagatgagaaatagaaatttattaaaacttgaaagaagcgcttacaaaagttgttctttcagagcacctcctctcagaaacctaaaaaatgaccaaatgaaagggtgcctcacaatatggttgaggactccttatatagccaaaattatttgaccggtagttgccggtagttttgaccgaaactatttgactgtttgttacaaaacaattagttttgaccgggacttatttgctacaggacaggtagtattgtccaaaattacaaattaattacatacagacggtcttgtaaccgaaattactattaatctaaacaaataccaaaacaatcatcttcgttttggtaaaaagggtcttcttcttcttcagcagagcttgtttcttccttctttgaggatgaacattcttcctcttgctgtaacatttgcagaacttccttaaggtttttagttaggatctctttagattttgatcctgctaaaaatgctgccagatgggacttttgatttaaaaacacagaagtttctggatcagctgctttgaggaattctggatgggatttgaactagagtttcacttgttttggatctgctttggatgagttgaattgagtccaccattttacaaatgcatgtctttgcagtgatggatattagtttgttttttcagtcttactgtaacgatactggcatgagaaaatccatgacagagcaaaactgaaaaaatatttaagatctgctggaattcgtgattcttgagaattgtattgtttgtcaaattgagcaaatccttgttggactgtttccgggaatatttctggaattggtccaaagaaaccccaccattgtaaaaaccaatttggaaaattataaattgtgttggtttcgaaatatatcagccatgaatgcttgaagcgggtattttggtgccaaaaaatcttagtccaagcatcaatataatcccaataggtataacctactgggtcaaatgatactgaaaatctctttcctttgtttaagtccgaa

SEQ ID NO: 8099 - DNA, 1079 bp, Glycine max
  Gm_smallRNAprecursor_932
agaagcgcttacaaaagttgttctttcagagcacctcctctcagaaacctaaaaaatgaccaaatgaaagggtgcctcacaatatggttgaggactccttatatagccaaaattatttgaccggtagttgccggtagttttgaccgaaactatttgactgtttgttacaaaacaattagttttgaccgggacttatttgctacaggacaggtagtattgtccaaaattacaaattaattacatacagacggtcttgtaaccgaaattactattaatctaaacaaataccaaaacaatcatcttcgttttggtaaaaagggtcttcttcttcttcagcagagcttgtttcttccttctttgaggatgaacattcttcctcttgctgtaacatttgcagaacttccttaaggtttttagttaggatctctttagattttgatcctgctaaaaatgctgccagatgggacttttgatttaaaaacacagaagtttctggatcagctgctttgaggaattctggatgggatttgaactagagtttcacttgttttggatctgctttggatgagttgaattgagtccaccattttacaaatgcatgtctttgcagtgatggatattagtttgttttttcagtcttactgtaacgatactggcatgagaaaatccatgacagagcaaaactgaaaaaatatttaagatctgctggaattcgtgattcttgagaattgtattgtttgtcaaattgagcaaatccttgttggactgtttccgggaatatttctggaattggtccaaagaaaccccaccattgtaaaaaccaatttggaaaattataaattgtgttggtttcgaaatatatcagccatgaatgcttgaagcgggtattttggtgccaaaaaatcttagtccaagcatcaatataatcccaataggtataacctactgggtcaaatgatactgaaaatctctttcctttgtttaagtccgaaccaaaatgtcttggtagaagaactttagtatttggattgttgagtgggtgttcaatgtttggtcttttgggtctttgaaatgtttga

SEQ ID NO: 8100 - DNA, 1168 bp, Glycine max
  Gm_smallRNAprecursor_933
cttaggaggcattaccatttttctgtaagaattcataaggtagtcaggtagagagtttgaggtgcccttgatatattctatgtcataatcaaagacacttaaaattgcttgccatcttgcaaaaatttgttttgaggcaaggtttttaacatccttttgtaaaatatctttggctgacttgcaatcaaccctgattaaaaaattttgatttaataaatctgattgaaatttggaaatgcacaaaacaattgctaaaacttcttttttaacagttgaatattttaattgtgcagggttccaatattttgatttatatgcaatgacatgatcttgaccatgtactctttatttcaggatgccaccataacctttgtctgatgcatcagtttcgacaattttaaaggcctgaggaataggaagatacatgcattttatagattggactttgagtttgatctctttaactgtttcggtatggagatcagaccaaggaggcggatttttcttcagcctatcatgcaatggcttgaaaatattgtttaaataggggacaaattctcctacataatttagacaacctagaaatctttgtaactgggttttgtctaagatttggttgggaaattttctagcaaactctattgacctttctattagaatgattgttccttgatatatattgtgaccaaggaatcgaatttgagtttggaaaaaattgatttttgatttggagactgccaaaccattctgtttgatgatatggatgaaagtctggagatgtttgaaatgttggtcaatgttttgggaaaagattaaaacatcatctatgtagacaatgacaaattttgaatagggattaaaaatatcattcataattttttgaaattctgaaggggcattctttagtccgaatggcatcacattcgattcatattgcccgaaaggtacagtaaacgctgttttgtacctatctgattcttggatttggatttgccaaaatccagatttcatatcaaattttgaaaatatttttgcagaatttaatctgttaagtaaatcttttttgtttggaataggatacctaatccattgtaatgcttgatttagtggtttgtaatttatgactaagcggggtgtttcacgctcaagctcagattgtttattgaca

SEQ ID NO: 8101 - DNA, 1084 bp, Glycine max
  Gm_smallRNAprecursor_934
caagttataggtttcatatatgtccaccaaagatcttactcgtcttggagtagactctggtgatgatagttcttgatcttgttgttgtggtggaggtgaaggtggttcacctgggtcttcttccttagcttcttcttgaggtagttgagcgggtataagaactttcttctccactttttcttcatcccaattccaagaagtgtactcatcaacttcaacatctcgactgatgacgagtttcttagtttgtaagttgtagacacggtagcccttagagatattgctatacccaaggaagatacctcgtatagtcttgtcttcaagcttgtgcctcttcacgtctggaatatgaatgtagcatatagatccaaagacccttaggtgctttactgatggctttttcccgttccaagcttcaattggagtcttgtcttttatagacttagttggacatctgttgagtatgtaaatagcagtgtagactgcttcagcccagaatgtgttaggtagtcccttctccttgagcatcgatctagccatttccataattgtgcgattctttctctcagacactccattttgttgaggagaatatgcgactgtaagtttacgctcaatgccttcatcctcacaaaatctttcaaactcgcgagaggtgtactctttgccgcgatcacttcttagtagttttatccattttccactttgattttcagcaagggccttgaactttttgaatactccaaagacttctgatttttcttttagaaaatataccaatgtcattctagagaagtcatcaacgaagagtatgaagtacctattgttctcatgtgatggcgtcctcattggtccacagacgtccgtatgtatcagctctaatagatctttcgctctccatgctccgcttgttgagaaaggaaatcggtgttacttaccaaggagacatccttcacacacttcattgttctcctttatgcttggaagatctctcatcatgttcttctcatgtaacaacttcaaggcatgtgtgttgaagtggccaaatcttcgatgccatagccatgaatcatcaacttgtacc

SEQ ID NO: 8102 - DNA, 1240 bp, Glycine max
  Gm_smallRNAprecursor_935
gacacacccaggaacttgattatctttttggtaggcccccctttgtgtctaatggatctttttggttataactccagtataatgaagctataggggccagggtagtagtaggcttagagagaatccttttattttgaaaatgtaaatggttctctcttgtagctatgatgatgatgaacttatgatgtttgagacatttgatgattagtaattataatcaactttgtgattaaatggatgagatgagatcccaacatatggatttgtctagatatagatatatatatatatatatatatatatatatatatatatatatatatatatatatatatatatatatatcgtttgatcttattccgctgatctctggtatcagagcctgatggggaagtaggaatactatccgtaaggacatatgttaacaaattttatggatctgaaactaaaaccttgtatagtacaagtaatattttactttgatttgtacagtaaatgtttgaacagtacttcctggaagtacatcagtctaatattttagttgaatagtactatagcagtaagacccgtgatggataaagggcggtaaggctaaggtgtactgtttaaccaaaatatcaagacataatatactagtggctataggattgtcgtccaaactatttttcaaaaaaaaaaagagtttttcttaaaaataattcagatccagaaaaattttgtgacatatttacttacggagatatttctatggaaccaaatgagggcaaagatattagagaatattataatcatgtctagactattacgatctttttcccgtatctcttttcgctcaaactcctcctcatcatcttcttcaagaaactccaatttattaaatgatcaagataaccagacccaagaggtcgccccaaaacacaatctcttcgatgaggaagtccgattcgaagatatcaatcaaaacatggatgactggaacattccagaaatccctcaggatcaactatacgttcttgaaacaataaaggacaaacacaactttgattacataatcaaaacaatagaaaacaatattcctctaggacaagatataggggaagaatttcatttactttcaaaaaattcaatttatgaacatagccgtaagtataaatatctacacattggttgtgtacaagtagccatcaagcccttaattgatatgggcatagatgcagcagttttaatgtgtctaagagac

SEQ ID NO: 8103 - DNA, 1157 bp, Glycine max
  Gm_smallRNAprecursor_936
atatgttaacaaattttatggatctgaaactaaaaccttgtatagtacaagtaatattttactttgatttgtacagtaaatgtttgaacagtacttcctggaagtacatcagtctaatattttagttgaatagtactatagcagtaagacccgtgatggataaagggcggtaaggctaaggtgtactgtttaaccaaaatatcaagacataatatactagtggctataggattgtcgtccaaactatttttcaaaaaaaaaaagagtttttcttaaaaataattcagatccagaaaaattttgtgacatatttacttacggagatatttctatggaaccaaatgagggcaaagatattagagaatattataatcatgtctagactattacgatctttttcccgtatctcttttcgctcaaactcctcctcatcatcttcttcaagaaactccaatttattaaatgatcaagataaccagacccaagaggtcgccccaaaacacaatctcttcgatgaggaagtccgattcgaagatatcaatcaaaacatggatgactggaacattccagaaatccctcaggatcaactatacgttcttgaaacaataaaggacaaacacaactttgattacataatcaaaacaatagaaaacaatattcctctaggacaagatataggggaagaatttcatttactttcaaaaaattcaatttatgaacatagccgtaagtataaatatctacacattggttgtgtacaagtagccatcaagcccttaattgatatgggcatagatgcagcagttttaatgtgtctaagagacattaggcataatcaatttgaagactccctaattggaatagtcgaaaccagtctgggacaaggtccaatatattttaactgttatccaaacaaaacagtgagtctgatggacagaaacattcttgactctctgttcttaaacatccactttcatggccttgacatgaaagaaggatcaatcccagcaaccttaatttataggatccagtacaaggtcatgaatacttatgcatctagagtcctgttaaaacctcaaaaaggagaaacaaccttgtttatcactaatatgacaaaggctaacgtttctctcccgagaaaaataaaatgggatgaa

SEQ ID NO: 8104 - DNA, 1080 bp, Glycine max
  Gm_smallRNAprecursor_937
atgatttcgttttagaaacaacggccctatttgacacaagggctgattcaaactgcattttagaaggattaattcctacgaaattctttgagaaaaccttggaaaaattaagtacggcaaacggctcaaaattaaaaattaattttaagctatcaaatgcaatcattgaaaaccaaggtcttaagattaacacaaactttcttctggtaaaaaaccttaagaatgaggtaatcttaggaacgcccttcattagagccctgtttcccatccaaatatctaatgaaggaataaccacaaattatttaggaagaaaaattatatttaatttttctactaaaccaatttccagaaatataaatcttatagaaaataagattaatcaaattaacttcttaaaagaagaagtatcttttagtaatattcaaatacaactgggaaaaccccaggtaaaagaaaaaattcaatctttattaaatcatattgaatcgaccgtctgttctgaattgccacatgcattttgggatagaaagaaacatattgttgatctcccttatgagaaagactttagggaaaaacaaattcccaccaaagccagaccaatccaaatgaatgaagaacttcttcaatattgtcaaaaagaaatcaaggatttgcttgataaaggcctaatccggaaaagcaaaagcccatggtcttgtgcggctttttatgtcaacaagcaatctgagattgagcgtggaataccccgcttggtcataaattacaaaccactaaatcaagcattacaatcgattagatatcatattccaaacaaaaaagatttgcttaacagattaaattctgcaaagatattttcaaaatttgatatgaaatctggattttggcaaatccaaatccaagaatcagataggtacaaaacagcgtttactgtacctttcgggcaatatgaatggaatgtgatgccattcggactgaagaatgccccttcagaatttcaaaaaattatgaatgatatttttaatcgctattcaaaatttgtcactgtctatatagatgatgttttaatcttttcccaaaaca

SEQ ID NO: 8105 - DNA, 1189 bp, Glycine max
  Gm_smallRNAprecursor_938
atggaggccggaaacacatacgtttcacatgagatgcggagagtgtactatcactctacaagacgtctctgtgttgttaggtataagtgtggatggtttaccattaatcggtccaacaaatcttgattgggctgatttatgtgaggaattattgggagtcagaccacaagaaggtgaaattaaaggtagtgtgattaaattaagttggctggctcaccattttgatcaaataaataatgatgacgacgaagaacaagtacgaaggtttgcccgtgcatggatactgagatttattggaggtgtcttgttcgttgacaaaaccagtaacagagtttcggtaaggtaccttcaatttttacgtgactttgaagaatgtggcagatatgcatggggagctgccgtacttggttttctatatagagagatgtgcagtgccaccgattataaaactaaatcaatcggaggtatgtgcatcttactacaattgtgggcatgggaacgatgtccaaccttggctccaaagaggactccttcccaaatagaaaatacaccactagggcacaagtgagtcatttttaacagcgtctttcatttcaatagaataaatggttttagggtatattaaattttattctttgtaggtggctgcgacgtggaaatcaacatatcggcaatgatgatgtgaaagtttttcgtcgcaagttggatattatgaaacgtcatgaggtaagaagcatgctattgtatttgtaaaataaaaaattatgtcttattttactacaatgttcatgtaacatatgttgttatatgcagtttgtgtgggagccttacccatcaaccgttatatcattgttgcctcccgtttgtttagtcggaagtatcgcgtggtacgcggtggtgccactaatttgttttcaagttattgagtggcaccaaccagacagagtcttgagacaattcgggatgcagcaaccagttccagagtctccttcacaacccctaaacattcatggcataacattaaaggggaaacatgacgaaaattgggggcaattattcgccccaatgattcaacagtggaataatcgacatgcatttagggtcgacgcttatccccgacaagaaggcctattgagttttaactcggactacatggtctggtataggcgaaagacaaagatgtttgttg

SEQ ID NO: 8106 - DNA, 1157 bp, Glycine max
  Gm_smallRNAprecursor_939
atgtagtaggtgccgaaagtactttgttgattgtggtcgccaagcccaaagacaattaagagaaggccaagtttattgttctaagcttgttacagaacttaggaaaaatcaagaacaagcttgttcgcacatcgttcgcgtgtatgatatccactcgacaagttttgaagtagaggagaccttcaatcctataacgcaacgtggcgggcaaaaatgggcagttaacttgaatggtcattattgtcaatgcggaaggtattctgcgcttcactatccatgttcacacattattgcagcttgtggttacgtgagcatgaactactaccaatatatagatgttatttacaccaatgagcacatcttaaaagcatactccgcacagtggaggcctcttgggaatgaagtggcaatttctccttctgatgaggcatgaacactaatccctgacccaactacggcagctccccatgcatatctgtcacattcttcaaagtcacgtaaaaattgaaggtaccttagcgaaactttgttactgcttttgtcaacgaacaagacacctccaatgaatctcagtatccatgtacgggcaaaccttcgtacctgttcttcgtcgtcgtcgttatttatttgtgcaaaatggtgagccagccaacttaatttaaccacactacctttaatttcaccttcttgtggtctgactcccaataattcctcacataaatcagcccaatcaagatttgttggaccgattaatggtaaatcatccacacttatacctaacaatacagagacgtcttggagagtaatagtacactctctgcatctcatgtgaaacgtatgtgtttccggcctccatctttctatcagaacactaattaatgagacatttatttttaagtaccccatcttgataatccaggcgaaatcagattgtagaagcaaaagggaaaatttgctctggaatttgttcttccccttgatacgtgaggacagctcgtctgatatgtaatttccgatcttcttccccattccaaacatgttctgaaacatgcttaggttgcatccataatacatcagtatcgatgaggccagacttaatgttaatatgtgatgaagatgatgatgaagatgtcattgctactgcaaaataaaatata

SEQ ID NO: 8107 - DNA, 1158 bp, Glycine max
  Gm_smallRNAprecursor_940
atgtagtaggtgccgaaagtactttgttgattgtggtcgccaagcccaaagacaattaagagaaggccaagtttattgttctaagcttgttacagaacttaggaaaaatcaagaacaagcttgttcgcacatcgttcgcgtgtatgatatccactcgacaagttttgaagtagaggagaccttcaatcctataacgcaacgtggcgggcaaaaatgggcagttaacttgaatggtcattattgtcaatgcggaaggtattctgcgcttcactatccatgttcacacattattgcagcttgtggttacgtgagcatgaactactaccaatatatagatgttatttacaccaatgagcacatcttaaaagcatactccgcacagtggaggcctcttgggaatgaagtggcaatttctccttctgatgaggcatgaacactaatccctgacccaactacggcagctccccatgcatatctgtcacattcttcaaagtcacgtaaaaattgaaggtaccttagcgaaactttgttactgcttttgtcaacgaacaagacacctccaatgaatctcagtatccatgtacgggcaaaccttcgtacctgttcttcgtcgtcgtcgttatttatttgtgcaaaatggtgagccagccaacttaatttaaccacactacctttaatttcaccttcttgtggtctgactcccaataattcctcacataaatcagcccaatcaagatttgttggaccgattaatggtaaatcatccacacttatacctaacaatacagagacgtcttggagagtaatagtacactctctgcatctcatgtgaaacgtatgtgtttccggcctccatctttctatcagaacactaattaatgagacatttatttttaagtaccccatcttgataatccaggcgaaatcagattgtagaagcaaaagggaaaatttgctctggaatttgttcttccccttgatacgtgaggacagctcgtctgatatgtaatttccgatcttcttccccattccaaacatgttctgaaacatgcttaggttgcatccataatacatcagtatcgatgaggccagacttaatgttaatatgtgatgaagatgatgatgaagatgtcattgctactgcaaaataaaatataa

SEQ ID NO: 8108 - DNA, 1155 bp, Glycine max
  Gm_smallRNAprecursor_941
gtagtaggtgccgaaagtactttgttgattgtggtcgccaagcccaaagacaattaagagaaggccaagtttattgttctaagcttgttacagaacttaggaaaaatcaagaacaagcttgttcgcacatcgttcgcgtgtatgatatccactcgacaagttttgaagtagaggagaccttcaatcctataacgcaacgtggcgggcaaaaatgggcagttaacttgaatggtcattattgtcaatgcggaaggtattctgcgcttcactatccatgttcacacattattgcagcttgtggttacgtgagcatgaactactaccaatatatagatgttatttacaccaatgagcacatcttaaaagcatactccgcacagtggaggcctcttgggaatgaagtggcaatttctccttctgatgaggcatgaacactaatccctgacccaactacggcagctccccatgcatatctgtcacattcttcaaagtcacgtaaaaattgaaggtaccttagcgaaactttgttactgcttttgtcaacgaacaagacacctccaatgaatctcagtatccatgtacgggcaaaccttcgtacctgttcttcgtcgtcgtcgttatttatttgtgcaaaatggtgagccagccaacttaatttaaccacactacctttaatttcaccttcttgtggtctgactcccaataattcctcacataaatcagcccaatcaagatttgttggaccgattaatggtaaatcatccacacttatacctaacaatacagagacgtcttggagagtaatagtacactctctgcatctcatgtgaaacgtatgtgtttccggcctccatctttctatcagaacactaattaatgagacatttatttttaagtaccccatcttgataatccaggcgaaatcagattgtagaagcaaaagggaaaatttgctctggaatttgttcttccccttgatacgtgaggacagctcgtctgatatgtaatttccgatcttcttccccattccaaacatgttctgaaacatgcttaggttgcatccataatacatcagtatcgatgaggccagacttaatgttaatatgtgatgaagatgatgatgaagatgtcattgctactgcaaaataaaatata

SEQ ID NO: 8109 - DNA, 1036 bp, Glycine max
  Gm_smallRNAprecursor_942
tgttcgcacatcgttcgcgtgtatgatatccactcgacaagttttgaagtagaggagaccttcaatcctataacgcaacgtggcgggcaaaaatgggcagttaacttgaatggtcattattgtcaatgcggaaggtattctgcgcttcactatccatgttcacacattattgcagcttgtggttacgtgagcatgaactactaccaatatatagatgttatttacaccaatgagcacatcttaaaagcatactccgcacagtggaggcctcttgggaatgaagtggcaatttctccttctgatgaggcatgaacactaatccctgacccaactacggcagctccccatgcatatctgtcacattcttcaaagtcacgtaaaaattgaaggtaccttagcgaaactttgttactgcttttgtcaacgaacaagacacctccaatgaatctcagtatccatgtacgggcaaaccttcgtacctgttcttcgtcgtcgtcgttatttatttgtgcaaaatggtgagccagccaacttaatttaaccacactacctttaatttcaccttcttgtggtctgactcccaataattcctcacataaatcagcccaatcaagatttgttggaccgattaatggtaaatcatccacacttatacctaacaatacagagacgtcttggagagtaatagtacactctctgcatctcatgtgaaacgtatgtgtttccggcctccatctttctatcagaacactaattaatgagacatttatttttaagtaccccatcttgataatccaggcgaaatcagattgtagaagcaaaagggaaaatttgctctggaatttgttcttccccttgatacgtgaggacagctcgtctgatatgtaatttccgatcttcttccccattccaaacatgttctgaaacatgcttaggttgcatccataatacatcagtatcgatgaggccagacttaatgttaatatgtgatgaagatgatgatgaagatgtcattgctactgcaaaataaaatata

SEQ ID NO: 8110 - DNA, 1037 bp, Glycine max
  Gm_smallRNAprecursor_943
tgttcgcacatcgttcgcgtgtatgatatccactcgacaagttttgaagtagaggagaccttcaatcctataacgcaacgtggcgggcaaaaatgggcagttaacttgaatggtcattattgtcaatgcggaaggtattctgcgcttcactatccatgttcacacattattgcagcttgtggttacgtgagcatgaactactaccaatatatagatgttatttacaccaatgagcacatcttaaaagcatactccgcacagtggaggcctcttgggaatgaagtggcaatttctccttctgatgaggcatgaacactaatccctgacccaactacggcagctccccatgcatatctgtcacattcttcaaagtcacgtaaaaattgaaggtaccttagcgaaactttgttactgcttttgtcaacgaacaagacacctccaatgaatctcagtatccatgtacgggcaaaccttcgtacctgttcttcgtcgtcgtcgttatttatttgtgcaaaatggtgagccagccaacttaatttaaccacactacctttaatttcaccttcttgtggtctgactcccaataattcctcacataaatcagcccaatcaagatttgttggaccgattaatggtaaatcatccacacttatacctaacaatacagagacgtcttggagagtaatagtacactctctgcatctcatgtgaaacgtatgtgtttccggcctccatctttctatcagaacactaattaatgagacatttatttttaagtaccccatcttgataatccaggcgaaatcagattgtagaagcaaaagggaaaatttgctctggaatttgttcttccccttgatacgtgaggacagctcgtctgatatgtaatttccgatcttcttccccattccaaacatgttctgaaacatgcttaggttgcatccataatacatcagtatcgatgaggccagacttaatgttaatatgtgatgaagatgatgatgaagatgtcattgctactgcaaaataaaatataa

SEQ ID NO: 8111 - DNA, 1188 bp, Glycine max
  Gm_smallRNAprecursor_944
agcccttggttgcttggtcagtagtttgttctccgaaaaaagaagggggtttaggcctttttaatctcaaggactggaaccttgcgcttctttcccgtatcctgtgagactttcattgtaagaaatattctctatgggttcggtgggttcaccattactatttcagagggagcaatgtgtggaattacaattcttcttcatcagattcagttttgataaagaaaatcattcaaataagggactttattatctctaaagagctaagtacggaagaggccaaaaagaggattcaatcttggagcatcaatgaacaattgcttgttgacaaagtctatgaatacattagaggtgtcaagcctactgttagttggtgttctattatatggaacccagcaatcccccctaagatgtctttcattttgtggcttgctaaaaggaatcggctgcttactcttgacaaagttgcttttttgaacaagggttccctctgccctttatgttcaaatgagtctgagtcaaatgctcatttgttcttttcttgcaggaaatctctccaagtttgggctcacattcgtgatttggctccttttcgcagacgtttcacttctttacagcgcattactgactctttaattaggggcagatccacattaggtgttcaaggaaaattacgttgtctggctatagcaattacagtctactgcatttggctgtctaggaacaagctgatttttgaagattatcaattttctgtcataaaggttattagcaagattaagtttcttatgcatagacaagcgcatctgttgcatttattttagcatcttgatatatgtcttcttgtattagggagacttttgattttctttaactgcggggtatgccccgtttattattgtatcattttaggtttaatataatttacattttttcccaaaaaaaaattctcttaatgttttttccttttttatacatatactaaccttcttactattatacaacaccctttatatattatatctatgtacgtctataagaaaaactggtctaaatgataaaatattatttaatatatatatatatatatatatatatatatatatatatataattttcactcatgttagatcttccgtgaaatagaaccgtagttattaataattaattatagacatctcttcttaattt

SEQ ID NO: 8112 - DNA, 1036 bp, Glycine max
  Gm_smallRNAprecursor_945
acaccatgtattataatgtctctgcaacttcagcctgcaattattagggtcagaaaattaatggccatcattaaaaaaatgttcaagttaaatattcaaaaaaattaaaaaataccaatgtagctgtgtttgcattttgtgggtcaacaaacatctttgtctttcgcctataccagaccatgtagtccgagttaaagctcaataggccttcttgtcggggataagcgtcaaccctaaatgcatggcgattattccactgatgaatcattggggcgaacaattgcccccaattttcgtcatgtttcccttttaatgttatgccatgaatgtttaagggttgcgaaggagactctggaattggttgctgcatcccaaattgtctcaacaagacaccttagcgaaactttgttactgcttttgtcaatgaacaagacacctccaatgaatctcaatatccatgcacgggcaaaccttcgtacttgttcttcgtcgtcgtcattatttatttgtgcaaaatggtgagccagccaacttaatttaaccacactacctttaatttaaccttcttgtggtctgactcccaataattcctcacataaatcagtccaatcaagatttgttggaccgattaatggtaaaccatccacacttatacctaacaatacagagacgtcttggagagtaatagtacactctccgcatctcatgtgaaacgtatgtgtttccggcctccatctttctattagagcactaattaatgagacatttatttttaagtatcctatcttcataatccagtaaaaatcagattgtcgaagaaaagaaaaaatttgctctggaatttcttcttccccttgatacgtggggacaactcgtttgatatgtaatttccgatcttctttcccatttcaaacatgttctgaaacatgcttaggttgcatccataatacatcagcatcgatagggccagacttaatgttaatatgtgatgaacatgacgatgaagatgtcattgctactgtaaaataaaatataa

SEQ ID NO: 8113 - DNA, 1037 bp, Glycine max
  Gm_smallRNAprecursor_946
acaccatgtattataatgtctctgcaacttcagcctgcaattattagggtcagaaaattaatggccatcattaaaaaaatgttcaagttaaatattcaaaaaaattaaaaaataccaatgtagctgtgtttgcattttgtgggtcaacaaacatctttgtctttcgcctataccagaccatgtagtccgagttaaagctcaataggccttcttgtcggggataagcgtcaaccctaaatgcatggcgattattccactgatgaatcattggggcgaacaattgcccccaattttcgtcatgtttcccttttaatgttatgccatgaatgtttaagggttgcgaaggagactctggaattggttgctgcatcccaaattgtctcaacaagacaccttagcgaaactttgttactgcttttgtcaatgaacaagacacctccaatgaatctcaatatccatgcacgggcaaaccttcgtacttgttcttcgtcgtcgtcattatttatttgtgcaaaatggtgagccagccaacttaatttaaccacactacctttaatttaaccttcttgtggtctgactcccaataattcctcacataaatcagtccaatcaagatttgttggaccgattaatggtaaaccatccacacttatacctaacaatacagagacgtcttggagagtaatagtacactctccgcatctcatgtgaaacgtatgtgtttccggcctccatctttctattagagcactaattaatgagacatttatttttaagtatcctatcttcataatccagtaaaaatcagattgtcgaagaaaagaaaaaatttgctctggaatttcttcttccccttgatacgtggggacaactcgtttgatatgtaatttccgatcttctttcccatttcaaacatgttctgaaacatgcttaggttgcatccataatacatcagcatcgatagggccagacttaatgttaatatgtgatgaacatgacgatgaagatgtcattgctactgtaaaataaaatataat

SEQ ID NO: 8114 - DNA, 1125 bp, Glycine max
  Gm_smallRNAprecursor_947
tttagtccatgaaattatagacactgatcaacttataattataagcattgataacttaattttttattttacaaaattattgttactcctccatgttataaaatgttattcactttaatatattttttagtataaaatgataatgaaaaactagggaaaataatgttttgtaaaattacaaattaaaaaaaattataatgttatgagttaaattaagtttttcgtctatgcaatttaataatttacatccttgtaatttcttttaggcaagttttaaacatttcatttttagatttttagttcctgccatcaaatttggtttgaaaaaaaaaattaaattaccttaaattaaaactaagagtttattcaacaattttataataaaagcccaaatatgggctgtcataaaagtacaacccgatgaacgaacatatgaaagcccaaaataaatgcactttcttttctaatcgtagaatggtaaaaataaaaaaggaatttgggtctgtcagacaaccgtgtgaccatcccaggcacaaggaagtgtctaagaacgatcctctacagccaaagatgagactcctccaaagagaaacacatcaggccgttaatcacgctctgatcacacggtcatgattcatccaccagacgtaggttcctgtctccttagaactcaaggacacagaggtacgagcctatagaacagatcctgttcaagtaaggtcgtaaccaaaggcctccgtgtttaggtatataaatgcttgaattttgttaaaaacgccgggtgtgggactacctccctgtcccttgtgcctcgtttctaactcttgtaggtatctcatttttttatcagaattcgtctcagtattgcacaaacatggatacaatcttcttcccatggtgtttcctacataacagcagcagcattggtcccaaatctttatcttttctagaaaaagaaatactgaatagaggctttgaaaagctcttattatgcttgattccatcactacaagattatacaacacccttcagaggctagcccgaaggggttaattttggcgaaactgggtgcatgaaaaggatcaaatctaattccagtaccccaattaagcaaatgacatctaa

SEQ ID NO: 8115 - DNA, 1081 bp, Glycine max
  Gm_smallRNAprecursor_948
ttttagtataaaatgataatgaaaaactagggaaaataatgttttgtaaaattacaaattaaaaaaaattataatgttatgagttaaattaagtttttcgtctatgcaatttaataatttacatccttgtaatttcttttaggcaagttttaaacatttcatttttagatttttagttcctgccatcaaatttggtttgaaaaaaaaaattaaattaccttaaattaaaactaagagtttattcaacaattttataataaaagcccaaatatgggctgtcataaaagtacaacccgatgaacgaacatatgaaagcccaaaataaatgcactttcttttctaatcgtagaatggtaaaaataaaaaaggaatttgggtctgtcagacaaccgtgtgaccatcccaggcacaaggaagtgtctaagaacgatcctctacagccaaagatgagactcctccaaagagaaacacatcaggccgttaatcacgctctgatcacacggtcatgattcatccaccagacgtaggttcctgtctccttagaactcaaggacacagaggtacgagcctatagaacagatcctgttcaagtaaggtcgtaaccaaaggcctccgtgtttaggtatataaatgcttgaattttgttaaaaacgccgggtgtgggactacctccctgtcccttgtgcctcgtttctaactcttgtaggtatctcatttttttatcagaattcgtctcagtattgcacaaacatggatacaatcttcttcccatggtgtttcctacataacagcagcagcattggtcccaaatctttatcttttctagaaaaagaaatactgaatagaggctttgaaaagctcttattatgcttgattccatcactacaagattatacaacacccttcagaggctagcccgaaggggttaattttggcgaaactgggtgcatgaaaaggatcaaatctaattccagtaccccaattaagcaaatgacatctaagttcgtagccaggtagctgagctgtacacttttcttccccatattttctttttctctactggctatgatgattgtgacat

SEQ ID NO: 8116 - DNA, 1093 bp, Glycine max
  Gm_smallRNAprecursor_949
aaaatcgtcttagaatgtctttttttaaaaaaaattgaaaattctgagacggtttttccaaaaaccgtattaaaatgtatactttctaaaacattttttttaaagaatcatcttagaatatcttttttaaaaaaaagtttaaaaattgactagaaattaatataattccactataaaagagttcaatatatcaagaagtggagatggaaaattctaagaatgatacaaaaaaggaaaattctaataaagtaatacaaaaaagaaaagttctaataaaataatagaaaaattaatcaatatggataatgaaaattctagagaatatgataaaaaaacaaaatacataaagggcctaggaaatcattaacaaattttacaaagatctgcgtttgctacatctaaatgacgagtgttgctaggtgcacccagcattattgctggtgcacccaacattctaagaaaatgacaaaattacccttgcttggttttcctcttccgaatcaagttgatccggaagtctcttctggatcaacttgatccgtaagagacttccggatcaacttgattcgtaacttccagatcaacttaatccggaagtctcttacggatcaagttgatccgaaagaggaaaaataaaaattttgttaattatacaagatatttaaagatatttatttcattaattataatataattaaatatatttatttattttattgattataatatatttataaatattgatttattataaataattaatactaatcaatcataatcataattcatgctaatcaatcataattccctaaaagaggatataaataattttagagttagcaatcataatgcagtttttgaaattgctaactctgaaattatttatatcctcttttagggaattatgattgattagcataattatgattatgattgattgattaacatgattgattgattctgaaaattgctaactctgaaattatttatatcctcttttagagaattatgattgattagcatgattgattgattaacattaattatttataataaatcaatatttataaatatattataattaataaaataa

SEQ ID NO: 8117 - DNA, 1094 bp, Glycine max
  Gm_smallRNAprecursor_950
aaaatcgtcttagaatgtctttttttaaaaaaaattgaaaattctgagacggtttttccaaaaaccgtattaaaatgtatactttctaaaacattttttttaaagaatcatcttagaatatcttttttaaaaaaaagtttaaaaattgactagaaattaatataattccactataaaagagttcaatatatcaagaagtggagatggaaaattctaagaatgatacaaaaaaggaaaattctaataaagtaatacaaaaaagaaaagttctaataaaataatagaaaaattaatcaatatggataatgaaaattctagagaatatgataaaaaaacaaaatacataaagggcctaggaaatcattaacaaattttacaaagatctgcgtttgctacatctaaatgacgagtgttgctaggtgcacccagcattattgctggtgcacccaacattctaagaaaatgacaaaattacccttgcttggttttcctcttccgaatcaagttgatccggaagtctcttctggatcaacttgatccgtaagagacttccggatcaacttgattcgtaacttccagatcaacttaatccggaagtctcttacggatcaagttgatccgaaagaggaaaaataaaaattttgttaattatacaagatatttaaagatatttatttcattaattataatataattaaatatatttatttattttattgattataatatatttataaatattgatttattataaataattaatactaatcaatcataatcataattcatgctaatcaatcataattccctaaaagaggatataaataattttagagttagcaatcataatgcagtttttgaaattgctaactctgaaattatttatatcctcttttagggaattatgattgattagcataattatgattatgattgattgattaacatgattgattgattctgaaaattgctaactctgaaattatttatatcctcttttagagaattatgattgattagcatgattgattgattaacattaattatttataataaatcaatatttataaatatattataattaataaaataaa

SEQ ID NO: 8118 - DNA, 1092 bp, Glycine max
  Gm_smallRNAprecursor_951
aaatcgtcttagaatgtctttttttaaaaaaaattgaaaattctgagacggtttttccaaaaaccgtattaaaatgtatactttctaaaacattttttttaaagaatcatcttagaatatcttttttaaaaaaaagtttaaaaattgactagaaattaatataattccactataaaagagttcaatatatcaagaagtggagatggaaaattctaagaatgatacaaaaaaggaaaattctaataaagtaatacaaaaaagaaaagttctaataaaataatagaaaaattaatcaatatggataatgaaaattctagagaatatgataaaaaaacaaaatacataaagggcctaggaaatcattaacaaattttacaaagatctgcgtttgctacatctaaatgacgagtgttgctaggtgcacccagcattattgctggtgcacccaacattctaagaaaatgacaaaattacccttgcttggttttcctcttccgaatcaagttgatccggaagtctcttctggatcaacttgatccgtaagagacttccggatcaacttgattcgtaacttccagatcaacttaatccggaagtctcttacggatcaagttgatccgaaagaggaaaaataaaaattttgttaattatacaagatatttaaagatatttatttcattaattataatataattaaatatatttatttattttattgattataatatatttataaatattgatttattataaataattaatactaatcaatcataatcataattcatgctaatcaatcataattccctaaaagaggatataaataattttagagttagcaatcataatgcagtttttgaaattgctaactctgaaattatttatatcctcttttagggaattatgattgattagcataattatgattatgattgattgattaacatgattgattgattctgaaaattgctaactctgaaattatttatatcctcttttagagaattatgattgattagcatgattgattgattaacattaattatttataataaatcaatatttataaatatattataattaataaaataa

SEQ ID NO: 8119 - DNA, 1091 bp, Glycine max
  Gm_smallRNAprecursor_952
aatcgtcttagaatgtctttttttaaaaaaaattgaaaattctgagacggtttttccaaaaaccgtattaaaatgtatactttctaaaacattttttttaaagaatcatcttagaatatcttttttaaaaaaaagtttaaaaattgactagaaattaatataattccactataaaagagttcaatatatcaagaagtggagatggaaaattctaagaatgatacaaaaaaggaaaattctaataaagtaatacaaaaaagaaaagttctaataaaataatagaaaaattaatcaatatggataatgaaaattctagagaatatgataaaaaaacaaaatacataaagggcctaggaaatcattaacaaattttacaaagatctgcgtttgctacatctaaatgacgagtgttgctaggtgcacccagcattattgctggtgcacccaacattctaagaaaatgacaaaattacccttgcttggttttcctcttccgaatcaagttgatccggaagtctcttctggatcaacttgatccgtaagagacttccggatcaacttgattcgtaacttccagatcaacttaatccggaagtctcttacggatcaagttgatccgaaagaggaaaaataaaaattttgttaattatacaagatatttaaagatatttatttcattaattataatataattaaatatatttatttattttattgattataatatatttataaatattgatttattataaataattaatactaatcaatcataatcataattcatgctaatcaatcataattccctaaaagaggatataaataattttagagttagcaatcataatgcagtttttgaaattgctaactctgaaattatttatatcctcttttagggaattatgattgattagcataattatgattatgattgattgattaacatgattgattgattctgaaaattgctaactctgaaattatttatatcctcttttagagaattatgattgattagcatgattgattgattaacattaattatttataataaatcaatatttataaatatattataattaataaaataa

SEQ ID NO: 8120 - DNA, 1082 bp, Glycine max
  Gm_smallRNAprecursor_953
accctacattcaaaggtcttatttttcttcaataataacatacataaagggaatgatttataagtttcatctctctctttggaagtgagccatttgtgaaattatgacgatgataattttataaaggttgaaaaatattggggcaattttttttttcaaaagtgcaaatgttttaagaaagaaggaaaggagaaaaatgtctgattcaaaaaaattaataaaataataattaacatttaatgataaaaaaatatgttttttttccttttcttctgggtgttgttaggtgcacctatcattattgctggtgcatccaacacttaacatgaaaagacaaaaatactctcatgtatttttaaaaatatttttgtgcacctagctcattcaggttgattcgcatatccaatgagttgattcgcatagattttagttgatccgcaagtaaatttttaaaacttacgggtcaagttgatccccaagttgatttttaagacttacggatcaagttgatccgtaagtcttttacgaatcaagttgatccgcaagcttcttacggattaagttgatccgcaagttgatttttaagacttacggatcaagttgatccgtaaaagacttacggatcaacttaatccgtaagttttaaaaatcaacttgcggatcaacttgatatgttaagagagaaagaagacagggataattttgccatttttaaagaattttgggtgcaccaacaataatactaggtgcacctagcaacactcttttctttttggttgcaaggttagatgttgttggttggtgtctataattagggtatgacaagcacaggctgccaacccaagtaggagtttaggagtaggactatagttgggaatatctaaagatccaagcctcgagtctcgtaaccaataaactataatgtgcgatgtgtgccaagcaagggaactctgttgattatagatttataggctgataaagaatgctactgtgttgagtttacctaaacaagtcatttgggctttaaatgagatggttagaacttagaaaggtgccaatttgaccaatactggattcgagac

SEQ ID NO: 8121 - DNA, 1110 bp, Glycine max
  Gm_smallRNAprecursor_954
accctacattcaaaggtcttatttttcttcaataataacatacataaagggaatgatttataagtttcatctctctctttggaagtgagccatttgtgaaattatgacgatgataattttataaaggttgaaaaatattggggcaattttttttttcaaaagtgcaaatgttttaagaaagaaggaaaggagaaaaatgtctgattcaaaaaaattaataaaataataattaacatttaatgataaaaaaatatgttttttttccttttcttctgggtgttgttaggtgcacctatcattattgctggtgcatccaacacttaacatgaaaagacaaaaatactctcatgtatttttaaaaatatttttgtgcacctagctcattcaggttgattcgcatatccaatgagttgattcgcatagattttagttgatccgcaagtaaatttttaaaacttacgggtcaagttgatccccaagttgatttttaagacttacggatcaagttgatccgtaagtcttttacgaatcaagttgatccgcaagcttcttacggattaagttgatccgcaagttgatttttaagacttacggatcaagttgatccgtaaaagacttacggatcaacttaatccgtaagttttaaaaatcaacttgcggatcaacttgatatgttaagagagaaagaagacagggataattttgccatttttaaagaattttgggtgcaccaacaataatactaggtgcacctagcaacactcttttctttttggttgcaaggttagatgttgttggttggtgtctataattagggtatgacaagcacaggctgccaacccaagtaggagtttaggagtaggactatagttgggaatatctaaagatccaagcctcgagtctcgtaaccaataaactataatgtgcgatgtgtgccaagcaagggaactctgttgattatagatttataggctgataaagaatgctactgtgttgagtttacctaaacaagtcatttgggctttaaatgagatggttagaacttagaaaggtgccaatttgaccaatactggattcgagactttgactaaatactgttgtagcaaagat

SEQ ID NO: 8122 - DNA, 1061 bp, Glycine max
  Gm_smallRNAprecursor_955
atgtaaatgtagccaagatgttaactggtcaattgcaacaaaaaatgacaagacaatgatgaaaacgattggtggatgcgtcaactttaaggtgacaatgatctatactgagggaggacagaagatgccaattaacctataaaatgataagaaaggaaaagcaaatatcaaaaccaaaaaatattattttattttctttgtagctaatgatacttacctctctactatttagccaaatcaataacattttgaaccaagtaggctattcacaacctaacacaacattaagcacaattaatagattaattatttatcagataccaaaggagagtaggagacctttcaaacctcttctttccatccctcccaacagataagatggaaagaaacaaagagaataggaaatcaaaactgaattaaagagagacataatgaacaaagatttgtagaaaacagaaactagttaatttagttttcccttgattaataataacacacagcatgcatggctcctcgcacgccattcgttaaggccatcactgtcctgatgggctctgcaaatggcatacagggagccaggcacgccaagtatgctaatagtaacacacaataactaaatgcaaacttaacctatttatctctctaccatggaagacggtaagttttacagagatatgaccaaatcatgagtgctcttgataattggtggtgctgagactagaagtgatctgcaagaattatttatgaggaggtagaagcaattaagcagcataatatatacagcatgaaggaagacaaggccttccatgtccccccaaaagacaaaaacaccactcggctactttggctactgtttttacttgggaaacaaccaagcagctagcaatttggcatgaagcaaagctagctttgtaaataactctacctgaacctaccttgtctctctctctctctctctctctctctttttctgttcccctactttactttttcaaactcttgagagtttgaagcttattgatgaagagaaatagtgttacatatatatgagtgagtgagga

SEQ ID NO: 8123 - DNA, 1061 bp, Glycine max; identical to SEQ ID NO: 8122
  Gm_smallRNAprecursor_956

SEQ ID NO: 8124 - DNA, 1062 bp, Glycine max
  Gm_smallRNAprecursor_957
atgtaaatgtagccaagatgttaactggtcaattgcaacaaaaaatgacaagacaatgatgaaaacgattggtggatgcgtcaactttaaggtgacaatgatctatactgagggaggacagaagatgccaattaacctataaaatgataagaaaggaaaagcaaatatcaaaaccaaaaaatattattttattttctttgtagctaatgatacttacctctctactatttagccaaatcaataacattttgaaccaagtaggctattcacaacctaacacaacattaagcacaattaatagattaattatttatcagataccaaaggagagtaggagacctttcaaacctcttctttccatccctcccaacagataagatggaaagaaacaaagagaataggaaatcaaaactgaattaaagagagacataatgaacaaagatttgtagaaaacagaaactagttaatttagttttcccttgattaataataacacacagcatgcatggctcctcgcacgccattcgttaaggccatcactgtcctgatgggctctgcaaatggcatacagggagccaggcacgccaagtatgctaatagtaacacacaataactaaatgcaaacttaacctatttatctctctaccatggaagacggtaagttttacagagatatgaccaaatcatgagtgctcttgataattggtggtgctgagactagaagtgatctgcaagaattatttatgaggaggtagaagcaattaagcagcataatatatacagcatgaaggaagacaaggccttccatgtccccccaaaagacaaaaacaccactcggctactttggctactgtttttacttgggaaacaaccaagcagctagcaatttggcatgaagcaaagctagctttgtaaataactctacctgaacctaccttgtctctctctctctctctctctctctctttttctgttcccctactttactttttcaaactcttgagagtttgaagcttattgatgaagagaaatagtgttacatatatatgagtgagtgaggag

SEQ ID NO: 8125 - DNA, 1174 bp, Glycine max
  Gm_smallRNAprecursor_958
tcatgggccataccggatcaagaaacttgggatgttgaatcaaatttcattgtcgacatcattattgtaatataagcatgcgtgatggggctaattaaacatttaacgaatttacctaatcggatcctccatcaattatttattttaatgattaacgtgaatgattgccaaaatgtgttggatttcatttgaattaaaagagaataaacataaaattaaggcacatttctttaggcgtaatttctaatttttcttacaatcgcctttcttcaatagtgataataataaccattttcaaactaacttataattgcccaacaattgcctaacatataaccaatgtaagcccaatacattttgggctaaataaaaggtgttgctaggtgtactcagcattattactggtgcattcaacattttttgaaaacaccaaaactatccctacattttctttgcatttgtgatgggtgtgcgtgatggtggtccataaatcatacgaatcaacttgatccgtaagccttttacggatcaagttaatccatatgttgatattaaacgcatacggatcaacttgatccgtaaggcttttacgaatcaagttgatccgtaaaacttctacggatcaagttgatccataaaaagacttacggataagctgattcgtatgttgatattaagcgcatacggatcaacttgatccgtaaggcttctacgaatcaagttgatccataagacttctacggatcaagttgatccataaaaaaggctaacggataagttgattcgtatgttgatataaagtgcatacggatcaacttgatttgtaaagacttacgaatcaacaagttgattcgtaagacttctacaaatcaagttgatctgtaaaagacttacggatcaaggatatttcagtctttttctcttaagtactgaatgcaccagcaataatgctgggtgcacctagcaacacgcaacacccctgaataaattgacaactgcgcccaacccaaaaggacccaatcgaagcagcgcctcatctcatccaaacaccaacaaccactctcaccgtaccaaatgtacgtgccttccgcttctctatccggttactctgtggcgatgaacagcttaacggcgagtttcacagctcgaatatgcgccacgcgccgcgacctac

SEQ ID NO: 8126 - DNA, 1223 bp, Glycine max
  Gm_smallRNAprecursor_959
tgtgttggatttcatttgaattaaaagagaataaacataaaattaaggcacatttctttaggcgtaatttctaatttttcttacaatcgcctttcttcaatagtgataataataaccattttcaaactaacttataattgcccaacaattgcctaacatataaccaatgtaagcccaatacattttgggctaaataaaaggtgttgctaggtgtactcagcattattactggtgcattcaacattttttgaaaacaccaaaactatccctacattttctttgcatttgtgatgggtgtgcgtgatggtggtccataaatcatacgaatcaacttgatccgtaagccttttacggatcaagttaatccatatgttgatattaaacgcatacggatcaacttgatccgtaaggcttttacgaatcaagttgatccgtaaaacttctacggatcaagttgatccataaaaagacttacggataagctgattcgtatgttgatattaagcgcatacggatcaacttgatccgtaaggcttctacgaatcaagttgatccataagacttctacggatcaagttgatccataaaaaaggctaacggataagttgattcgtatgttgatataaagtgcatacggatcaacttgatttgtaaagacttacgaatcaacaagttgattcgtaagacttctacaaatcaagttgatctgtaaaagacttacggatcaaggatatttcagtctttttctcttaagtactgaatgcaccagcaataatgctgggtgcacctagcaacacgcaacacccctgaataaattgacaactgcgcccaacccaaaaggacccaatcgaagcagcgcctcatctcatccaaacaccaacaaccactctcaccgtaccaaatgtacgtgccttccgcttctctatccggttactctgtggcgatgaacagcttaacggcgagtttcacagctcgaatatgcgccacgcgccgcgacctactactccctatacgacaccgttcccttcatcctttcactaccagacgcgtcgccaccaaactcactcctccaagaatcgtttgcatggcggtaagtcaccaaaatcattcaaaacaaaacaaaacacaactcgttcaatcccctatcgtatttttcctcattggcgttgaatttcaggaaccttatctgataacgaagcttgagtccgccgagaaaacgtgga

SEQ ID NO: 8127 - DNA, 1101 bp, Glycine max
  Gm_smallRNAprecursor_960
cataaattttatgtgcattggaatctaaaatgtcacatagcttgcaggaaccttggttgataattcttgcttcacacaccgttgtcagaaggcttctgaaccgcatattgaagtgtggcaaaatctgtatcctgtccatcataaaagttatattgtgactagaatcgtgcttgtggaatgagtttcacatgacagaagcaattattaaccttaaattaaacagacataaaataatcagtgacacaactgcggagacaattgtgcatggtcaagcagagctgaagcaatcagagccaatctaatagggctgttgtaagatttaaaaaaacattgcgtcaaatagagcagcaacacctagagcaaatctaattgcgtagcagataaaatgttcatttgaaccctttaacacatttggataacagattagagaagcacattccataaataacaaataaataaataaatagagagggaaatggagttggaataggaaagagacagagccagggaagaggcagtgcatgagcgtagccacaacagatctctctctctctctctcctttcattctcactttaccattttctgttgatagctccattcgtgccctgcctgttcccagcctttgtcctgtctcttcctgttaactccctcaccctttggatggattaacttacctcaatccttatcaacattattaaccacctttgcccagaaaatgtcccttctaagttctaacaaggttccctcaattctcaaatattaccctctcaaaactgggctttcagatcactcttgagcataggtttcattcagtccctctctatatataataataataattgtaccacaaggaggaatgaatggtttgtagtacaagcatgtactaacaaatttcagttcaacgctcctctgtactacttcatattattggtagtacactaatactaataccattgctaagtgaaaaagaaccttctgggtatgtgtcctagtacctttcaccaagtggtactgaaagatacaagatgtctccactcttccactatgcttttcttctcgtaggaggcgctgaaattcaaattaaaaaaactaataattta

SEQ ID NO: 8128 - DNA, 1101 bp, Glycine max; identical to SEQ ID NO: 8127
  Gm_smallRNAprecursor_961

SEQ ID NO: 8129 - DNA, 1097 bp, Glycine max
  Gm_smallRNAprecursor_962
taaattttatgtgcattggaatctaaaatgtcacatagcttgcaggaaccttggttgataattcttgcttcacacaccgttgtcagaaggcttctgaaccgcatattgaagtgtggcaaaatctgtatcctgtccatcataaaagttatattgtgactagaatcgtgcttgtggaatgagtttcacatgacagaagcaattattaaccttaaattaaacagacataaaataatcagtgacacaactgcggagacaattgtgcatggtcaagcagagctgaagcaatcagagccaatctaatagggctgttgtaagatttaaaaaaacattgcgtcaaatagagcagcaacacctagagcaaatctaattgcgtagcagataaaatgttcatttgaaccctttaacacatttggataacagattagagaagcacattccataaataacaaataaataaataaatagagagggaaatggagttggaataggaaagagacagagccagggaagaggcagtgcatgagcgtagccacaacagatctctctctctctctctcctttcattctcactttaccattttctgttgatagctccattcgtgccctgcctgttcccagcctttgtcctgtctcttcctgttaactccctcaccctttggatggattaacttacctcaatccttatcaacattattaaccacctttgcccagaaaatgtcccttctaagttctaacaaggttccctcaattctcaaatattaccctctcaaaactgggctttcagatcactcttgagcataggtttcattcagtccctctctatatataataataataattgtaccacaaggaggaatgaatggtttgtagtacaagcatgtactaacaaatttcagttcaacgctcctctgtactacttcatattattggtagtacactaatactaataccattgctaagtgaaaaagaaccttctgggtatgtgtcctagtacctttcaccaagtggtactgaaagatacaagatgtctccactcttccactatgcttttcttctcgtaggaggcgctgaaattcaaattaaaaaaactaataatt

SEQ ID NO: 8130 - DNA, 1099 bp, Glycine max
  Gm_smallRNAprecursor_963
taaattttatgtgcattggaatctaaaatgtcacatagcttgcaggaaccttggttgataattcttgcttcacacaccgttgtcagaaggcttctgaaccgcatattgaagtgtggcaaaatctgtatcctgtccatcataaaagttatattgtgactagaatcgtgcttgtggaatgagtttcacatgacagaagcaattattaaccttaaattaaacagacataaaataatcagtgacacaactgcggagacaattgtgcatggtcaagcagagctgaagcaatcagagccaatctaatagggctgttgtaagatttaaaaaaacattgcgtcaaatagagcagcaacacctagagcaaatctaattgcgtagcagataaaatgttcatttgaaccctttaacacatttggataacagattagagaagcacattccataaataacaaataaataaataaatagagagggaaatggagttggaataggaaagagacagagccagggaagaggcagtgcatgagcgtagccacaacagatctctctctctctctctcctttcattctcactttaccattttctgttgatagctccattcgtgccctgcctgttcccagcctttgtcctgtctcttcctgttaactccctcaccctttggatggattaacttacctcaatccttatcaacattattaaccacctttgcccagaaaatgtcccttctaagttctaacaaggttccctcaattctcaaatattaccctctcaaaactgggctttcagatcactcttgagcataggtttcattcagtccctctctatatataataataataattgtaccacaaggaggaatgaatggtttgtagtacaagcatgtactaacaaatttcagttcaacgctcctctgtactacttcatattattggtagtacactaatactaataccattgctaagtgaaaaagaaccttctgggtatgtgtcctagtacctttcaccaagtggtactgaaagatacaagatgtctccactcttccactatgcttttcttctcgtaggaggcgctgaaattcaaattaaaaaaactaataattta

SEQ ID NO: 8131 - DNA, 1099 bp, Glycine max; identical to SEQ ID NO: 8130
  Gm_smallRNAprecursor_964

SEQ ID NO: 8132 - DNA, 1099 bp, Glycine max; identical to SEQ ID NO: 8130
  Gm_smallRNAprecursor_965

SEQ ID NO: 8133 - DNA, 1200 bp, Glycine max
  Gm_smallRNAprecursor_966
ttgttcatcagcaacacaatgtacaaccatcagtcggtgtactcgaggttggcatgaccttcgatgacaaatcacaatgtattcgagcaatcaaagaatacaacatcagaaatcattttgattgcagaacaatttactctgaccaaagaaggctacacttcgtatgcaagttacatgaaaatggttgtacatggagcttgggcgcatgcaattcaaagaggcataacaaatggattatcaagagtatcagaggtcatcacacttgtctcgtgccgatgcttacacaagatcatcgccaactcgacaaacacgtcatagcacagatcatccaaccaattgtcaaaacaaacccaactgtctccatcaagacattgattgcagagattaaaacgttcatgaattataccccatcctacaagaagacatggttagcaaagcaaaaagcattggagatgattcatggaaactgggaagaatcatatgccaaactgccaaaacttttcggagctttgcaatcttgtgttcccgggactgtggtcgctgctcaaacagaatccttgtatgaggggggagaaatagtaccgggcaaaagattgtttaaacgtgtcttttggtcatttggtccatgcattaatggttttgcatattgcaaacccattgtacaagtagacggtacatggctttacggaaagtatactggcacactgttgatagctaccgcacaagatggagctaaccatatcttcccgattgcctatgccattgtagaaggggagacaacttcagcttgggggttttttctaaagaatttgagaagacatgttactccgcaaattaacatttctcttatttcagaccgacacccctcaattataagtgcctacaacaacccaagtaacttatgggtccaggacacatcccatttcttttgcctgcgccacattgcacaaaactttcttcgtggtaactcaaactgcaaacatttaaagaaaccacttatgttggctggtgagaatctattttatttattcgttataattttctttcaatcaaattttataacataatacattgattaaatatttacagggtacgcatacacagagaagatgcactggcgacatcttgggaatattcgtgcgaataagccaagtgcagctgaatggcttgatcaattacccaaacaaaaatgggtacaat

SEQ ID NO: 8134 - DNA, 1076 bp, Glycine max
  Gm_smallRNAprecursor_967
catcagcaacacaatgtacaaccatcagtcggtgtactcgaggttggcatgaccttcgatgacaaatcacaatgtattcgagcaatcaaagaatacaacatcagaaatcattttgattgcagaacaatttactctgaccaaagaaggctacacttcgtatgcaagttacatgaaaatggttgtacatggagcttgggcgcatgcaattcaaagaggcataacaaatggattatcaagagtatcagaggtcatcacacttgtctcgtgccgatgcttacacaagatcatcgccaactcgacaaacacgtcatagcacagatcatccaaccaattgtcaaaacaaacccaactgtctccatcaagacattgattgcagagattaaaacgttcatgaattataccccatcctacaagaagacatggttagcaaagcaaaaagcattggagatgattcatggaaactgggaagaatcatatgccaaactgccaaaacttttcggagctttgcaatcttgtgttcccgggactgtggtcgctgctcaaacagaatccttgtatgaggggggagaaatagtaccgggcaaaagattgtttaaacgtgtcttttggtcatttggtccatgcattaatggttttgcatattgcaaacccattgtacaagtagacggtacatggctttacggaaagtatactggcacactgttgatagctaccgcacaagatggagctaaccatatcttcccgattgcctatgccattgtagaaggggagacaacttcagcttgggggttttttctaaagaatttgagaagacatgttactccgcaaattaacatttctcttatttcagaccgacacccctcaattataagtgcctacaacaacccaagtaacttatgggtccaggacacatcccatttcttttgcctgcgccacattgcacaaaactttcttcgtggtaactcaaactgcaaacatttaaagaaaccacttatgttggctggtgagaatctattttatttattcgttataattttctttcaatcaaattttataacataatacattgattaaat

SEQ ID NO: 8135 - DNA, 1075 bp, Glycine max
  Gm_smallRNAprecursor_968
atcagcaacacaatgtacaaccatcagtcggtgtactcgaggttggcatgaccttcgatgacaaatcacaatgtattcgagcaatcaaagaatacaacatcagaaatcattttgattgcagaacaatttactctgaccaaagaaggctacacttcgtatgcaagttacatgaaaatggttgtacatggagcttgggcgcatgcaattcaaagaggcataacaaatggattatcaagagtatcagaggtcatcacacttgtctcgtgccgatgcttacacaagatcatcgccaactcgacaaacacgtcatagcacagatcatccaaccaattgtcaaaacaaacccaactgtctccatcaagacattgattgcagagattaaaacgttcatgaattataccccatcctacaagaagacatggttagcaaagcaaaaagcattggagatgattcatggaaactgggaagaatcatatgccaaactgccaaaacttttcggagctttgcaatcttgtgttcccgggactgtggtcgctgctcaaacagaatccttgtatgaggggggagaaatagtaccgggcaaaagattgtttaaacgtgtcttttggtcatttggtccatgcattaatggttttgcatattgcaaacccattgtacaagtagacggtacatggctttacggaaagtatactggcacactgttgatagctaccgcacaagatggagctaaccatatcttcccgattgcctatgccattgtagaaggggagacaacttcagcttgggggttttttctaaagaatttgagaagacatgttactccgcaaattaacatttctcttatttcagaccgacacccctcaattataagtgcctacaacaacccaagtaacttatgggtccaggacacatcccatttcttttgcctgcgccacattgcacaaaactttcttcgtggtaactcaaactgcaaacatttaaagaaaccacttatgttggctggtgagaatctattttatttattcgttataattttctttcaatcaaattttataacataatacattgattaaat

SEQ ID NO: 8136 - DNA, 1066 bp, Glycine max
  Gm_smallRNAprecursor_969
gcaacacaatgtacaaccatcagtcggtgtactcgaggttggcatgaccttcgatgacaaatcacaatgtattcgagcaatcaaagaatacaacatcagaaatcattttgattgcagaacaatttactctgaccaaagaaggctacacttcgtatgcaagttacatgaaaatggttgtacatggagcttgggcgcatgcaattcaaagaggcataacaaatggattatcaagagtatcagaggtcatcacacttgtctcgtgccgatgcttacacaagatcatcgccaactcgacaaacacgtcatagcacagatcatccaaccaattgtcaaaacaaacccaactgtctccatcaagacattgattgcagagattaaaacgttcatgaattataccccatcctacaagaagacatggttagcaaagcaaaaagcattggagatgattcatggaaactgggaagaatcatatgccaaactgccaaaacttttcggagctttgcaatcttgtgttcccgggactgtggtcgctgctcaaacagaatccttgtatgaggggggagaaatagtaccgggcaaaagattgtttaaacgtgtcttttggtcatttggtccatgcattaatggttttgcatattgcaaacccattgtacaagtagacggtacatggctttacggaaagtatactggcacactgttgatagctaccgcacaagatggagctaaccatatcttcccgattgcctatgccattgtagaaggggagacaacttcagcttgggggttttttctaaagaatttgagaagacatgttactccgcaaattaacatttctcttatttcagaccgacacccctcaattataagtgcctacaacaacccaagtaacttatgggtccaggacacatcccatttcttttgcctgcgccacattgcacaaaactttcttcgtggtaactcaaactgcaaacatttaaagaaaccacttatgttggctggtgagaatctattttatttattcgttataattttctttcaatcaaattttataacataatacattgat

SEQ ID NO: 8137 - DNA, 1067 bp, Glycine max
  Gm_smallRNAprecursor_970
gcaacacaatgtacaaccatcagtcggtgtactcgaggttggcatgaccttcgatgacaaatcacaatgtattcgagcaatcaaagaatacaacatcagaaatcattttgattgcagaacaatttactctgaccaaagaaggctacacttcgtatgcaagttacatgaaaatggttgtacatggagcttgggcgcatgcaattcaaagaggcataacaaatggattatcaagagtatcagaggtcatcacacttgtctcgtgccgatgcttacacaagatcatcgccaactcgacaaacacgtcatagcacagatcatccaaccaattgtcaaaacaaacccaactgtctccatcaagacattgattgcagagattaaaacgttcatgaattataccccatcctacaagaagacatggttagcaaagcaaaaagcattggagatgattcatggaaactgggaagaatcatatgccaaactgccaaaacttttcggagctttgcaatcttgtgttcccgggactgtggtcgctgctcaaacagaatccttgtatgaggggggagaaatagtaccgggcaaaagattgtttaaacgtgtcttttggtcatttggtccatgcattaatggttttgcatattgcaaacccattgtacaagtagacggtacatggctttacggaaagtatactggcacactgttgatagctaccgcacaagatggagctaaccatatcttcccgattgcctatgccattgtagaaggggagacaacttcagcttgggggttttttctaaagaatttgagaagacatgttactccgcaaattaacatttctcttatttcagaccgacacccctcaattataagtgcctacaacaacccaagtaacttatgggtccaggacacatcccatttcttttgcctgcgccacattgcacaaaactttcttcgtggtaactcaaactgcaaacatttaaagaaaccacttatgttggctggtgagaatctattttatttattcgttataattttctttcaatcaaattttataacataatacattgatt

SEQ ID NO: 8138 - DNA, 1065 bp, Glycine max
  Gm_smallRNAprecursor_971
caacacaatgtacaaccatcagtcggtgtactcgaggttggcatgaccttcgatgacaaatcacaatgtattcgagcaatcaaagaatacaacatcagaaatcattttgattgcagaacaatttactctgaccaaagaaggctacacttcgtatgcaagttacatgaaaatggttgtacatggagcttgggcgcatgcaattcaaagaggcataacaaatggattatcaagagtatcagaggtcatcacacttgtctcgtgccgatgcttacacaagatcatcgccaactcgacaaacacgtcatagcacagatcatccaaccaattgtcaaaacaaacccaactgtctccatcaagacattgattgcagagattaaaacgttcatgaattataccccatcctacaagaagacatggttagcaaagcaaaaagcattggagatgattcatggaaactgggaagaatcatatgccaaactgccaaaacttttcggagctttgcaatcttgtgttcccgggactgtggtcgctgctcaaacagaatccttgtatgaggggggagaaatagtaccgggcaaaagattgtttaaacgtgtcttttggtcatttggtccatgcattaatggttttgcatattgcaaacccattgtacaagtagacggtacatggctttacggaaagtatactggcacactgttgatagctaccgcacaagatggagctaaccatatcttcccgattgcctatgccattgtagaaggggagacaacttcagcttgggggttttttctaaagaatttgagaagacatgttactccgcaaattaacatttctcttatttcagaccgacacccctcaattataagtgcctacaacaacccaagtaacttatgggtccaggacacatcccatttcttttgcctgcgccacattgcacaaaactttcttcgtggtaactcaaactgcaaacatttaaagaaaccacttatgttggctggtgagaatctattttatttattcgttataattttctttcaatcaaattttataacataatacattgat

SEQ ID NO: 8139 - DNA, 1146 bp, Glycine max
  Gm_smallRNAprecursor_972
ccaaagtgatgaccaaaccgatgacgagggtgttggcagaccaacgacacctccgtcacctctgttgcaatatcagcaacttaggtgtccagtagacttgaactttgaccacctaccacactatattgatcgacaccattttgttcatcagcaacacaatgtacaaccaccagtcggtgtactcgaggttggcatgactttcgatgacaaagcacaatgtattcgagcaatcaaagaatacaatatcagaaatcattttgattgcagaacaatttactctgaccaaggaaggctaaacttcgtctgcaagttacatgaaaatggttgtacatggagcttgggcgcatgcaattcaaagaggcataacaaatggattatcaagagtatcagaggttatcacacttgtctcgtgccgatgctcagacaagatcatcgccaactcgacaaacacgtcatagcacagatcatccaaccaattgtcaaaacaaacccaactgtctccatcaagacgttgattgcagagatcaaaacgttcatgaattataccccatcctaaaagaagacatgattagcaaagcaaaaagcattggagatgattcatggaaactgggaagaatcatatgccaaactgccaaaactttttggagctttgcaatcttgtgttcccgggactatggtcgctgctcaaacagaatccttgtatgaggggggagaaatagtaccggacaaaagattgtttaaacgtgtcttttggtcatttggtccatgcattaatggttttgcatattgcaaacccattgtacaagtagatgatatatggctttatggaaagtatactagcacactgttgatagctaccgcacaagatggagctaaccatatcttcccgattgcctatgccattgtagaaggggagacaacttcatcttgggggttttttctaaagaatttgagaagacatgttacttcgcaaattaacatttctcttatttcagatcggcacccctcaattataagtgcctacaacaacccaagtaacttatgggtccaggacacatcccatttcttttgcctgcgccacattgcacaaaactttcttcgtggtaactcaaactgcaaacatttaaagaaaccacttatgttggc

SEQ ID NO: 8140 - DNA, 1212 bp, Glycine max
  Gm_smallRNAprecursor_973
agtatggtatgattcatcacttaattatttatgttactttctaaaactccatgaattattaattgatgatgttttaatttttacatgatgtagctattggcaagacctattgatgggtgttaggttgttgactattgttaatttgttatggttttatgtccatgtaacacatggtgtagtgttctattatatgttttgagattttgagttaattaacaaaggatgtgggtgtgacacctacatggagttttagggtgttgctaggtgcacccaacattattgttggtgcacccagcacttaatggtaaaagtcaaaaatgtccctgcttaaaaggcttatagatcaagttgatctgtatgcttaaaatatcaatatacggatcaacttgatccatatgcttaaaatatcaacatatggatcaatttgatccataaaaggcttacggatcaacttgatccgtaagccttttacagatcaagttgattcgtatgcttaaaatatcaacatacggatcaacttgatccataaaaggcttatggatcaacttgatctataatctttttatggatcaacttgatctgtatgcttaaaatatcaacatacagatcaacttgatctgtaaaaggcttacagatcaacttgatccgtaaggattttacggatcaagttgatccgtatgcttaaaatatcaacatatggatcaagttgatccgtaaaagacttacagatcaagttgatccataaagattttacggatcaagttgatctgtatgtttaaaatatcagcatatggatcaacttgatccgtacgcttaaaatatcaacatatgaatcaacttgattcgtaagtcttttacgaaccaccctctcacgcacacccagcacaaatgagggacagttttaacattttgaaaaaatgctggatgcacctagcaacaccctttgtttattcatggagagtacaattatttagttgggttgttttactttactcatgtcattcttggtgacttgggtaaacaagtattatgttcactttattgctagtactatataatattttgactttttaaaaagtgttataaaggcatcaatgataatttttactatgagatatgacatctatttataaatatgaaaacttgaaaatatgaatatgttagtaagtatgaaggctttatttagtaaatttatattataaaatggtcaac

SEQ ID NO: 8141 - DNA, 1076 bp, Glycine max
  Gm_smallRNAprecursor_974
acactttttaattattaatgttaaaaattattagaaacataaatatttttaaatttattttttatttaatgaatctcttttttttaaaaaaaattatccaatgatataaaacatgttaaaaagtgtttttgttactagtagttttttttatttattttctttctccatttgtaaaattgcgtaggcatggaggggggctactggaacacgatgattcttgagcaatcaatcaccatagtaacccacaagcacaagggccaaaacaaactccaaaaagaacccgttcatgatatgatcccatgtgcaatgggggcacatctaaaccccaatttgtttgtctcaatttcaaagttatcataaatagatgaagtgaaaaggatgaatcaaagaagtggacacgtgggccagtaggaagttgccgcatgggaatgtccatgatttataattgagcacattatgtttttttttttaaatactcttgcttattacctatgaagcaccaacaccgacacggacaccggacacgacacagacacgtgaacacttgtaatatccaaaatatagaacgtagtatgggtgtcgtgtcggtgtcggactgacacgaacacgtgtcggacactggacacgacaagggactggagtgtccgtgcttcatagcttattactaatctcgatcgaaatttgacagactattttttgtaaaaaaaattttaattattttttatttatttataagacttaaaccaagagattgtttaaggaaattgtgtctagtaaccaatgaattgttggtataattgaacacattctgacaccagtcaatagaaaagagaaactaaacgtgagggacaagcagtgaggtagaatgaagaatgtcatgaaacaaacaatgaagctagagcatctactgaattgaacccccgacactctcggtttgtgtttgtgtgttgacgtacaaacaagtgaatggttttgcttgcttgccacctacaacactgcaatgcattctcattctcccactcaaattaatccaaattaaagcacctgaactcatcatagctcatgttctcatacac

SEQ ID NO: 8142 - DNA, 1076 bp, Glycine max; identical to SEQ ID NO: 8141
  Gm_smallRNAprecursor_975

SEQ ID NO: 8143 - DNA, 1067 bp, Glycine max
  Gm_smallRNAprecursor_976
tttttaattattaatgttaaaaattattagaaacataaatatttttaaatttattttttatttaatgaatctcttttttttaaaaaaaattatccaatgatataaaacatgttaaaaagtgtttttgttactagtagttttttttatttattttctttctccatttgtaaaattgcgtaggcatggaggggggctactggaacacgatgattcttgagcaatcaatcaccatagtaacccacaagcacaagggccaaaacaaactccaaaaagaacccgttcatgatatgatcccatgtgcaatgggggcacatctaaaccccaatttgtttgtctcaatttcaaagttatcataaatagatgaagtgaaaaggatgaatcaaagaagtggacacgtgggccagtaggaagttgccgcatgggaatgtccatgatttataattgagcacattatgtttttttttttaaatactcttgcttattacctatgaagcaccaacaccgacacggacaccggacacgacacagacacgtgaacacttgtaatatccaaaatatagaacgtagtatgggtgtcgtgtcggtgtcggactgacacgaacacgtgtcggacactggacacgacaagggactggagtgtccgtgcttcatagcttattactaatctcgatcgaaatttgacagactattttttgtaaaaaaaattttaattattttttatttatttataagacttaaaccaagagattgtttaaggaaattgtgtctagtaaccaatgaattgttggtataattgaacacattctgacaccagtcaatagaaaagagaaactaaacgtgagggacaagcagtgaggtagaatgaagaatgtcatgaaacaaacaatgaagctagagcatctactgaattgaacccccgacactctcggtttgtgtttgtgtgttgacgtacaaacaagtgaatggttttgcttgcttgccacctacaacactgcaatgcattctcattctcccactcaaattaatccaaattaaagcacctgaactcatcatagctcatgttctca

SEQ ID NO: 8144 - DNA, 1066 bp, Glycine max
  Gm_smallRNAprecursor_977
ttttaattattaatgttaaaaattattagaaacataaatatttttaaatttattttttatttaatgaatctcttttttttaaaaaaaattatccaatgatataaaacatgttaaaaagtgtttttgttactagtagttttttttatttattttctttctccatttgtaaaattgcgtaggcatggaggggggctactggaacacgatgattcttgagcaatcaatcaccatagtaacccacaagcacaagggccaaaacaaactccaaaaagaacccgttcatgatatgatcccatgtgcaatgggggcacatctaaaccccaatttgtttgtctcaatttcaaagttatcataaatagatgaagtgaaaaggatgaatcaaagaagtggacacgtgggccagtaggaagttgccgcatgggaatgtccatgatttataattgagcacattatgtttttttttttaaatactcttgcttattacctatgaagcaccaacaccgacacggacaccggacacgacacagacacgtgaacacttgtaatatccaaaatatagaacgtagtatgggtgtcgtgtcggtgtcggactgacacgaacacgtgtcggacactggacacgacaagggactggagtgtccgtgcttcatagcttattactaatctcgatcgaaatttgacagactattttttgtaaaaaaaattttaattattttttatttatttataagacttaaaccaagagattgtttaaggaaattgtgtctagtaaccaatgaattgttggtataattgaacacattctgacaccagtcaatagaaaagagaaactaaacgtgagggacaagcagtgaggtagaatgaagaatgtcatgaaacaaacaatgaagctagagcatctactgaattgaacccccgacactctcggtttgtgtttgtgtgttgacgtacaaacaagtgaatggttttgcttgcttgccacctacaacactgcaatgcattctcattctcccactcaaattaatccaaattaaagcacctgaactcatcatagctcatgttctca

SEQ ID NO: 8145 - DNA, 1066 bp, Glycine max; identical to SEQ ID NO: 8144
  Gm_smallRNAprecursor_978

SEQ ID NO: 8146 - DNA, 1071 bp, Glycine max
  Gm_smallRNAprecursor_979
ttttaattattaatgttaaaaattattagaaacataaatatttttaaatttattttttatttaatgaatctcttttttttaaaaaaaattatccaatgatataaaacatgttaaaaagtgtttttgttactagtagttttttttatttattttctttctccatttgtaaaattgcgtaggcatggaggggggctactggaacacgatgattcttgagcaatcaatcaccatagtaacccacaagcacaagggccaaaacaaactccaaaaagaacccgttcatgatatgatcccatgtgcaatgggggcacatctaaaccccaatttgtttgtctcaatttcaaagttatcataaatagatgaagtgaaaaggatgaatcaaagaagtggacacgtgggccagtaggaagttgccgcatgggaatgtccatgatttataattgagcacattatgtttttttttttaaatactcttgcttattacctatgaagcaccaacaccgacacggacaccggacacgacacagacacgtgaacacttgtaatatccaaaatatagaacgtagtatgggtgtcgtgtcggtgtcggactgacacgaacacgtgtcggacactggacacgacaagggactggagtgtccgtgcttcatagcttattactaatctcgatcgaaatttgacagactattttttgtaaaaaaaattttaattattttttatttatttataagacttaaaccaagagattgtttaaggaaattgtgtctagtaaccaatgaattgttggtataattgaacacattctgacaccagtcaatagaaaagagaaactaaacgtgagggacaagcagtgaggtagaatgaagaatgtcatgaaacaaacaatgaagctagagcatctactgaattgaacccccgacactctcggtttgtgtttgtgtgttgacgtacaaacaagtgaatggttttgcttgcttgccacctacaacactgcaatgcattctcattctcccactcaaattaatccaaattaaagcacctgaactcatcatagctcatgttctcatacac

SEQ ID NO: 8147 - DNA, 1071 bp, Glycine max; identical to SEQ ID NO: 8146
  Gm_smallRNAprecursor_980

SEQ ID NO: 8148 - DNA, 1070 bp, Glycine max
  Gm_smallRNAprecursor_981
tttaattattaatgttaaaaattattagaaacataaatatttttaaatttattttttatttaatgaatctcttttttttaaaaaaaattatccaatgatataaaacatgttaaaaagtgtttttgttactagtagttttttttatttattttctttctccatttgtaaaattgcgtaggcatggaggggggctactggaacacgatgattcttgagcaatcaatcaccatagtaacccacaagcacaagggccaaaacaaactccaaaaagaacccgttcatgatatgatcccatgtgcaatgggggcacatctaaaccccaatttgtttgtctcaatttcaaagttatcataaatagatgaagtgaaaaggatgaatcaaagaagtggacacgtgggccagtaggaagttgccgcatgggaatgtccatgatttataattgagcacattatgtttttttttttaaatactcttgcttattacctatgaagcaccaacaccgacacggacaccggacacgacacagacacgtgaacacttgtaatatccaaaatatagaacgtagtatgggtgtcgtgtcggtgtcggactgacacgaacacgtgtcggacactggacacgacaagggactggagtgtccgtgcttcatagcttattactaatctcgatcgaaatttgacagactattttttgtaaaaaaaattttaattattttttatttatttataagacttaaaccaagagattgtttaaggaaattgtgtctagtaaccaatgaattgttggtataattgaacacattctgacaccagtcaatagaaaagagaaactaaacgtgagggacaagcagtgaggtagaatgaagaatgtcatgaaacaaacaatgaagctagagcatctactgaattgaacccccgacactctcggtttgtgtttgtgtgttgacgtacaaacaagtgaatggttttgcttgcttgccacctacaacactgcaatgcattctcattctcccactcaaattaatccaaattaaagcacctgaactcatcatagctcatgttctcatacac

SEQ ID NO: 8149 - DNA, 1070 bp, Glycine max; identical to SEQ ID NO: 8148
  Gm_smallRNAprecursor_982

SEQ ID NO: 8150 - DNA, 1070 bp, Glycine max; identical to SEQ ID NO: 8148
  Gm_smallRNAprecursor_983

SEQ ID NO: 8151 - DNA, 1070 bp, Glycine max; identical to SEQ ID NO: 8148
  Gm_smallRNAprecursor_984

SEQ ID NO: 8152 - DNA, 1053 bp, Glycine max
  Gm_smallRNAprecursor_985
ctaagattgggtgaattatttccttctataattcaatgattgtactttgactgcaattcttatcaaatttgatgtatagtatttatttatttatatatttgatggatatttaccattgaaagattggctgttgtttattttggtctgaggagaaatacttttgccattaattccaggtaatggattaaaacaaaaggggatggtccagaggaagcccagtcgtggtgatacaaccctgtcagttagttgctctgacaagatagctcgttggaggcaaatttactgttgagggttacttttaaaaactaattacaaaagagggtctgtttttaaactttttacaagggggtctgttcctccatggatgtcgccagaagaactggcgagaagcttgtaccgccatcagcagtggcgagaaagctgctgacatggctgggtgccgccattgttacgggcgagatgcagtccaggtggaaggatgccgccattgttatgggcgagacgcgtccacgtaggaaccgccattgctgctggcgagaaccatgctgacttggcaccccgtgagcaggtctcgcctgtcccattggcgagacaggttgtgcccaactgcaggggtgcatgagttcagtgttgcaggggtgcagggggtaggtttcaggctagggcttgcatgctgctgcagtgtttttaaacgttgcttttcgaacgttaggtgttgaatgttgggcattttttcctataaaaaaaatcttcataataacttgaacttacatttcaaacttacagctgctcctccccgaaattgctgagcttctcctcctccagtgctatcctttgctttcttcttcaatttttcgtgtactccttctcctccgtaattactggtaagtattttttaattaaataatatttatgtattatgttcttaatattataaaaagattaagttagttagtattaataggtatttcaagattaggttagttagttttaatatgtattctattgttaatttttatgtattaataggtatttgaaggttaggttaattag

SEQ ID NO: 8153 - DNA, 1193 bp, Glycine max
  Gm_smallRNAprecursor_986
agggggtaggtttcaggctagggcttgcatgctgctgcagtgtttttaaacgttgcttttcgaacgttaggtgttgaatgttgggcattttttcctataaaaaaaatcttcataataacttgaacttacatttcaaacttacagctgctcctccccgaaattgctgagcttctcctcctccagtgctatcctttgctttcttcttcaatttttcgtgtactccttctcctccgtaattactggtaagtattttttaattaaataatatttatgtattatgttcttaatattataaaaagattaagttagttagtattaataggtatttcaagattaggttagttagttttaatatgtattctattgttaatttttatgtattaataggtatttgaaggttaggttaattagcatgaaaatattatttggttagttagtatgaaaatattatttgattattgtatatattctgagatattatatgtgttgtatatgtatgatattttagttagacatattagctttagttaggcacataatattagtttttgtaatattagacacaagttaatattagttttcggtatatatatctaaaatttaggcacgtaaattttgagcttttgtaatattaggctaaataattttgagcttttgtaataatattaagctaaacaattttgagttttaaataaatgagttgataagttatattatttgatttaattatttttagtttgaatttttttaatatatatatatatatatatatatatatatatatatatatatatatatatataatagggtagtttacgttagtatatggtaggttttattattagtttgtaggttaatattttttgttttacggaatttacgttattaaatataaatatatattatgagatattatatgtgttatacatgtatgatattttagttagacatattagctttaattaggcacacttaatattagtttttgtaatattagacacaagttaatattagctttaggtatatatacctaaaatttagacacgtaaattttgagctttgttaatattaggctaaataatttttaggttttgtaataatattaggctaaataattttgagttttaaataaatgagttgattagttatattatttgatttagttatttttagtttgaatatatatatatata

SEQ ID NO: 8154 - DNA, 1244 bp, Glycine max
  Gm_smallRNAprecursor_987
ttgctttcttcttcaatttttcgtgtactccttctcctccgtaattactggtaagtattttttaattaaataatatttatgtattatgttcttaatattataaaaagattaagttagttagtattaataggtatttcaagattaggttagttagttttaatatgtattctattgttaatttttatgtattaataggtatttgaaggttaggttaattagcatgaaaatattatttggttagttagtatgaaaatattatttgattattgtatatattctgagatattatatgtgttgtatatgtatgatattttagttagacatattagctttagttaggcacataatattagtttttgtaatattagacacaagttaatattagttttcggtatatatatctaaaatttaggcacgtaaattttgagcttttgtaatattaggctaaataattttgagcttttgtaataatattaagctaaacaattttgagttttaaataaatgagttgataagttatattatttgatttaattatttttagtttgaatttttttaatatatatatatatatatatatatatatatatatatatatatatatatatataatagggtagtttacgttagtatatggtaggttttattattagtttgtaggttaatattttttgttttacggaatttacgttattaaatataaatatatattatgagatattatatgtgttatacatgtatgatattttagttagacatattagctttaattaggcacacttaatattagtttttgtaatattagacacaagttaatattagctttaggtatatatacctaaaatttagacacgtaaattttgagctttgttaatattaggctaaataatttttaggttttgtaataatattaggctaaataattttgagttttaaataaatgagttgattagttatattatttgatttagttatttttagtttgaatatatatatatatatatatatatatatatatatatatatatatatatatatatatatatatatatatatatatgatatggtagtttacgttagtacatgataggttttattttttgtttgtagattaatattctttgttttaggaaatttacgttattaaatatatgatgcattgtacattattattatttttgtatatatattgtttaaatattttttggcatttcaatatttgtttgtattttaatttatttgtt

SEQ ID NO: 8155 - DNA, 1053 bp, Glycine max
  Gm_smallRNAprecursor_988
ttgattagttatattatttgatttagttatttttagtttgaatatatatatatatatatatatatatatatatatatatatatatatatatatatatatatatatatatatatatgatatggtagtttacgttagtacatgataggttttattttttgtttgtagattaatattctttgttttaggaaatttacgttattaaatatatgatgcattgtacattattattatttttgtatatatattgtttaaatattttttggcatttcaatatttgtttgtattttaatttatttgttagtccatattttattgaattatttatttgttaattgaagaatatattatgttaattatttaaatttgtgtgtgcatgtatttaaaattatttgtagaatatatttaaattttattatttgtataatatattttgttatgaaataataatattttgttatttatttaaatttgtataatatatatttaataacgtttttataaatgtgcgtagtttaatttatattatctacaaataatatataaattgatttgtaaatttattgtattatattttattttgcagtagtaatggtatcttcatcgtcatgtccatcacatattaaaattaagtctgatcccattgatggtgatgtattatggatgcaacctaagcatgtttcagaacatatttggaatgggaaagaaaatctgaaattatatatcagacgagctgtccccacgtatcaaggggaagaagaaattccagagcaaatttttccttttcttcgacaatctggtctttactggattatgaagatgtgatacttaaaaataaatgcctcattaattagtgctctgataaaaaagatggaggccggaaacacatacgtttcacatgagatgcggagagtgtactattactctccaagacgtctctgtattgttaggtatatctgtagatagtttaccattaatcggtccaacaaatcttgattgggctgatttatgtgaggaattattgagattcaaaccacaagaaggtgaaattaaagg

SEQ ID NO: 8156 - DNA, 1053 bp, Glycine max; identical to SEQ ID NO: 8155
  Gm_smallRNAprecursor_989

SEQ ID NO: 8157 - DNA, 1123 bp, Glycine max
  Gm_smallRNAprecursor_990
ttgattagttatattatttgatttagttatttttagtttgaatatatatatatatatatatatatatatatatatatatatatatatatatatatatatatatatatatatatatgatatggtagtttacgttagtacatgataggttttattttttgtttgtagattaatattctttgttttaggaaatttacgttattaaatatatgatgcattgtacattattattatttttgtatatatattgtttaaatattttttggcatttcaatatttgtttgtattttaatttatttgttagtccatattttattgaattatttatttgttaattgaagaatatattatgttaattatttaaatttgtgtgtgcatgtatttaaaattatttgtagaatatatttaaattttattatttgtataatatattttgttatgaaataataatattttgttatttatttaaatttgtataatatatatttaataacgtttttataaatgtgcgtagtttaatttatattatctacaaataatatataaattgatttgtaaatttattgtattatattttattttgcagtagtaatggtatcttcatcgtcatgtccatcacatattaaaattaagtctgatcccattgatggtgatgtattatggatgcaacctaagcatgtttcagaacatatttggaatgggaaagaaaatctgaaattatatatcagacgagctgtccccacgtatcaaggggaagaagaaattccagagcaaatttttccttttcttcgacaatctggtctttactggattatgaagatgtgatacttaaaaataaatgcctcattaattagtgctctgataaaaaagatggaggccggaaacacatacgtttcacatgagatgcggagagtgtactattactctccaagacgtctctgtattgttaggtatatctgtagatagtttaccattaatcggtccaacaaatcttgattgggctgatttatgtgaggaattattgagattcaaaccacaagaaggtgaaattaaaggtagtgtggttaaattaagttgactgactcaccattttgcacaaataaataacgacgacgacgaacaagta

SEQ ID NO: 8158 - DNA, 1123 bp, Glycine max; identical to SEQ ID NO: 8157
  Gm_smallRNAprecursor_991

SEQ ID NO: 8159 - DNA, 1046 bp, Glycine max
  Gm_smallRNAprecursor_992
tatatatatatatatatatgatatggtagtttacgttagtacatgataggttttattttttgtttgtagattaatattctttgttttaggaaatttacgttattaaatatatgatgcattgtacattattattatttttgtatatatattgtttaaatattttttggcatttcaatatttgtttgtattttaatttatttgttagtccatattttattgaattatttatttgttaattgaagaatatattatgttaattatttaaatttgtgtgtgcatgtatttaaaattatttgtagaatatatttaaattttattatttgtataatatattttgttatgaaataataatattttgttatttatttaaatttgtataatatatatttaataacgtttttataaatgtgcgtagtttaatttatattatctacaaataatatataaattgatttgtaaatttattgtattatattttattttgcagtagtaatggtatcttcatcgtcatgtccatcacatattaaaattaagtctgatcccattgatggtgatgtattatggatgcaacctaagcatgtttcagaacatatttggaatgggaaagaaaatctgaaattatatatcagacgagctgtccccacgtatcaaggggaagaagaaattccagagcaaatttttccttttcttcgacaatctggtctttactggattatgaagatgtgatacttaaaaataaatgcctcattaattagtgctctgataaaaaagatggaggccggaaacacatacgtttcacatgagatgcggagagtgtactattactctccaagacgtctctgtattgttaggtatatctgtagatagtttaccattaatcggtccaacaaatcttgattgggctgatttatgtgaggaattattgagattcaaaccacaagaaggtgaaattaaaggtagtgtggttaaattaagttgactgactcaccattttgcacaaataaataacgacgacgacgaacaagtacgaaggtttgcccgtgcat

SEQ ID NO: 8160 - DNA, 1155 bp, Glycine max
  Gm_smallRNAprecursor_993
ttgatttgtaaatttattgtattatattttattttgcagtagtaatggtatcttcatcgtcatgtccatcacatattaaaattaagtctgatcccattgatggtgatgtattatggatgcaacctaagcatgtttcagaacatatttggaatgggaaagaaaatctgaaattatatatcagacgagctgtccccacgtatcaaggggaagaagaaattccagagcaaatttttccttttcttcgacaatctggtctttactggattatgaagatgtgatacttaaaaataaatgcctcattaattagtgctctgataaaaaagatggaggccggaaacacatacgtttcacatgagatgcggagagtgtactattactctccaagacgtctctgtattgttaggtatatctgtagatagtttaccattaatcggtccaacaaatcttgattgggctgatttatgtgaggaattattgagattcaaaccacaagaaggtgaaattaaaggtagtgtggttaaattaagttgactgactcaccattttgcacaaataaataacgacgacgacgaacaagtacgaaggtttgcccgtgcatggatactgagattcattggaggtgtcttgttcgttgacaaaaacagtaacaaagtttcgctaaggtaccttcaatttttacgtgactttgaatactgtggcacatatgcatgaggagctgtcgtacttgattttctatacagaggagatgtgcagtgccaccgattataaaacttaatcaatcggagatatgtgcatcttactacaaatgtgagcatgggaacgatgtccaaccttggctccaaagagaactccttcccaagtagaaaataaaccactgaggcacatgttagtcatttttaaaagcgtctttcatttcaatagaataaatggttttagggtatattaaattttaatctttgtaggtggctgcgacgtggaaaccaacatatcggcaatgatgatgtgagagtttttcgtcgcaagttggatattatgaaacgtcatgaggtaagaacatggtattttatttgtaaaataaagaatgatatgtgttattttactaaaatgttgacaattatgttgttatatgcagtttgtgtgggagccttacacaaa

SEQ ID NO: 8161 - DNA, 1035 bp, Glycine max
  Gm_smallRNAprecursor_994
gatttgtaaatttattgtattatattttattttgcagtagtaatggtatcttcatcgtcatgtccatcacatattaaaattaagtctgatcccattgatggtgatgtattatggatgcaacctaagcatgtttcagaacatatttggaatgggaaagaaaatctgaaattatatatcagacgagctgtccccacgtatcaaggggaagaagaaattccagagcaaatttttccttttcttcgacaatctggtctttactggattatgaagatgtgatacttaaaaataaatgcctcattaattagtgctctgataaaaaagatggaggccggaaacacatacgtttcacatgagatgcggagagtgtactattactctccaagacgtctctgtattgttaggtatatctgtagatagtttaccattaatcggtccaacaaatcttgattgggctgatttatgtgaggaattattgagattcaaaccacaagaaggtgaaattaaaggtagtgtggttaaattaagttgactgactcaccattttgcacaaataaataacgacgacgacgaacaagtacgaaggtttgcccgtgcatggatactgagattcattggaggtgtcttgttcgttgacaaaaacagtaacaaagtttcgctaaggtaccttcaatttttacgtgactttgaatactgtggcacatatgcatgaggagctgtcgtacttgattttctatacagaggagatgtgcagtgccaccgattataaaacttaatcaatcggagatatgtgcatcttactacaaatgtgagcatgggaacgatgtccaaccttggctccaaagagaactccttcccaagtagaaaataaaccactgaggcacatgttagtcatttttaaaagcgtctttcatttcaatagaataaatggttttagggtatattaaattttaatctttgtaggtggctgcgacgtggaaaccaacatatcggcaatgatgatgtgagagtttttcgtcgcaagttggatattatgaa

SEQ ID NO: 8162 - DNA, 1152 bp, Glycine max
  Gm_smallRNAprecursor_995
gatttgtaaatttattgtattatattttattttgcagtagtaatggtatcttcatcgtcatgtccatcacatattaaaattaagtctgatcccattgatggtgatgtattatggatgcaacctaagcatgtttcagaacatatttggaatgggaaagaaaatctgaaattatatatcagacgagctgtccccacgtatcaaggggaagaagaaattccagagcaaatttttccttttcttcgacaatctggtctttactggattatgaagatgtgatacttaaaaataaatgcctcattaattagtgctctgataaaaaagatggaggccggaaacacatacgtttcacatgagatgcggagagtgtactattactctccaagacgtctctgtattgttaggtatatctgtagatagtttaccattaatcggtccaacaaatcttgattgggctgatttatgtgaggaattattgagattcaaaccacaagaaggtgaaattaaaggtagtgtggttaaattaagttgactgactcaccattttgcacaaataaataacgacgacgacgaacaagtacgaaggtttgcccgtgcatggatactgagattcattggaggtgtcttgttcgttgacaaaaacagtaacaaagtttcgctaaggtaccttcaatttttacgtgactttgaatactgtggcacatatgcatgaggagctgtcgtacttgattttctatacagaggagatgtgcagtgccaccgattataaaacttaatcaatcggagatatgtgcatcttactacaaatgtgagcatgggaacgatgtccaaccttggctccaaagagaactccttcccaagtagaaaataaaccactgaggcacatgttagtcatttttaaaagcgtctttcatttcaatagaataaatggttttagggtatattaaattttaatctttgtaggtggctgcgacgtggaaaccaacatatcggcaatgatgatgtgagagtttttcgtcgcaagttggatattatgaaacgtcatgaggtaagaacatggtattttatttgtaaaataaagaatgatatgtgttattttactaaaatgttgacaattatgttgttatatgcagtttgtgtgggagccttacacaa

SEQ ID NO: 8163 - DNA, 1149 bp, Glycine max
  Gm_smallRNAprecursor_996
ttgttactgcttttgtcaacgaacaagacacctccaatgaatctcagtatccatgcacgggcaaaccttcgtatttgttcttcgtaatcgttgtttatttgtgcaaaatggtgagtcagccaacttaatttaaccacactacctttaatttcaccctcttgtggtctgactcccaataattcctcacataaatcagcccaatcaagatttgttggaccgattaatggtaaaccatctacagatatacctaacaatacacagacgtcttggagagtaatagtacactctccgcatctcatgtgaaacctatgtgtttccggcctccatctttttatcatagcactaattaatgaggcatttatttttaagtatcacatcttcataataaaaaccagattgtcgaagaaaaggaaaaatttgctctggaatttcttcttccccttgatacgtggggacagctcgtctgatatataatttccgatcttctttcccatcccaaatatgttctgaaacatgcttaggttgcatccataatacattaccatcaatggggccagacttaattttaatatgtgatgaacatgacgatgatgataccattactactgcaaaataaaatataatacaataaatttacaaatcaatttatacattatttgtagataatataaattaaactacgcacatttataaaaacgttattaaatatatattatacaaatttaaataaataacaaaatattattatttcataacaaaatatattatacaaataataaaatttaaatatattctacaaataatttcaaatacatgcacacacaaatttaaataattaacataatatattcttcaattaacaaatagataattcaataaaatatttactaacaaataaattaaaatacaaacaaatattgaaatgccaaaaattatttaaacaatatatatacaaaaataataataatgtacaatgcatcatatatttaataacgtaaattttctaaaacaaagaatattaacctacaaactaaaaataaaatctaccatgtactaatgtaaactaccctatcatatatatatatatatattaaaaaaattcaaactaacaataactaaatcaaataatataactaatcaattcattta

SEQ ID NO: 8164 - DNA, 1046 bp, Glycine max
  Gm_smallRNAprecursor_997
tcagaatatatacaataatcaaataatattttcatactaactaaccaaataatattttcatgctaattaacctaaccttcgaatacctattaatacataaaaattaacaatagaatacatattaaaagtaactaacctaatcttgaaatacctattaatactaactaacttaatctttttataatattaagaacataatacataaatattatttaattaaaaaatacttaccagtaattatggaggagaaggagcacacgaaaaattttgaagaagaaagcaaaggatagcactttcggggaggagaagctgtaagtttgaaatgtaagtttatgatgttatgaagattttttttataggaaaaaatgcccaacgttcaacagctaacgttcaaaaagcaacgtttaaaaacactgcagcaacatgcaagccctagcctggaacctactcctgcacccttgcaacactgcacccctgcagttgggcacaacctgtctcgccaatgggacaggcgagacctgctcacgaggtgccaagtcagcatggttctcgccagcagcaatggcggttcctacgtggacgcgtctcgcccgtaacaatggcggcatccttccagctggactgcgtctcgcccgtaacaatggcggcacccagccatgtcagcagctttctcgtcactgctgatggcggtacgagcttctcgccaattcttctggcggcatccatggaggaacagacccccttgtaaaaagtttgaaaacagaccctctttcataattagttttgaaaagtaaccctcaacagtaaatttgccggtgtttgcatacttgtaaatattttacatcaactatactaggtcagttgggtgtatgattctgacatttgtttcatatttactattttttcttacaaatcttgtatatttttatactactagtgcctaatgtatattatttgattgcaaacacaacggtgaaaattgaggtatatcattggctatcccaaaacaaacagtcgatttcgcatattacagatttgtgttggta

SEQ ID NO: 8165 - DNA, 1149 bp, Glycine max
  Gm_smallRNAprecursor_998
taacctaaccttcgaatacctattaatacataaaaattaacaatagaatacatattaaaagtaactaacctaatcttgaaatacctattaatactaactaacttaatctttttataatattaagaacataatacataaatattatttaattaaaaaatacttaccagtaattatggaggagaaggagcacacgaaaaattttgaagaagaaagcaaaggatagcactttcggggaggagaagctgtaagtttgaaatgtaagtttatgatgttatgaagattttttttataggaaaaaatgcccaacgttcaacagctaacgttcaaaaagcaacgtttaaaaacactgcagcaacatgcaagccctagcctggaacctactcctgcacccttgcaacactgcacccctgcagttgggcacaacctgtctcgccaatgggacaggcgagacctgctcacgaggtgccaagtcagcatggttctcgccagcagcaatggcggttcctacgtggacgcgtctcgcccgtaacaatggcggcatccttccagctggactgcgtctcgcccgtaacaatggcggcacccagccatgtcagcagctttctcgtcactgctgatggcggtacgagcttctcgccaattcttctggcggcatccatggaggaacagacccccttgtaaaaagtttgaaaacagaccctctttcataattagttttgaaaagtaaccctcaacagtaaatttgccggtgtttgcatacttgtaaatattttacatcaactatactaggtcagttgggtgtatgattctgacatttgtttcatatttactattttttcttacaaatcttgtatatttttatactactagtgcctaatgtatattatttgattgcaaacacaacggtgaaaattgaggtatatcattggctatcccaaaacaaacagtcgatttcgcatattacagatttgtgttggtatgacaatgttaaatgtgtggatacgaacatgaattagaatagtgtggttttattgtaatttccattgtgaaagtcaagtgtgacattgtttctcttattccaggagctttgctttcctactttcttcaacctgtatatctttcttcaattactgttggtctgccccttga

SEQ ID NO: 8166 - DNA, 1096 bp, Glycine max
  Gm_smallRNAprecursor_999
ttgcaggaagactagggcacgttattgctttgcaggagactagggcactgttattgcattggttagggcaatgagaagcatgcagcaggtcacatgcattgcaggttagggtattcagactaggcatgtaggaggtgaatagtacactctccgcatctcatgtgaaaggtatgtgtttccggcctccatctttctatcagagcattaattaatgagacatttatttttaagtatcccatcttcataatccagtaaaaaccagattctcgaagaaaaggaataatttgctctgaaatttcttcttcccttgatacgtggggacaactcgtcttatatgtaatttccgatcttcttccccattccaaacatgttctgaacatgcttaggttgcatccataatacatcactatcgatcgggccagacttaattttaatatgtaatggacaagacgatgaagatgtcattgatactgcaataaattcccaaaacaatttatacattatttgtagataatataaataaaactacgcacatttataaaaacgttattaaatatatataaataaatttgtaataaataaaattgggtaattttgaatatattctatacataaattaaaatagatgtgaagacaaatttaaataaataacaaaatatattatacaaataataaaatttaaatatattctacaaatactttcaaatacatacacatagacaaattaaaataaataacataatatattctacaattaacaaataaataattaaataaaatatggactaccaaataaattaaaatacaaacaaatattgaaatgcaaaaaattatttaaacaacgtgtaatacaaaaataataataatgtacaatgtatcatatatttaatcatgtaaattctctaaaacaaataatattaacctacaaactaaaactaacaaataatatatataacattctaactaaaaataattaactcaaataatattaacttatcaattcatttatttaaaattgtattatctatatataacatacaaaatcataatataaatttaaatgtgttctcacgtcttcctttctttaacttccttt

SEQ ID NO: 8167 - DNA, 1195 bp, Glycine max
  Gm_smallRNAprecursor_1000
caactaactaatcatcatctaatgatataccaaaacagtcgtcctcattctggtagaatggatcatcatcttggtcatcattattttctgatgattcggcctccttttttgggggttcttcatcttcttcttgttgaagtagttggagaacttccttgagattctgggcaagactctctttagattttgagcttgccaagaatgctgcaagttgagacttctgattcagaaataaggatgtctctggatcagcaggtttgagaaactcagggttgctctgaaaccaattcttgacctgatctggagcagcctttgaggtatcgaattgtgaccaccattttacaaaggcatgtctttgtaatggcggatactgcttgcaattttcagtttttccatatttgtattgccatgaaaaaatccatgacaaagcaaagctggaaaagtacttcaaatctgctggaattcttgattctttgctattgaagagtttgttgaactgttggaatccctgttggacttcttctggaaatatctgtggtattggtccgaagtagttccaccattggaggaaccaatttggaaaattgtacacggtgttatttttgaagtaaatcagccatgaatgcttgaatttactattttgatgccagaatacattggtccaggcgtcaatgtaatcccaataattatatcctgcagggtcaaaaggtgcagaaaatttcttgggttggttcaagttggagccataatgtcatggctgcattacttttaggatctggattgtggagtgggtgtttagatttgggtctttggggtccttgaaatgtttaatagatacggagttcgtatctattaggatgaattcatagaattttctggttttgtttatggctgttggcctataatgaaatcctggggggaatactttggcggtggccttgaaaggattcttatcccagtattttggttccatttgtaagacattgaagaatttgttttttgaaatgtagctgttgttgggttgtgatgttgagtcttgttgagtcaacggttggctttgtttttggttacagatggttttggtctgtttggctttttgaatttgtttttgcagatccattttagaatcatcgtctgattctgaggccatttctgcccaggtccttttggctaattttggtactttggtaaggcc

SEQ ID NO: 8168 - DNA, 1197 bp, Glycine max
  Gm_smallRNAprecursor_1001
caactaactaatcatcatctaatgatataccaaaacagtcgtcctcattctggtagaatggatcatcatcttggtcatcattattttctgatgattcggcctccttttttgggggttcttcatcttcttcttgttgaagtagttggagaacttccttgagattctgggcaagactctctttagattttgagcttgccaagaatgctgcaagttgagacttctgattcagaaataaggatgtctctggatcagcaggtttgagaaactcagggttgctctgaaaccaattcttgacctgatctggagcagcctttgaggtatcgaattgtgaccaccattttacaaaggcatgtctttgtaatggcggatactgcttgcaattttcagtttttccatatttgtattgccatgaaaaaatccatgacaaagcaaagctggaaaagtacttcaaatctgctggaattcttgattctttgctattgaagagtttgttgaactgttggaatccctgttggacttcttctggaaatatctgtggtattggtccgaagtagttccaccattggaggaaccaatttggaaaattgtacacggtgttatttttgaagtaaatcagccatgaatgcttgaatttactattttgatgccagaatacattggtccaggcgtcaatgtaatcccaataattatatcctgcagggtcaaaaggtgcagaaaatttcttgggttggttcaagttggagccataatgtcatggctgcattacttttaggatctggattgtggagtgggtgtttagatttgggtctttggggtccttgaaatgtttaatagatacggagttcgtatctattaggatgaattcatagaattttctggttttgtttatggctgttggcctataatgaaatcctggggggaatactttggcggtggccttgaaaggattcttatcccagtattttggttccatttgtaagacattgaagaatttgttttttgaaatgtagctgttgttgggttgtgatgttgagtcttgttgagtcaacggttggctttgtttttggttacagatggttttggtctgtttggctttttgaatttgtttttgcagatccattttagaatcatcgtctgattctgaggccatttctgcccaggtccttttggctaattttggtactttggtaaggccta

SEQ ID NO: 8169 - DNA, 1151 bp, Glycine max
  Gm_smallRNAprecursor_1002
gtaggtgacccagaagatgacgcggttgccttcttggttatcggctctagtagagccaatagaacatcttttcctttagaactggatcttcctcctctgccggaggagctggacaccttaggaggcatcgggaattttctgtaaaaattcacgggtgaggtagtcaggtagagagtttgaagagcccttgatatactctatgtcaaaatcaaagacgcttaaaattgcttgccatcttgcaaaaatttgttttgagacaaggcttttaacatccatttgtaaaatgtctttggctgatttgcagccaaccctaagtaaaaatttttgattcaataaatcagattgaaatttggaaatgcacaaaacaattgctaaaacttcttttttaacggttgaatattttaattgtgcaggattccaatgttttgaagtatatgcaatgacatgctcttgaccatgtacttgctgtttgaggatgccaccataaccgatgtctgatgcatcagtttcgacaattttgaatgcctgtggaatggaaagatatagacattttatggattggactttgactttgatttctttaactgcttgagtatggaggtcagaccaaggaggcggattctttttcagcctatcatgtaatggtttgacaatattgtttaaataggggacaaattctcctacataatttagacaccccagaaattgttgtaactgggttttatctaggatttggttaggaaatttgtcggcaaactctattgatctttctattggaatgattgtaccttggtatatattgtgaccaaggaatcgtattcgtgtctggaaaagattgatttttgatttggagactgccaaaccattctgtttaatgatatggatgaaagtctgaaggtgtttgaaatgttgatcaatatcttgggaaaagattaaaacatcatcaatatagacaatgacgaattttgaataaggattgaaaatatcattcataattttttgaaattctgaaggggcattcttcagtccgaatggcattacattccactcatattgcccgaaaggtacagtaaacgccgttttgtacctgtctgattcttggatttggatttgccaaaatccagatttcatatcaaattttgaaaatactt

SEQ ID NO: 8170 - DNA, 1038 bp, Glycine max
  Gm_smallRNAprecursor_1003
cccagaagatgacgcggttgccttcttggttatcggctctagtagagccaatagaacatcttttcctttagaactggatcttcctcctctgccggaggagctggacaccttaggaggcatcgggaattttctgtaaaaattcacgggtgaggtagtcaggtagagagtttgaagagcccttgatatactctatgtcaaaatcaaagacgcttaaaattgcttgccatcttgcaaaaatttgttttgagacaaggcttttaacatccatttgtaaaatgtctttggctgatttgcagccaaccctaagtaaaaatttttgattcaataaatcagattgaaatttggaaatgcacaaaacaattgctaaaacttcttttttaacggttgaatattttaattgtgcaggattccaatgttttgaagtatatgcaatgacatgctcttgaccatgtacttgctgtttgaggatgccaccataaccgatgtctgatgcatcagtttcgacaattttgaatgcctgtggaatggaaagatatagacattttatggattggactttgactttgatttctttaactgcttgagtatggaggtcagaccaaggaggcggattctttttcagcctatcatgtaatggtttgacaatattgtttaaataggggacaaattctcctacataatttagacaccccagaaattgttgtaactgggttttatctaggatttggttaggaaatttgtcggcaaactctattgatctttctattggaatgattgtaccttggtatatattgtgaccaaggaatcgtattcgtgtctggaaaagattgatttttgatttggagactgccaaaccattctgtttaatgatatggatgaaagtctgaaggtgtttgaaatgttgatcaatatcttgggaaaagattaaaacatcatcaatatagacaatgacgaattttgaataaggattgaaaatatcattcataattttttgaaattctgaaggggcattcttcagtccgaatggcattacattcc

SEQ ID NO: 8171 - DNA, 1105 bp, Glycine max
  Gm_smallRNAprecursor_1004
tcaagaatgtttttgtccatcagactcactgttttgtttggataacaattaaaatatactggaccttgtcctaggctggtttcgactgttccaattaagaagtcttcaaatttattgtgcctaatatctcttagacacattaaaactgctgcatctatgcccatgtctattaagggcttgatggctacttgtacacaaccgatgtgtaaatatttatactttcgactatgttcataaattgaattttttgaaagtaaatgaaattcttcccatatgtcttgtcctagaggaatattattttctactgttttgattatgtaatcaaagttgtgtttatctttaattgtttcaggaacgtatagttgatcctgagggatttctgggatgttccagtcatccatgttttgattgatatcttcgaatcggacttcctcatcgaagagattgtgtttaggggcgacctcatgggtctggttatcttgatcacttaataagtttgaatttctggaagaagttgatgaagaggaattagatcgaaaggaaatacgtgaaaaagaacgcagaagtctagacatgattatcaaattctctaatatctttgccctcatttggttccatagaaatatttccgtaagtaaatacgtaacaaaattttttggatctgaaatatttttaagcaaaaactcctttttttttaaatagtttgaacggcaatcctataaccaccagtatattatgtgttgatattttggttaaacagtacaccttagccttactgtcctttatccatcacgggtcttactgctacagtaccattcaactaaaatattagactactgtacttccagaaagtactgttcaaacatctattgtacagatcaaaataaaatattactcatagtatacaaggttccagatccataaaatttgtttacatatgtccttacggaccgtatttctacttccccatcaggctctgataccagttatatatatatatatatatatatatatatatatatatatatatatatatatatatatatatatatattattttttgggtaccaatatataatattattttttggatacaattaatttt

SEQ ID NO: 8172 - DNA, 1079 bp, Glycine max
  Gm_smallRNAprecursor_1005
agaatctagaactatcatgatactaatctatcatgaaaactctagaaagacctaaagtaatgtagaaacattcaccaccattgagaggttggtgacttgagcctataaatacacaattggtatgttgtaattgacaatccaagaaatcaatgacatagccttctttctaaaataactctctaaaattatcaactgtcaactatcatctaatcaactaccaacaatggcgtcagagctacgttcggtcatacattgggcgtagttatattatctacctaccattccaaaatcctcccaactacttcaaaaatttcctttgtactattaacccactccaataatattttttctaagctatggataacactactcaatcgtcaactatttctctccctatcttcaatggtgaaattatgatttctggcgtgttaaaatggaaacatatttttcatctcaagatttatgggacatagtagaagaaggcttcaccattcccgtggatacttcagctcttaatgcatctagagaaaaagagttaaagaaaaataaacagaaaaattcaaaggcgttgttcaccttgcaacaagcggtgactgatccaattttcccaagaattatgggagctaagactgccaaagaagcgtggaacacattgcaggaggagtttcaaggaagtgttaaggtacgtgccgttaaacttcaatctctaagaagagattttgaactattgaagatgaaggagtctgagacagttaaatattactattttaaagttaaagaaatagttaatcaaatgagagcttttggggaagatattcttgacaagaaaattgttgagaaaattctaattactatgccccaaaagtttgacccaatcgtgacaacgattgaggaaaccaaagatctgtccactctatcagagacagaacttgtgggctctcttgaagtatatgagcaaagactgtataggcataaagaagatacaattgaaaatgccttctagtcaaagtttaaatttcagccccaaaacaaagaaaatagaggaaagaaaaattatggagaaacttccagaagaagag

SEQ ID NO: 8173 - DNA, 1085 bp, Glycine max
  Gm_smallRNAprecursor_1006
tgcaacaaacattaccatgaaggtacaagttgatgattcatggctatggcatcgaagatttggccacttcaacacacatgccttgaagttgttacatgagaaaaacatgatgagagatcttccaagcataaaggagaacaatgaagtgtgtgaaggatgtgtccttggtaagcaacactgatttcctttctcaacaagcggagcatggagagcgaaagatctattggagctgatacatacggacgtttgtggaccaataaggatgccatcacatgggaacaacaggtacttcatactcttcattgatgacttctgtagaatgacatgggtatattttctaaaagaaaaatcagaagtctttggagtattcaaaaagttcaaggcccttgctgaaaatcaaagtggaaaacggataaaagtactaagaagtgattgcggcaaagagtacacctctcgcgagtttgaaagattttgtgaggatgaaggcattgagcgacaacttacagtcgcatattctcctcaacaaaatggagtgtccgagagaaagaatcgcacagttatggagatggctagatcgatgctcaaggagaagggactacctaacacattctgggttgaagcagtctacactggtgtttacatactcaacagatatccaactaagtctgtaaaagacaagactccaattgaagcttggaatgggaagaagccataagccaagcacctaaggatctttggatctatatgctacattcttattccagacgtgaagaggcacaagcttgaagacaagactatacgaggtatcttccttgggtatagcaatatctctaagggctaccgtgtctacaacttgcaaactaagaaactcgtcatcagtcgagatgttgaagttgatgaatatgcttcttggaattgggatgaagaaaaagtggagaagaacgttcttatacccgctcaactacctcaagaagaagctgaggaagaagacccaggtgaaccaccttcacctccaccacaacaacaagatcaagaactatcatcaccagagtctactccaagacgagaaagatctttggtggaca

SEQ ID NO: 8174 - DNA, 1053 bp, Glycine max
  Gm_smallRNAprecursor_1007
cacatgtcactaggcaacttggtcagttttctgcaatcatacaacttcaaagtttgcagattgtataaattacacaatgactttggcagtgtttctacacttgaaccagagagatctaaatagcgcagatggatcaatttacctattgagtcaggcaaagaatccagactttggaagtcacaaaatgataaaactctcaagtacataagcttcgacactatgatacattgtgcctcctcattgttgaatggagcagcttcaaaatttataatggacaagaaagttctcagaaattttgctctaccaacaacatcaaagttgtccaagactgaagaattgaatttggcaaatgacaaatgacgagtcttagtattgatctttgtttctttcccaagttcttctgatctaaagtaaaaatctccaccgagtgatgtggctagatcatgcatgaggtcatgcatcacaaaacattcgccataaggcctactacttctatctgtacttgaacgttggaaaaacaatctcgaaaccaaatcatcaaaatactcatgaccaacctcttctaaagtcctaccatttcttggtttcttcaaaagatcttcggccatccacaacaagattaattcatttttttcaaattcgtaatcttgtggatacaacgaacaataaacaaagcaccgttttaaatgtggagggagataatgataactaagtctcagtgctggaataactttacactcactttcagaaagttcccaaatgtcactattcagaatattattccatttcccaatgtcacgctttcttctcaacatgcctccgagcgactgtgctgctaaaggcagtccgttgcactttttaacaatctcctttccaattttttctagtgttgttgtgttcccgttcgattcggagtaaagacacgcatggttcgcaaacactgaccaacaatcttcattcgacaattggtttagatgataggtgtgaacagtttggactatagatgctgttttttcactgcgggttgttagaagaatcttacttctcctaatc

SEQ ID NO: 8175 - DNA, 1120 bp, Glycine max
  Gm_smallRNAprecursor_1008
ttaattgtcttggatgatgtttggacagagaattatgttaactggagacttcttaagaaaccatttaaccgtgggattaggagaagtaagattcttctaacaacccgcagtgaaaaaacagcctctatagtccaaactgttcacacctatcatctaaaccaattgtcgaatgaagattgttggtcagtgtttgcgaaccatgcgtgtctttcctccgaatcgaacgggaacacaacactagaaaaaattggaaaggagattgttaaaaagtgcaacggactgcctttagcagcacagtcgcttggaggcatgttgagaagaaagcatgacatcgtggattggaataatattctcaatagtgacatttgggaactttctgaaagtgagtgtgaagttattccagcactgagacttagttatcattatctccctccacatttaaaacggtgctttgtttattgttcgttgtatccacaagattacgaatttgaaaaaaatgaattaatcttgttgtggatggccgaagatcttttgaagaaatcaagcaaaggtaggactttagaagaggttggtcatgagtattttgatgatttggtttcgagatcatttttccaacgttcaaacacaagtagaagtagttggccttatggcaaatgttttgtgatgcatgacctcatccatgatctagccacatcactcggtggagatttttactttagatcagaagaacttgggaaagaaacaaagatcaagaccaagactcgtcatttgtcatttacgaaattcaattcttctgtcttggacaactttgatgttgttggtagagcaaaatttctgagaactttcttgtccatcatcaattataaagctgctccattacacaatgaggaggcacaatgtatcatagtgtcgaagcttatgtacttgagagttttatcattttgtgacttccaaagtttgtattctttgcctgattcaataggtaaattgatccatctgcgctatttagatctttctcattcaagtgtagaaacactgccaaagtcattgtgtaatttatacaatctgcaaactttgaagttgtctaattgcagaaaactgactaagttgcctagtgaca

SEQ ID NO: 8176 - DNA, 1068 bp, Glycine max
  Gm_smallRNAprecursor_1009
ttaagaaaccatttaaccgtgggattaggagaagtaagattcttctaacaacccgcagtgaaaaaacagcctctatagtccaaactgttcacacctatcatctaaaccaattgtcgaatgaagattgttggtcagtgtttgcgaaccatgcgtgtctttcctccgaatcgaacgggaacacaacactagaaaaaattggaaaggagattgttaaaaagtgcaacggactgcctttagcagcacagtcgcttggaggcatgttgagaagaaagcatgacatcgtggattggaataatattctcaatagtgacatttgggaactttctgaaagtgagtgtgaagttattccagcactgagacttagttatcattatctccctccacatttaaaacggtgctttgtttattgttcgttgtatccacaagattacgaatttgaaaaaaatgaattaatcttgttgtggatggccgaagatcttttgaagaaatcaagcaaaggtaggactttagaagaggttggtcatgagtattttgatgatttggtttcgagatcatttttccaacgttcaaacacaagtagaagtagttggccttatggcaaatgttttgtgatgcatgacctcatccatgatctagccacatcactcggtggagatttttactttagatcagaagaacttgggaaagaaacaaagatcaagaccaagactcgtcatttgtcatttacgaaattcaattcttctgtcttggacaactttgatgttgttggtagagcaaaatttctgagaactttcttgtccatcatcaattataaagctgctccattacacaatgaggaggcacaatgtatcatagtgtcgaagcttatgtacttgagagttttatcattttgtgacttccaaagtttgtattctttgcctgattcaataggtaaattgatccatctgcgctatttagatctttctcattcaagtgtagaaacactgccaaagtcattgtgtaatttatacaatctgcaaactttgaagttgtctaattgcagaaaactgactaagttgcctagtgaca

SEQ ID NO: 8177 - DNA, 1200 bp, Glycine max
  Gm_smallRNAprecursor_1010
acgtttcccctcatcaaagcattgtacccatttttgtttgggtaatagatcaagccattcaactgcacttggcttattcgcacgaatatccccaagatgtcgccaatgcatcttctccgtgtatgtgtatcctgtaaatatttaatcaatgtattatgttataaaatttgattgaaagaaaattataatgaataaataaaatagattctcaccagccaacataagtggtttctttaaatgtttgcagtttgagttaccacgaagaaatttttgtgcaatgtggcgcaggcaaaagaaatgggatgtgtcctggacccataagttacttgagttgttgtaggcacttataattgaggggtgtcggtctgaaataagagaaatgttaatttgaggagtaacatgtcttcttaaattctttagaaaaaatccctaagttgaagttgtctccccttctacaatggcataagcaatcgggaagatatggttagctctatcttgtgcggtagctatcaacagtgtgctagtatactttccgtaaagtcatgtatcatctacttgtactatgggtttgcaatatgcaaaaccattaatgcatggaccaaatgaccaaaagacacgcttaaacaatcttttgcccggtactatttctcccccttcatacaaggattctgtttgagcaacgaccacagtcccgggaacacaagattgcaaagctccgaaaagttttgacagtttggcatctgattcttcccagtttccatgaatcatctccaatgctttttactttgctaaccatgtcttcttgtaggatggggtataattcatgaatgttttgatctctgcaatcaacgtcttgatggagacagttgggtttgttttgacaattggttggatgatttgggctatgacatgtttgtcgagttggcgatgatcttgtctgagcatcggcacgagacaagtgtgatgacctctgatactcttgataatccatttgttatgcctctttgaattgcatgcacccaagctccatgtacaaccattttcatgtaacttgcagacgaagtttagccttctttggtcagagtaaattgttctacaatcaaaatgatttatgatgttgtattctttgattgctcgaatacattgtgttttgtcatcgaaggtcgtgccaacctcgagtacatcgattggtggttgtac

SEQ ID NO: 8178 - DNA, 1063 bp, Glycine max
  Gm_smallRNAprecursor_1011
tgtatcctgtaaatatttaatcaatgtattatgttataaaatttgattgaaagaaaattataatgaataaataaaatagattctcaccagccaacataagtggtttctttaaatgtttgcagtttgagttaccacgaagaaatttttgtgcaatgtggcgcaggcaaaagaaatgggatgtgtcctggacccataagttacttgagttgttgtaggcacttataattgaggggtgtcggtctgaaataagagaaatgttaatttgaggagtaacatgtcttcttaaattctttagaaaaaatccctaagttgaagttgtctccccttctacaatggcataagcaatcgggaagatatggttagctctatcttgtgcggtagctatcaacagtgtgctagtatactttccgtaaagtcatgtatcatctacttgtactatgggtttgcaatatgcaaaaccattaatgcatggaccaaatgaccaaaagacacgcttaaacaatcttttgcccggtactatttctcccccttcatacaaggattctgtttgagcaacgaccacagtcccgggaacacaagattgcaaagctccgaaaagttttgacagtttggcatctgattcttcccagtttccatgaatcatctccaatgctttttactttgctaaccatgtcttcttgtaggatggggtataattcatgaatgttttgatctctgcaatcaacgtcttgatggagacagttgggtttgttttgacaattggttggatgatttgggctatgacatgtttgtcgagttggcgatgatcttgtctgagcatcggcacgagacaagtgtgatgacctctgatactcttgataatccatttgttatgcctctttgaattgcatgcacccaagctccatgtacaaccattttcatgtaacttgcagacgaagtttagccttctttggtcagagtaaattgttctacaatcaaaatgatttatgatgttgtattctttgattgctcgaatacattgtgttttgtcatcgaaggtcgtgccaacctcgagtacatcgat

SEQ ID NO: 8179 - DNA, 1065 bp, Glycine max
  Gm_smallRNAprecursor_1012
tgtatcctgtaaatatttaatcaatgtattatgttataaaatttgattgaaagaaaattataatgaataaataaaatagattctcaccagccaacataagtggtttctttaaatgtttgcagtttgagttaccacgaagaaatttttgtgcaatgtggcgcaggcaaaagaaatgggatgtgtcctggacccataagttacttgagttgttgtaggcacttataattgaggggtgtcggtctgaaataagagaaatgttaatttgaggagtaacatgtcttcttaaattctttagaaaaaatccctaagttgaagttgtctccccttctacaatggcataagcaatcgggaagatatggttagctctatcttgtgcggtagctatcaacagtgtgctagtatactttccgtaaagtcatgtatcatctacttgtactatgggtttgcaatatgcaaaaccattaatgcatggaccaaatgaccaaaagacacgcttaaacaatcttttgcccggtactatttctcccccttcatacaaggattctgtttgagcaacgaccacagtcccgggaacacaagattgcaaagctccgaaaagttttgacagtttggcatctgattcttcccagtttccatgaatcatctccaatgctttttactttgctaaccatgtcttcttgtaggatggggtataattcatgaatgttttgatctctgcaatcaacgtcttgatggagacagttgggtttgttttgacaattggttggatgatttgggctatgacatgtttgtcgagttggcgatgatcttgtctgagcatcggcacgagacaagtgtgatgacctctgatactcttgataatccatttgttatgcctctttgaattgcatgcacccaagctccatgtacaaccattttcatgtaacttgcagacgaagtttagccttctttggtcagagtaaattgttctacaatcaaaatgatttatgatgttgtattctttgattgctcgaatacattgtgttttgtcatcgaaggtcgtgccaacctcgagtacatcgattg

SEQ ID NO: 8180 - DNA, 1032 bp, Glycine max
  Gm_smallRNAprecursor_1013
tctcttaaagttaatatcttatatattatttatttttagtttctaaatgttacaaaatatgtacttataattatatactagttttcttttatatgtatatataatgcttataattaattactagtgaggagatttgctaaatttaaagactaaacacaaatgaaaaatttatatgaattacaactaaaaaaaaactataggcttaaacatatttttagttcttacaatttattatttttttatttttgttcttataatttttcatcaaaatattctaatttttcatcaatgccacataaaaccactgtttctgataaaaccaaaaccactgcttgatagggtggttgttgtagtcactgcaactgagatgttgatgttgctgctactacatcacatgatattgtctgcaatttcagacctcctttgttaatgtagttcattgctcattcttgttaatattcttaccaaggattagacactaccacaaatgatgcattttacgacacacattctaagacggttatttgggaccgtcttagaatgtgacgcggtggcaaacttgtaattaagttacttaaaaattattttttacaacgtttattctaagacagttgttattaaccgtcttagaatgtgctttagtggaaaatttgtaattatcaacataataacaacgacggtttttaaaaaaaccgccttcgttttaatgtgttttatacagctggcaccaacagctttctcatgagtccccgtctaggtcgtcacgacacaaatttaccctaatcacaaatctgcttgtgtcctttgaaatctcttccatttctccctctactctcttgcgctttccctctgactcttcgagtcagccaccaactcagcgccgctcaagcaccactcatggcacggggccgtaacggaaggcgaagcactccactgtgtcgaggtctatcttaaggtgcgtcgtcatgctgaacgtgggtttttcgtcaaagtcgtgacggccgagcctgtcgatgtcgccgttaggggtta

SEQ ID NO: 8181 - DNA, 1047 bp, Glycine max
  Gm_smallRNAprecursor_1014
tcttttctaatttcttctatggatggttttccaactttctctctagtgttttgtttctagctaatcatatatcttttattgtatgttaattcatccagagacatttacattacgttgcatttattctcttattaactttctattgcaagtttatataatttaaagtaaattgtgttcattttagatattaaaataatactatatatattttaacatatataacatttataagttatattaaagaataaaaatactcctatatacaaaaatacattcactcatctgaatgttaactaattactacttcgatgaggaagtccgattcgaagatatcaatcaaaatatggatgactggaacattccagaaatccctcaggatcaactatacgttcctgagacaataaaagacaaacacaactttgattacataatcaaaacaatagaaaacaatattcctctaggacaagaagtaggggaagaatttcatttactttcaaaaaattcaatttatgaacatagccgtaagtataaatatctacacatcggttgtgtacaagtagccatcaagcccttaattgatatgggcatagatgcagcagttttaatgtgtctaagagacattaggcataaccaatttgaagactccctaattggaacagtcgaaaccagcctaggacaaggtccaatatattttaattgttatccaaacaaaacagtgagtctgatggacaaaaacattcttgactctctgttcttaaacatccactttcatggccttgacatgaaagaaggatcaatcccaacagccttaatatataggatccagtacaaggtcatgaatacttgtgcatctagagtcctgttaaacctcaaagagagaaacactttgttatcactgatatgacgaaggctaatgtttctcttccaagaaaaataaaatgggatgaagtaactcttcccgaaagatgggttatggataaggcaacaccgtctattccccgacccgctccaaccatagagcaaattaagcaagataactccagaaag

SEQ ID NO: 8182 - DNA, 1231 bp, Glycine max
  Gm_smallRNAprecursor_1015
taaatacccattccacaatccaaatcctgaaggttatgcagccacgacattatggctcaaacttaaaccaacccaaaaaattctctgcaccatttgatcctgcagggtataattattgggattacgttgacgcctggaccaatgtgttctggcatcaaaatagtaaattcaagcattcatggctgatttacttcaaaaataatactgcatataattttccaaattggttcctccaatggtggaactacttcggaccaattccacaaatatttccagaagaagtccaacagggattcgaacaattcaacaagctctataatagcaaggaatcacgaattccggcagatttaaagtatttttccagttttgccttatcatggatcttttcatggcaatacagatacggaaaaactgaaaacaacaagcaatatccaccgttacagagacatgcctttgtaaaatggtggtcacaattcgatacttcaaaggctgctccagaccaagtcaagaactggttccagagcaatcctgagttccttaaacctgctgatccggagacatctttgtttctaaattagaagtcacaactggcagcattcttagcaagctcaaaatctaaagaaagtcttgctcagaatctcaaagaagttctccaactacttcaacaggaagtggaagaagaaccttccaagaaggaagctgaatcatcagagactaatgatgaccaagaagatgatccattctaccagaatgaagatgactgttttggtatatcattggacgacgattaattagttgtaataatcatgaattattgtaactaatttgtcagtttcttttaaataatgtaatttgtaaaaagttttgtaacagttccggtaaacattaccgatactgtagaaacagtaaaatttgggtctatttaaaggagtcctcgtcccctttgtgagacaccctttcagatagtctcagaatcaggttttagagagagaagttctgcctagggaaaaactctttgtaagcttttctttcggtttcaataaatttcaagttctatttttcatatctcccttctcccctcaccgatcctgtgcggctctgccgccacttcggtttctttgttttcaaaaacctgggtttgtaagccgtttcggtgtgcccttgatatctgctttccaagtttataattcttacgtttgattttatcatactgcattcttacttcctatct

SEQ ID NO: 8183 - DNA, 1124 bp, Glycine max
  Gm_smallRNAprecursor_1016
attccacaatccaaatcctgaaggttatgcagccacgacattatggctcaaacttaaaccaacccaaaaaattctctgcaccatttgatcctgcagggtataattattgggattacgttgacgcctggaccaatgtgttctggcatcaaaatagtaaattcaagcattcatggctgatttacttcaaaaataatactgcatataattttccaaattggttcctccaatggtggaactacttcggaccaattccacaaatatttccagaagaagtccaacagggattcgaacaattcaacaagctctataatagcaaggaatcacgaattccggcagatttaaagtatttttccagttttgccttatcatggatcttttcatggcaatacagatacggaaaaactgaaaacaacaagcaatatccaccgttacagagacatgcctttgtaaaatggtggtcacaattcgatacttcaaaggctgctccagaccaagtcaagaactggttccagagcaatcctgagttccttaaacctgctgatccggagacatctttgtttctaaattagaagtcacaactggcagcattcttagcaagctcaaaatctaaagaaagtcttgctcagaatctcaaagaagttctccaactacttcaacaggaagtggaagaagaaccttccaagaaggaagctgaatcatcagagactaatgatgaccaagaagatgatccattctaccagaatgaagatgactgttttggtatatcattggacgacgattaattagttgtaataatcatgaattattgtaactaatttgtcagtttcttttaaataatgtaatttgtaaaaagttttgtaacagttccggtaaacattaccgatactgtagaaacagtaaaatttgggtctatttaaaggagtcctcgtcccctttgtgagacaccctttcagatagtctcagaatcaggttttagagagagaagttctgcctagggaaaaactctttgtaagcttttctttcggtttcaataaatttcaagttctatttttcatatctcccttctcccctcaccgatcctgtgcggctctgccgccacttcggtttctttgttttcaaaaacc

SEQ ID NO: 8184 - DNA, 1123 bp, Glycine max
  Gm_smallRNAprecursor_1017
ttccacaatccaaatcctgaaggttatgcagccacgacattatggctcaaacttaaaccaacccaaaaaattctctgcaccatttgatcctgcagggtataattattgggattacgttgacgcctggaccaatgtgttctggcatcaaaatagtaaattcaagcattcatggctgatttacttcaaaaataatactgcatataattttccaaattggttcctccaatggtggaactacttcggaccaattccacaaatatttccagaagaagtccaacagggattcgaacaattcaacaagctctataatagcaaggaatcacgaattccggcagatttaaagtatttttccagttttgccttatcatggatcttttcatggcaatacagatacggaaaaactgaaaacaacaagcaatatccaccgttacagagacatgcctttgtaaaatggtggtcacaattcgatacttcaaaggctgctccagaccaagtcaagaactggttccagagcaatcctgagttccttaaacctgctgatccggagacatctttgtttctaaattagaagtcacaactggcagcattcttagcaagctcaaaatctaaagaaagtcttgctcagaatctcaaagaagttctccaactacttcaacaggaagtggaagaagaaccttccaagaaggaagctgaatcatcagagactaatgatgaccaagaagatgatccattctaccagaatgaagatgactgttttggtatatcattggacgacgattaattagttgtaataatcatgaattattgtaactaatttgtcagtttcttttaaataatgtaatttgtaaaaagttttgtaacagttccggtaaacattaccgatactgtagaaacagtaaaatttgggtctatttaaaggagtcctcgtcccctttgtgagacaccctttcagatagtctcagaatcaggttttagagagagaagttctgcctagggaaaaactctttgtaagcttttctttcggtttcaataaatttcaagttctatttttcatatctcccttctcccctcaccgatcctgtgcggctctgccgccacttcggtttctttgttttcaaaaacc

SEQ ID NO: 8185 - DNA, 1216 bp, Glycine max
  Gm_smallRNAprecursor_1018
attcatcaaggttttatagtggctgttgcctgttggcttctgactgccttatgtgatcgtcttcttttatttggccttaggattggctttgtaaagtttggctaaaaagtgaaaaatatggcatagttagagttacgtcttaaattagtgatgcactacatatatatttcattttatgattctaaatgccaagtatttcagtgtataagggtacattatgtcttagaaccatatgacagatttctttttctatgataactgcaaacttaatttgttctattggatatatattgactcaacaacaacaacaacaatagtcaagccttttcccactagttggggtcagctaaatggatcaaatgatgccataacgttttcttgtaattgtctatagacaaattattgatctctaagtccttatttgtttcacctatagttttcttgttctctctgcctctagttaatagatgttaaagtgcagcaaaggcatccgaaaggtccccttaaaaatcggttcataagggggtgacctacccagctatataagcacttatcatgttcgttaatcacccgatgtgggactttcaacacgccccctcgagccagggctcgtcaccacaaagcgagggctaacagcactatccaccacaccaccgggcagaacctagctctgataccatgttaaagtgcagcaaaggcatccgaaaggtccccttaaaaaccggttcataagggggtggcctacccagctatataagcacttatcatgttcgttaaccacccgatgcgggactttcaacaatagaaaactaatagatcatattagaactctatttagatcatagaaaaaggagaaaagaaagaagataaatggaatgagaaaatattattgaggttaatgaatcctgagttacaacactctatttatagagttatgaagttagttgcaaatacggttaggttgttaggaaacagttagttagttgtgacaattgtcaataattaactttacaaactgacacagtgttctaactactaaattgagtgcagttgaatactgcacctctctaaacaatactctaatactccccctcaaactcaaggtgggtgagactttaagggagtctcaagcacattgagtttggccctcagaaaagtaaatctgcttggagaaagtggctttgtaagagcatttgcccactgatcaagggcagga

SEQ ID NO: 8186 - DNA, 1182 bp, Glycine max
  Gm_smallRNAprecursor_1019
agacaaatgcgggctatatattgaagaaaatccttccctcctggttgccctaggaagactttatgaaggatccacaacagttcacaacatccctttgttgcatggccaagtcaaggttggtgttgaggaggttaaagatgcagaggctctcgttcctgtacccactgacgaggttaccttagtggggcagacacttaacaccttccttgcttggccaacacatcttgtgaagtgtttatcagaacaggtattttactttgattatatgtttatttttttcaattaatttgttcactgtaatcaaaacttgctaattaactatgttttattaacaggtagctgtgtctccagcaaaacctctagaaagcccggatgaagagatcgatgatcccctgtacctgatgacattgaccatcccacaactgtttttgaagccgctccaggttatgtgggatgctaccatattcggggtgtttattcaaaacttcccgttgtatataaagcacgaagatctctctgaaattgcacacggtggtcaatgtctcagcatatctgttatacagttgttgattctgtaagtcattttagattactattaattaccaaagtaattgttttaaattcatacataattaactttgacttaacaacacacccatctgactgagacaagtgtgcgagcagggaattctgatgtgtatggattcctcgagtcacagtccattcagagatctaggtaatcacaatttgaatctgaaagttacatcaagagttggatacagagttcaaaacgagatgtttaccttggagcatacctgaatgggtaagtcaaacacaataattgaatttaaataatctatactactacaataacccatattcgtctctactgcagcggacactggcaaatggtcgtcattctgcctaaggaaaacctagttgtctggttttgttctttacataacaggtcagacaactaccttaacagaataattaacaggtcagtattgttttcaatacatttttattggcataactcaacaacatcaatattttaatgttcctcatattcagcactagtgctttgaaaggacttgatgatactccacaaccgaaatccaaggcttttgctaggtggattgttgttaaggtacgtgatttaaataaaagttctacttatat

SEQ ID NO: 8187 - DNA, 1131 bp, Glycine max
  Gm_smallRNAprecursor_1020
aaatggcggatgttatggcggacacaaaaaaaaaaaaaacatatatataaactcattgaaattgaaaaaaacaaaggattgcattcaaataaactaaaaaagtttcatgagttcatacaataatcaagtaccaacaccaaataaactcattaaagagttcaaaataagaaaatgataaaaacataatgcaaagtgcaaagtgaaggttaaggctctaatcatcttctccaatcccaacataatcatcttcgttgttatcatatggtaatggagcatctccctctccctcttccccatcagacgcctcaaaattgaccatgatttcttcttcttcagattcaacatcaatattctcctcaacatctagatcctcatcattttcttggactgctttttgcttccttgatgaagatccaacaaccattgcctgttttttagaagtttgggcagcagcaacacttgttttttgctttttccgcctagtatacatcctacactctccaacccccgaagcctgatacacagttgcccaatttagagcatcatcatcttcaaataccaaatcatttccaacatcattatcatcatcttgatccatctctcccacgagccattcattgcatacatcaatatcattaagagaaattggatcaatttcatctcttgcattatatctttgcttcaattgttggttgtatttgacaaacaccaaatcatgcaacctcttgtgctcaagcctatttctttttttggaatgaatctacaacataacaaataaatgttgatttcaatctcaaatatactccaaatataacttgatcatcaaaattaaataaaattaaaaagtatagttagagttttgtcacaattacttgctcaaacacactccaatttctttcacatcctgaagcactgcaagtcaaactcaaaatcttaatagccagcttctgcaaatttggagtttgtgacccaaacattcgccaccaatatgctgcaataccaattaccaaccaagagcataacttagaattctgaattctaacactaatacataaaaaaaatagtatgataaaagtttcttactaggagaatgggttttcctttgagccattgcaaagtcggaaccaaagt

SEQ ID NO: 8188 - DNA, 1085 bp, Glycine max
  Gm_smallRNAprecursor_1021
caacaaacattgccatgaaggtacaagttgatgattcatggctatggcatcgaagatttggccacttcaacacacatgccttcaagttgttacatgagaaaaacatgatgagagatcttccaagcataaaggagaacaatgaagtgtgtgaaggatgtctccttggtaagcaacaccgatttcctttctcaacaagcggagcatggagagcgaaagatttattggagctgatacatatgaatgcctgtggaccaatgaggatgccatcacatgagaacaacaagtacttcatactcttcattgatgacttctgtggaacaacatggatatattttctaaaagaaaaatcagaagtctttggagtattcaaaaagttcaaggcccttgctgaaaatcaaagtggaaaatggataaaagtactaaggagtgattgtggcaaagagtatacacctctcacgagtttgaaagattttgtgacgatgaaggcattgaacgacaacttacagtcgcatattctcctcaacaaaatggagtgtccgagagaaagaatcacacagttatggaaatggctagatcgatactcaaggagaagggactacctaacatattctgggctgaagcagtctacactgctatttatatactcaatagatgtccaactaagtctgtaaaagacaagactccaattgaagcttggaacgggaagaagccatcagcaacgcacctaagggtctttggatctatatgctacattcatattccagacgtgaagaggcacaagcttgaagacaagactatacgaggtatcttccttgggtatagcaatatctctaagggctaccgtgtccacaacttgcaaactaagaaactcatcatcagtcgagatgttgaagttgatgagtacgcttcttggaattaggatgaagaaaaagtggagaagaacgttcttatacccgctcaactacctcaagaagaagctgaagaagaagacccaagtgaaccaccttcacctccaccacaacaacaagatcaagaactatcatcaccagagtctactccaagacgagtaagatctttggtggaca

SEQ ID NO: 8189 - DNA, 1188 bp, Glycine max
  Gm_smallRNAprecursor_1022
aggcagaatgacaaccatttgccagtgtctactgcactagagacgaatatggttattgtagtagtatagattatttaaattcagttattgtgtttgacttacccattcaggtaggctccaaggtagacatctcgttttgaactctgcatccaactcttaatgtaactttttgattcaaattacgattgcccagatctatgaatggattgtggctcgaggaatccatacacatcggaattccccgctcgtagacttgtctcagtcagatgcctgtgttgttaagacaaagttaattatgtatgaatttaaaacaattactttggtaattaacagtaatctaaattgactttcagaatccacaactgtataacagatatgttgagacattgaccaccgtgtgtaatttcagagagatctccgtgctttatgtacaacgggaagttttgattaaacaccttgaacatggtagcatcccacataacctggagaggtttcaaaaacagttgtgggatggtcaatgtcatcaggtacaggggatcatcgacctcatgatccgggctttctagaggttttgctggagacacaactgccttttgatcaaacatagttaattaacaagttttgattacagtgaacaaataaattgaaaaaaaagaaacatataatcagagtaaaatacatgttctgataaacgcttcacaagatgtgttggccaagcaaggaaggtgttaagtgtctgccccactatggtaacctcgttagtggatacaggaactagagtctttgcatctttaacctcctcaacaccaaccttgacttggccatgcaacaaagggatgttgtgaactgctgtggatccctcataaagtcttcttaagacaaccaggcgggaaggattttcttcaatgtatagcccgcatttgtctgagtcacccgtctctggatcgttccccgagggagcaacacaactctcctttgtgctgacatgaggacctgagggaccaacctctggctctaaaggcagtgcaagtcccagtgattgcatctgagactgaaactaggacttcatctgactgaatgatgccatcagctgtcgagtcactttttctgtgatcaactcctccagttggtccctgatttgttgggtcagctgctgtaggtcttcaggaggcatggaggaagaactgc

SEQ ID NO: 8190 - DNA, 1031 bp, Glycine max
  Gm_smallRNAprecursor_1023
caatttttgttttctgggttgatgacctagtctgggtaggtgacctagaggatgatgaagttttcttcttgattattggctctggtagagctaaaagaacttcttttcctttactacttgatcttcctcctctcccggaggagcttgacaccttaggagacattggtatttttctgtaaaaattcacgtgtgaggtagtcaggtagaaaatttgaggtgcccttgatgtattctatttgaaaatcaaagacgctcaagattgcttgccatttggaaaaaaattgttttgatgcaagatttttaacatctttttgaagaatgtctttggtcaacttgcaatcaacccttattaaaaaaatttgatttagtaaatcaaattgaaatttggaaatgcacaaaacgattgctaaaacctcttttttaacagttgaatatttttcttgtgcagaattccaatgctttgatgtatatgcaatgatatgttcttgggcatggactttttgtttgaggatgccaccataacctatgtctgatgcatcagtttcgacaattttaaatgcctgcagaatgggaagatatagacattttatagattggactttgagtttgatctctttaactgtttaggtatggagatcagaccaaggaggcggatttttcttcagcctatcatgtaatggtttgacaatattgtttaagtaggggacaaattctccttcataattgagacaacttagaaatctttgtaattgggttttgtctaagatttggttggggaatttattagcaaattctattgattagtctattggaatgattgtaccttgatatatgttatgaccaaggaatcgaattcgggtttggaaaagattgattttttatttagagactgctagtccattttgtcttatgatattgataaaagtttgtatatgtttaaaatgttgatcaatatttagtgaaaaaatcaggacatcatctatgtagacaatgataaattttgaataaggattgaaaatgtcgttcataat

SEQ ID NO: 8191 - DNA, 1158 bp, Glycine max
  Gm_smallRNAprecursor_1024
ctacaaataatgtataaattgatttgtaaatttattgcaatatcaatggcattttcatcgtcatgtccatcacatattaaaattaagtctggcccgatcgatagtgatgtgttatggatgcaacctaagcatgtctcagaacatgtttggaatggggaagaatatcggaaattacatatcaaacgagctgtccccacgtattaaggggaagaacaaattccagagcaaatttttccttttcttcgacaatctggtttttactggattatgaagatgtgatacttaaaaataaatgtctcattaattagtgctttgatagaaagatggaggccgaaaacacatacgtttcacaggagatgcaaagagtgtactattactctccaagacgtctctgtattgttaggtatacgtgtggatggtttaccattaatcggtccaacaaatcttaattgggctgatttatgtgaggaattattgggagtcagaccacaagaaggtgaaattaaaggtagtgtggttaaattaagttggctggctcaccattttgcacaaataaataacgacgacgacgaagaacaagtacgaaggtttgctcgtgcatggatactgaggttcattggaggtgccttgttcgttgacaaaagcagtaacaaagtttcgctaaggtaccttcaatttttacgtgactttcaagattgttgcacatatgcatggggagctgccgtacttgcttttctatacagagaaatgtgcagtgccaccgattataaaactaatcaatcggaggtatgtgcatcttactacaaatgtgggcatgggaatgatgtccaaccttggctccaaaaaggactccttcccaagtagaaaataaaccattggggcacaggttagtcatttttaaaagcgtctttcatttcaatagaataaatggttttagggtatattaaattttaatctttgcaggtggctgcgacgtggaaaccaacatatcggcaatgatgatgtgagagtttttcgtcgcaagttggatattatgaaacatcatgaggtaagaacatggtattgtatttgtaaaataaaaaatgatatgtgctattttactaaaatgttgacaactatgttgttatatccagtttgtgtgggaaccttacacaacaa

SEQ ID NO: 8192 - DNA, 1035 bp, Glycine max
  Gm_smallRNAprecursor_1025
acaaataatgtataaattgatttgtaaatttattgcaatatcaatggcattttcatcgtcatgtccatcacatattaaaattaagtctggcccgatcgatagtgatgtgttatggatgcaacctaagcatgtctcagaacatgtttggaatggggaagaatatcggaaattacatatcaaacgagctgtccccacgtattaaggggaagaacaaattccagagcaaatttttccttttcttcgacaatctggtttttactggattatgaagatgtgatacttaaaaataaatgtctcattaattagtgctttgatagaaagatggaggccgaaaacacatacgtttcacaggagatgcaaagagtgtactattactctccaagacgtctctgtattgttaggtatacgtgtggatggtttaccattaatcggtccaacaaatcttaattgggctgatttatgtgaggaattattgggagtcagaccacaagaaggtgaaattaaaggtagtgtggttaaattaagttggctggctcaccattttgcacaaataaataacgacgacgacgaagaacaagtacgaaggtttgctcgtgcatggatactgaggttcattggaggtgccttgttcgttgacaaaagcagtaacaaagtttcgctaaggtaccttcaatttttacgtgactttcaagattgttgcacatatgcatggggagctgccgtacttgcttttctatacagagaaatgtgcagtgccaccgattataaaactaatcaatcggaggtatgtgcatcttactacaaatgtgggcatgggaatgatgtccaaccttggctccaaaaaggactccttcccaagtagaaaataaaccattggggcacaggttagtcatttttaaaagcgtctttcatttcaatagaataaatggttttagggtatattaaattttaatctttgcaggtggctgcgacgtggaaaccaacatatcggcaatgatgatgtgagagtttttcgtcgcaagttggatattatga

SEQ ID NO: 8193 - DNA, 1155 bp, Glycine max
  Gm_smallRNAprecursor_1026
acaaataatgtataaattgatttgtaaatttattgcaatatcaatggcattttcatcgtcatgtccatcacatattaaaattaagtctggcccgatcgatagtgatgtgttatggatgcaacctaagcatgtctcagaacatgtttggaatggggaagaatatcggaaattacatatcaaacgagctgtccccacgtattaaggggaagaacaaattccagagcaaatttttccttttcttcgacaatctggtttttactggattatgaagatgtgatacttaaaaataaatgtctcattaattagtgctttgatagaaagatggaggccgaaaacacatacgtttcacaggagatgcaaagagtgtactattactctccaagacgtctctgtattgttaggtatacgtgtggatggtttaccattaatcggtccaacaaatcttaattgggctgatttatgtgaggaattattgggagtcagaccacaagaaggtgaaattaaaggtagtgtggttaaattaagttggctggctcaccattttgcacaaataaataacgacgacgacgaagaacaagtacgaaggtttgctcgtgcatggatactgaggttcattggaggtgccttgttcgttgacaaaagcagtaacaaagtttcgctaaggtaccttcaatttttacgtgactttcaagattgttgcacatatgcatggggagctgccgtacttgcttttctatacagagaaatgtgcagtgccaccgattataaaactaatcaatcggaggtatgtgcatcttactacaaatgtgggcatgggaatgatgtccaaccttggctccaaaaaggactccttcccaagtagaaaataaaccattggggcacaggttagtcatttttaaaagcgtctttcatttcaatagaataaatggttttagggtatattaaattttaatctttgcaggtggctgcgacgtggaaaccaacatatcggcaatgatgatgtgagagtttttcgtcgcaagttggatattatgaaacatcatgaggtaagaacatggtattgtatttgtaaaataaaaaatgatatgtgctattttactaaaatgttgacaactatgttgttatatccagtttgtgtgggaaccttacacaaca

SEQ ID NO: 8194 - DNA, 1036 bp, Glycine max
  Gm_smallRNAprecursor_1027
cagaccacaagaaggtgaaattaaaggtagtgtggttaaattaagttggctggctcaccattttgcacaaataaataacgacgacgacgaagaacaagtacgaaggtttgctcgtgcatggatactgaggttcattggaggtgccttgttcgttgacaaaagcagtaacaaagtttcgctaaggtaccttcaatttttacgtgactttcaagattgttgcacatatgcatggggagctgccgtacttgcttttctatacagagaaatgtgcagtgccaccgattataaaactaatcaatcggaggtatgtgcatcttactacaaatgtgggcatgggaatgatgtccaaccttggctccaaaaaggactccttcccaagtagaaaataaaccattggggcacaggttagtcatttttaaaagcgtctttcatttcaatagaataaatggttttagggtatattaaattttaatctttgcaggtggctgcgacgtggaaaccaacatatcggcaatgatgatgtgagagtttttcgtcgcaagttggatattatgaaacatcatgaggtaagaacatggtattgtatttgtaaaataaaaaatgatatgtgctattttactaaaatgttgacaactatgttgttatatccagtttgtgtgggaaccttacacaacaaccgttatatcattgttgcctcccatttgtgtactcggaagtatcgcgtggtacgcggtagtgccactaatttgtttccaagttattgagtggcaccaaccggacaaagtattaagacaatttgggatacaacaaccaattccagagtctccttcgcaacccttaaacattcatggcataacattaaaagggaaacatgacgaaaattggggacaattgttcgccccaatgattgatcagcggaacaatcgtcatgcttttagggtcgacgcttatccccgacaagaaggcctattgagctttaactcggactacatggtctggtataggcgaaagacaaagatgtttgttgacccacaaa

SEQ ID NO: 8195 - DNA, 1053 bp, Glycine max
  Gm_smallRNAprecursor_1028
aaaactcagaaacatggaggcgatggagcagatgagatcatgagaaaactcagaaaagaaagaagggcttacctgcaaaggaggaaacggaggcggcgacatggaggtttgcttgcggtaaggagaagacgtgattttcattttaggtatgtcttttttaaataaataataaaatatttggttgggccgcgtttggacacgtgtgtccacttgttgggccacgtccgatcacgcgtttcctgcatccaaccgtgtccggcgacggcggcggcaacggacaccgcgtcgcacctgtttgtgtgttcggtgcgtcttcgacgcgggacgcggcacttcggcgacgtgtccatgcttcatagttgataattgctgagaagtttgattgtttgtgttttcttgcaaatgtgagggaaaagtcaaacaaacacgggttagaacacctccaaacaatccttctttcagaaatactaggagagatgaacatcaacttaacaagtaagcaacaaggaatttcaatcatacagtctaggctcatgggaaagaaggttctcttgattctagatgatgttgacatacacaagcaattacaagcaattgctggaagacctgattggtttggtccggacagcaaaatcatcatcacaactgggaacaaacagttgctagcatctcatgaagttaataaaacatatgaggtgaaggaattgaatgtgaatgatgctcttcagttgcttacatggcaagcttttaaaaaggaaaaagcttgtccaacttatgtgaaggtcttgaaacgtgcagtaacttatgcttctggtcttccattggcgttggaagtaataggttcccacttggatgaaaaaagtatacaagaatgggaatctaccatcaaacaatataaaagaatccccaagaaggaaattctagatatacttaaagttttgatgctttggaagaagaagagaagaatatttttcttgacatagcttgttacttcaaaggatggaaagtgacagaggttgaacatatactttgtggacattatgatgactgcat

SEQ ID NO: 8196 - DNA, 1053 bp, Glycine max; identical to SEQ ID NO: 8195
  Gm_smallRNAprecursor_1029

SEQ ID NO: 8197 - DNA, 1040 bp, Glycine max
  Gm_smallRNAprecursor_1030
agttgagaatgttggaatcaacaaagtgctcatagatggaggagcggctgtcaacttaatgcctcgatctatgctctacaagatcgggaaacatgacactgatctatctgcccacaacattgtgctctctaattatgagggcaaaactggctattctttgggagccattcaagtagatgttgctgtaggcagtatagttcgaccaactctattcctggtgatacagtctaaggctaattttaacttgctattaggaagggaatggatccatggagttggggctgtgccatctactctccaccagaaactcattatttggagggaggatgggattgttgaaaatatagaggcagatcaaagtttctataagtcagaggttgataatgttactccacaaacctttgacaaaaatttggctaacatagcaccttgtggtgacaaggagactgctttcgagccaagtgacaaggttatccactctgtcaaactccatcctacccatgggtttatatgggagagggaggaaattgatgctgtttcctctgaagatggagtcattccaccaactgggtggaatatatatgaagattaatatgcttgaggccactgcatgggccagaattacggcttatatggccgaaaatagactaaatacggcccttgaggctgaatcccaacaaaatatggcagttgaagccaagatcgaagatcatgaaaacaaagaaacaaaggatcgaagactggactgcatttatgatgatgagccactgggttttgaaaaaaatcccataagtgaggcgccaaagatgcaggctcaagatcctttggaggagattgacattggagatggctcgataaaaaggccaacctatatcagtgccaatatcacctcaagtctaaaagaaaagctggtgcctcttcttagagaatttaaagactgttttgcttgggattactacgaaatgcctgggttaagcagagaaatggtcgaaatgaaattacctattaaggagggaaaaagaccagtaaaacaactacca

SEQ ID NO: 8198 - DNA, 1110 bp, Glycine max
  Gm_smallRNAprecursor_1031
tattgtagatcactcagtgatcgaaatgccgcaagactatgtcgatacagagccttggattttgtatttcgatggttcgaaacacaaacatggaactggaattggagttttaataatatcccccaataaagttccaactaaattcaaatataaaatcaaagggctttgttctaataatgaggctgagtatgaggctctaattacaggccttgaaattttaattagcctgggggcaagaaatgttaacataaggggtgattcagaattagtgttgaggcaattaacacaagaatacaaatgtgttaatgaacacttagcaaaatattttgttatagcaagttctcttctgaatcatttcgattacattaacattgagcatatacctcgacaagaaaaccaagaagcaaatgatttagcccaaatagcttcagggtacaaaatgtcgaaggaaaagttaactcagttgatcgaaataaaagataaactggtgttaccagagccattaagcactaaattgccaatgccaaaacttgtgggggcaagtacaccacaaaataatgaagatgaaagcatggatgatctccaggaaaaaattcaaattttggccattgacaatatgttagataatgattggagaaagtccattgttgaatatttggaaaatccaataggcaatgtggctcgaaaggtcaaatatagggctttaaattacgtggttatgggaaatgatttgtttaaaaagactgcagaaggagtgttgctaaaatgtctaagtgaatcagaagcatacttggcagtttccaatgttcacagtggggcctgtggatcacatcaagcaggccataaaatgaaatggcttttatttcgacaaggtttgtattggccttcgatgttaaaagactgcatagaatttgctaaaggttgtcaggaatgccaaaagcatgcagggatacagcatgtacctgctagtgagttacactccataatcaaaccttggcctttcagaggatgggctttggacctaattggtgaaatcaagcctgcttcttctaagaaccagcgttatatcatagttggtgtcgattactttacaaaatggatcgaagcagt

SEQ ID NO: 8199 - DNA, 1082 bp, Glycine max
  Gm_smallRNAprecursor_1032
cagtgatcgaaatgccgcaagactatgtcgatacagagccttggattttgtatttcgatggttcgaaacacaaacatggaactggaattggagttttaataatatcccccaataaagttccaactaaattcaaatataaaatcaaagggctttgttctaataatgaggctgagtatgaggctctaattacaggccttgaaattttaattagcctgggggcaagaaatgttaacataaggggtgattcagaattagtgttgaggcaattaacacaagaatacaaatgtgttaatgaacacttagcaaaatattttgttatagcaagttctcttctgaatcatttcgattacattaacattgagcatatacctcgacaagaaaaccaagaagcaaatgatttagcccaaatagcttcagggtacaaaatgtcgaaggaaaagttaactcagttgatcgaaataaaagataaactggtgttaccagagccattaagcactaaattgccaatgccaaaacttgtgggggcaagtacaccacaaaataatgaagatgaaagcatggatgatctccaggaaaaaattcaaattttggccattgacaatatgttagataatgattggagaaagtccattgttgaatatttggaaaatccaataggcaatgtggctcgaaaggtcaaatatagggctttaaattacgtggttatgggaaatgatttgtttaaaaagactgcagaaggagtgttgctaaaatgtctaagtgaatcagaagcatacttggcagtttccaatgttcacagtggggcctgtggatcacatcaagcaggccataaaatgaaatggcttttatttcgacaaggtttgtattggccttcgatgttaaaagactgcatagaatttgctaaaggttgtcaggaatgccaaaagcatgcagggatacagcatgtacctgctagtgagttacactccataatcaaaccttggcctttcagaggatgggctttggacctaattggtgaaatcaagcctgcttcttctaagaaccagcgttatatcatagttggtgtcgattactttacaaaa

SEQ ID NO: 8200 - DNA, 1132 bp, Glycine max
  Gm_smallRNAprecursor_1033
tacatctttacaagattggtgctgaccactttgattccgactttacaatggctcaaatgaaaacccattctcctagtaagaaacttttatcatactattttttttatgtattagtgttataattcaaaattctaagttatgctcttggttggtaattggtattgcagcatattggtggcgaatgtttgggtcacaaactccaaatttgcaaaagctagctattaaaattttgagtttgacttgcagtgcttcaggatgtgaaagaaattggagtgtgttagagcaagtaattgtgacaaaactctaactatactttttaattttatttaattttgatgatcaaattttatttggagtatatttgagattcatttatttgttatgttgtagattcattccaaaaaaagaaatagggttgagcacaagaggttgcatgatttggtgtttgtcaaatacaaccaacaattgaagcaaagatataatgcaagagatgaaattgatccaatttctcttaatgatattgatgtatgcaatgaatggctcgtgggagagatggatcaagatgatgataatgatgctggaaatgatttggtatttgaagatgatgatgctctaaattaggcaactgtgtatcaggcttcgggggttggagagtgtaggatgtatactaggcggaaaaagcaaaaaacaagtgttgctgctgcccaaacttctaaaaaacaggcaatggttgttggatcttcatcgaggaagcaaaaagcagtccaagaaaatgatgaagatctagatgttgaggagaatattgatgttgaatctgaagaagaagaaatcatggtcaattttgaggcgtctgatgggaaagagggagagggagatgctccattaccatatgataacaacgaagatgattatgttgggattggagaagatgattagagcctcaaccttcactttgcactttgcattatgtttttatcattttcttattttgaaatttgaactctttaatgagtttatttggtgttggtacttgattattgtatgaactcatgaaacttttttagtttatttgaatgcaatcctttgtttttttcaatttcaatgagtttatatatatgttttttttttttgt

SEQ ID NO: 8201 - DNA, 1092 bp, Glycine max
  Gm_smallRNAprecursor_1034
aaattttgagtttgacttgcagtgcttcaggatgtgaaagaaattggagtgtgttagagcaagtaattgtgacaaaactctaactatactttttaattttatttaattttgatgatcaaattttatttggagtatatttgagattcatttatttgttatgttgtagattcattccaaaaaaagaaatagggttgagcacaagaggttgcatgatttggtgtttgtcaaatacaaccaacaattgaagcaaagatataatgcaagagatgaaattgatccaatttctcttaatgatattgatgtatgcaatgaatggctcgtgggagagatggatcaagatgatgataatgatgctggaaatgatttggtatttgaagatgatgatgctctaaattaggcaactgtgtatcaggcttcgggggttggagagtgtaggatgtatactaggcggaaaaagcaaaaaacaagtgttgctgctgcccaaacttctaaaaaacaggcaatggttgttggatcttcatcgaggaagcaaaaagcagtccaagaaaatgatgaagatctagatgttgaggagaatattgatgttgaatctgaagaagaagaaatcatggtcaattttgaggcgtctgatgggaaagagggagagggagatgctccattaccatatgataacaacgaagatgattatgttgggattggagaagatgattagagcctcaaccttcactttgcactttgcattatgtttttatcattttcttattttgaaatttgaactctttaatgagtttatttggtgttggtacttgattattgtatgaactcatgaaacttttttagtttatttgaatgcaatcctttgtttttttcaatttcaatgagtttatatatatgttttttttttttgtccgccatgacatccgccatttttcgctacgccatccgccatatttttatgacggatttttgactttccgccatgaaccgccatccgccattaacaacattgctaagtaaggacaactacttgggctttttcttccaatgtcttatagggtttagggtttagggagtagcctaagtaagttcata

SEQ ID NO: 8202 - DNA, 1092 bp, Glycine max; identical to SEQ ID NO: 8201
  Gm_smallRNAprecursor_1035

SEQ ID NO: 8203 - DNA, 1089 bp, Glycine max
  Gm_smallRNAprecursor_1036
tattatcgatattgttagtaggggtgggaataggtcagaccagtctttaaaaggtctgagtttagcctacgatgaattttttaggcctgaatctgacctatagcctatcaaaggcttttattttggcttggcctggcctttttaaaagtctagcctgacctgatagtcttttaaaaagtcttcttcacattaaacctttaatattcctttgataattgtttttacaaaaaaaaataacacaccttctataataggctaaacaaggccttaatatataatttggcttgattttaatctaacgttaatttagttggtagtcctacaaatatattaaggcaaaattgtaaaattggtccctcactttatctccaatttcggatttggtccgccagttttttaattcacgaatttggtccccctattttgtaaaatcatgcaatgttggtctcctaggccacaattggacgttgactgttacaaaggaatgttgactgccacgtgtcacgatcttattggatgatgactgtcacatgtcatattctgattggtcaatgaaaacaacaatgcatttcatctttcttggaattgacatccaatcagaacatgacacgtggcagtcatcatccaatatgaacgtgacatgtggcagtcaacattcctttgtaacaatcaacgtccaattgtggcccgggggaccaacattgcacgattttacaaaatagggggaccaaattcgtgaattaaaaaactgggggaccaaatctagaactagagataaagtgggggaccaattttgtaattttgccatatattaataatataaactgaaatcaccttatgatatataaactaatccaaaaaaaaaaaaagaacctcatacttgaggtagcatcatccaagtctatcaaaccaacatattaattattacaaaagagaacctcattcatgaaccatgatagcagtgttagacaagtggcctcagatatcttaagaaatggggggttgaattaagatattccaaactacttccccaagtaaaaacctatttcactttttatttaagttataagtttccttaacaatgaactt

SEQ ID NO: 8204 - DNA, 1090 bp, Glycine max
  Gm_smallRNAprecursor_1037
tattatcgatattgttagtaggggtgggaataggtcagaccagtctttaaaaggtctgagtttagcctacgatgaattttttaggcctgaatctgacctatagcctatcaaaggcttttattttggcttggcctggcctttttaaaagtctagcctgacctgatagtcttttaaaaagtcttcttcacattaaacctttaatattcctttgataattgtttttacaaaaaaaaataacacaccttctataataggctaaacaaggccttaatatataatttggcttgattttaatctaacgttaatttagttggtagtcctacaaatatattaaggcaaaattgtaaaattggtccctcactttatctccaatttcggatttggtccgccagttttttaattcacgaatttggtccccctattttgtaaaatcatgcaatgttggtctcctaggccacaattggacgttgactgttacaaaggaatgttgactgccacgtgtcacgatcttattggatgatgactgtcacatgtcatattctgattggtcaatgaaaacaacaatgcatttcatctttcttggaattgacatccaatcagaacatgacacgtggcagtcatcatccaatatgaacgtgacatgtggcagtcaacattcctttgtaacaatcaacgtccaattgtggcccgggggaccaacattgcacgattttacaaaatagggggaccaaattcgtgaattaaaaaactgggggaccaaatctagaactagagataaagtgggggaccaattttgtaattttgccatatattaataatataaactgaaatcaccttatgatatataaactaatccaaaaaaaaaaaaagaacctcatacttgaggtagcatcatccaagtctatcaaaccaacatattaattattacaaaagagaacctcattcatgaaccatgatagcagtgttagacaagtggcctcagatatcttaagaaatggggggttgaattaagatattccaaactacttccccaagtaaaaacctatttcactttttatttaagttataagtttccttaacaatgaacttc

SEQ ID NO: 8205 - DNA, 1044 bp, Glycine max
  Gm_smallRNAprecursor_1038
aatatcattgtcatacataggccacttaagcagtcgtatacacataatatcgcatgggggagcaaaaaaagaaaaaaaaaaggaagttattacagaacctgttaaagtaagagatctgaaaattttagacctaggttaggattcatgcgccacttttccaagttgaacaaccccggaagtgggagagagacaaaaagtgatttttctctggattccaagtgactgaaaaacttgcgatgaaaaaaaagtacgagatttatcaagacctaccatgtctctagcaccagtggctaaaccattcaaaagaccaattttgtaagaacaatttataaagggatttataaaactgggggaccaaatgtgtgaattaaattatagggggaccaaaatcgaaattggagtaaaactgagggaccaaaagtgcaattttacctacaaaaaatgaagcctttacagggaaccactcagacgttgacatttggcattgacacgtgacaatcaacgtctgaggttaacggtcaacgtccaaatcgggcttccaggaccaattttgcagggatttataaaactaggggaccaaatttgtgaattaaattataaggggatcaaatccgtaattggagataaagtgggggaccaattttacaattttgccttaaactatttacacaaagcaaagcccaaattcacagcacaaatattcaagtgcaaaggttcttacttccaagcccaatttaaccctcgaaatggcataactgacccaagcttatttgtgacaaaattgaatatctttttcttagatttttaaggactactcacatgatccatttggagttctatagtgtcctataggccctgcataaggtagataggtcaagtaagcacaaaatccaaaaataagcaacaattatcaactaagctcgataatttgcctaaaaccaaaactgagttaaggtgagaaaataagagtcaaagagaggtcaaataaactaaaaaaatactaaactacaaatgcttaatcagagatgtactgcaattgcttac

SEQ ID NO: 8206 - DNA, 1089 bp, Glycine max
  Gm_smallRNAprecursor_1039
tgggtttggttttctatggtcagtgcttttatctctttgtgcaatcggagaatcatactcgttaatgaaaataaaaacggttctagttttatcttgtgaatttgacggaaaaccgggatttgatatatgaaccgtttatgcacacacgtcatttacgaaaaagtgaatgcgtggagacacattttgagtgctgttaatcaagaaattgatatttgtttaatggatcaataaatttaaattagataaaattctaaatttgattttgatctcccttaaaaattattattgacaaatattattctcctattttatctaatcacgcaatcttggtttagtacatagttgaataaactgttataaagaaatgttgactgtcaggtgtcacgttcttattggataactgttgcgtgtcatgttctgattgtatatcaatttcatgggagatgaaatgcattgttgttgtcattggtcaatcagaaaatgacatgtgataatcaatatcatgttctgattggatgtcaactccatggaagatgaaatgcattgttgttgttattagtcaatcaaaacatgacatgtgatagtcatcatctaataagaacgtgacacgtggcagtcaacatccattgtactcgtcaatatccaattctcaattctagactaggggaccaagattgcgtaattagataaaataagagaataaaattcgtcaataattttagatgggaaccaaaatcgaaattaaaaacaactagggggacaaaaatgtaattttacctttaaattattaggacaagtcttttctagtcgttaagtacttgtgttaagtgttaaataaatttaaaaaccaccaaatgtctattttattgtaaagtatgtactctttctttttagcttcatagaaagtggtatatatgagtaagttgagtatttttcttcttataaaatttatttcattcaatcaatcacgatttaaattttatatcacttgattaggatacaatggattgatgaataatatttcaatatgttcacataaataagaattatcaatctatttaatagaagaacacatgtttaactatcacc

SEQ ID NO: 8207 - DNA, 1062 bp, Glycine max
  Gm_smallRNAprecursor_1040
tggctaatatatttcaaaatgaacataatctaaattggttcctacaatggtggtatttctttggtccaatttcggagattttcccagagcaggttcaacaaggatttgctcaatttaaaaaataatacaattctcaggaatcacgaattctagcaaatcttagatatttttccagttttgctctgtcatcaattttttcatggcaatattgttatagtaaaattaagaaaacaaaccaatatccatcactacaaaggcatgcatttataaaatggtggactcagtttgattcgtccaaggctgatccagaacaagtgaaactttggttccaatcccttccagaatttctcaaagcagctgatctagagacttctgtgtttttgaaccaaaagtcccatctggctgcatttgtagcaggatcaaaatcaaaagaagtcctaactaaaaatcttaaagaagttttgcaaatgttgcaacaagaagaagaaggttcatcctcaaagaaggaagaaacaagttctgttgaagaagaagaagatccttttttaccagaacgaagatgattgttttggtatttgtttagattaaaatttaattgtaattacggtcacataaccgtttgtattttgaaatagttctagacaatactacctgtcctatagcaaataagtatcacctgtcctgtagcaaataagtaccggtcaaaaccaatagtcttgtaacaaatagtcaaatagtttcggttaaaactaccaaaaactaccggtcttatggaaaattttggctatatatggagtcctcagccatattgtgaggcaccttttgatttagccattttcaggagtcttgagagagaggtgctttgataagaacaactttgtaagctcttcttccaatttcaataaatttgaagttttctatcatctcccttctccctctttctatcgatcctgtgcggctctgccgccacttcagtttctttttttgcacaaacctggaatttgtaagcctgtatatgtgtgcccttgatatttgttttgaaaactgcatcttcatctttca

SEQ ID NO: 8208 - DNA, 1197 bp, Glycine max
  Gm_smallRNAprecursor_1041
tgcccttgatatctgctttacagtttatatttcgctttttcatttatcatactgcattcttacttcctatctgtctgtttgatcttattccgctgatctctggtatcagagcctgatggggaagtaggaatactgtccgtaaggacatatgttaacaagttttatggatctggaactaaagtcttgtatagtacacgtaatattttactttgatttgtacagtaagtgtttgaacagtacttcctggaagtacagcagtctaatattttagttgaatggtactgtagcagtaagacccgtgtgggataaagggcggtaaggctaaggtgtattgtttaaccaaaatatcaagacataatacactggtggctataggattgccgttcaaactattattaaaaaaaaaagagtttttcttaaaaataattcagatccagaaaaattttgtgacatatttacttacggaggtatttctatggaaccaaatgaaggcaaagatattagagaatattataatcatgtctagactattacgatctttttcccgtatctcttttcgctcaaactcctcctcatccccttcttcaagaaactccaatttattaaatgatcaagataaccagacccaagaggtcgccccaaaacacaatctcttcgatgaggaagtccgattcgaagatatcaatcaaaacatggatgactggaacattccagaaatccctcaggatcaactatacgttcctgaaacaataaaggacaaacacaactttgattacataatcaaaacaatagaaaacaatattcctctaggacaagatataggggaagaatttcatttactttcaaaaaattcaatttatgaacatagccgtaagtataaatatctacacatcggttgtgtacaagtagccatcaagcccttaattgacatgggcatagatgcagcagttttaatgtgtctaagagacattaggcataatcaatttgaagactccctaatatgaacagtcgaaaccagcctaggacaaggtccaatatattttaactgttatccaaacaaaacagtgagtctgatggacagaaacattcttgactctctgttcttaaacatccactttcatggccttgacatgaaagaaggatcaatcccagcagccttaatttataggatccaatacaaggtcatgaatacttgtg

SEQ ID NO: 8209 - DNA, 1157 bp, Glycine max
  Gm_smallRNAprecursor_1042
atatgttaacaagttttatggatctggaactaaagtcttgtatagtacacgtaatattttactttgatttgtacagtaagtgtttgaacagtacttcctggaagtacagcagtctaatattttagttgaatggtactgtagcagtaagacccgtgtgggataaagggcggtaaggctaaggtgtattgtttaaccaaaatatcaagacataatacactggtggctataggattgccgttcaaactattattaaaaaaaaaagagtttttcttaaaaataattcagatccagaaaaattttgtgacatatttacttacggaggtatttctatggaaccaaatgaaggcaaagatattagagaatattataatcatgtctagactattacgatctttttcccgtatctcttttcgctcaaactcctcctcatccccttcttcaagaaactccaatttattaaatgatcaagataaccagacccaagaggtcgccccaaaacacaatctcttcgatgaggaagtccgattcgaagatatcaatcaaaacatggatgactggaacattccagaaatccctcaggatcaactatacgttcctgaaacaataaaggacaaacacaactttgattacataatcaaaacaatagaaaacaatattcctctaggacaagatataggggaagaatttcatttactttcaaaaaattcaatttatgaacatagccgtaagtataaatatctacacatcggttgtgtacaagtagccatcaagcccttaattgacatgggcatagatgcagcagttttaatgtgtctaagagacattaggcataatcaatttgaagactccctaatatgaacagtcgaaaccagcctaggacaaggtccaatatattttaactgttatccaaacaaaacagtgagtctgatggacagaaacattcttgactctctgttcttaaacatccactttcatggccttgacatgaaagaaggatcaatcccagcagccttaatttataggatccaatacaaggtcatgaatacttgtgcatctagagtcctgttaaaacctcaaaaaggagaaacaactttgattatcactgatatgacaaaggctaacgtttctctcccgagaaaaataaaatgggatgaagt

SEQ ID NO: 8210 - DNA, 1033 bp, Glycine max
  Gm_smallRNAprecursor_1043
aaggctaaggtgtattgtttaaccaaaatatcaagacataatacactggtggctataggattgccgttcaaactattattaaaaaaaaaagagtttttcttaaaaataattcagatccagaaaaattttgtgacatatttacttacggaggtatttctatggaaccaaatgaaggcaaagatattagagaatattataatcatgtctagactattacgatctttttcccgtatctcttttcgctcaaactcctcctcatccccttcttcaagaaactccaatttattaaatgatcaagataaccagacccaagaggtcgccccaaaacacaatctcttcgatgaggaagtccgattcgaagatatcaatcaaaacatggatgactggaacattccagaaatccctcaggatcaactatacgttcctgaaacaataaaggacaaacacaactttgattacataatcaaaacaatagaaaacaatattcctctaggacaagatataggggaagaatttcatttactttcaaaaaattcaatttatgaacatagccgtaagtataaatatctacacatcggttgtgtacaagtagccatcaagcccttaattgacatgggcatagatgcagcagttttaatgtgtctaagagacattaggcataatcaatttgaagactccctaatatgaacagtcgaaaccagcctaggacaaggtccaatatattttaactgttatccaaacaaaacagtgagtctgatggacagaaacattcttgactctctgttcttaaacatccactttcatggccttgacatgaaagaaggatcaatcccagcagccttaatttataggatccaatacaaggtcatgaatacttgtgcatctagagtcctgttaaaacctcaaaaaggagaaacaactttgattatcactgatatgacaaaggctaacgtttctctcccgagaaaaataaaatgggatgaagtaactcttcccgaaagatgggttatggataaggcaacaccgtctattc

SEQ ID NO: 8211 - DNA, 1047 bp, Glycine max
  Gm_smallRNAprecursor_1044
aagacataatacactggtggctataggattgccgttcaaactattattaaaaaaaaaagagtttttcttaaaaataattcagatccagaaaaattttgtgacatatttacttacggaggtatttctatggaaccaaatgaaggcaaagatattagagaatattataatcatgtctagactattacgatctttttcccgtatctcttttcgctcaaactcctcctcatccccttcttcaagaaactccaatttattaaatgatcaagataaccagacccaagaggtcgccccaaaacacaatctcttcgatgaggaagtccgattcgaagatatcaatcaaaacatggatgactggaacattccagaaatccctcaggatcaactatacgttcctgaaacaataaaggacaaacacaactttgattacataatcaaaacaatagaaaacaatattcctctaggacaagatataggggaagaatttcatttactttcaaaaaattcaatttatgaacatagccgtaagtataaatatctacacatcggttgtgtacaagtagccatcaagcccttaattgacatgggcatagatgcagcagttttaatgtgtctaagagacattaggcataatcaatttgaagactccctaatatgaacagtcgaaaccagcctaggacaaggtccaatatattttaactgttatccaaacaaaacagtgagtctgatggacagaaacattcttgactctctgttcttaaacatccactttcatggccttgacatgaaagaaggatcaatcccagcagccttaatttataggatccaatacaaggtcatgaatacttgtgcatctagagtcctgttaaaacctcaaaaaggagaaacaactttgattatcactgatatgacaaaggctaacgtttctctcccgagaaaaataaaatgggatgaagtaactcttcccgaaagatgggttatggataaggcaacaccgtctattccccgacccgctccaaccatagagcatattaagcaagataactccgg

SEQ ID NO: 8212 - DNA, 1080 bp, Glycine max
  Gm_smallRNAprecursor_1045
aaaagcaagagcccatggtcttgtgcggctttttatgtcaacaaacaatctgagattgagcgtggaacaccccgcttagtcataaattacaaaccactaaatcaagcattacaatggattagatatcctattccaaacaaaaaagatttgcttaacagattaaattctgcaaagatattttcaaaatttgatatgaaatctggattttggcaaatccaaatccaagaatcagataggtacaagacagcgtttactgtacctttcggggaatatgaatggaatgtaatgccattcggactaaagaatgccccttcagaatttcaaaaaattatgaatgacatttttaatccctattcaaaatttgtcattgtctacatagatgatgttttaatcttttcccaaaacattaaccaacatttcaaacatctccaaaccttcatccatatcatcaaacaaaatggtttggcagtctccaaatcaaaaatcaatcttttccaaactcgaattcgattccttggtcacaatatttatcaaggtacaatcattccaatcgaaaggtcaatagaatttgctagtaaattccccaaccaaatcttagacaaaacccagttacaaagatttctaggttgtctaaattacgtaggagaatttgtcccctacttaaacaatattgtcaaaccattgcatgataggctaaagaaaaatccgcctccttggtctgacctccatacccaaacagttaaagaaatcaaagtcaaagtccaatccataaaatgtctgtatcttcccattccacaggcattcaaaattgtcgaaactgatgcatcagacatcggttacggtggcatcctcaaacaacaagtacatggtcaagaacatgtcattgcatatacttcaaaacactggaatcctgcacaattaaagtattcaactgtcaaaaaagaagttttagcaattgttttgtgcatttccaaatttcaaactgatttattaaataaaaaaattttagtaagggttgactgcaaatcagccaaagacattttacagaaagatgtaaaaaaaccttgcctcaaaacagat

SEQ ID NO: 8213 - DNA, 1059 bp, Glycine max
  Gm_smallRNAprecursor_1046
tgaatcctagcagtatccggtagtttcaatttataagccacgtttccaattttttccaaaacctcaaagggtccaaaatagcgcatgctcagcttctgtgttttccttaaagcaattgagtgttttctataaggttgtagtttgaccaacaccaattctccaacttcaaactgtatgtcccttcttcttttgtcagcttgtgttttcatatattgttgtgccttcagcaaattcaatttcaattgttgcaaaatcgcatcacgttcacgtagctgttcttgaactgacaccagatctgtgggactgatttcataacacatgacagcaggtggatccttgccatacaaagctttgaatggagacataccaatgctttgatgaaaagatgaagagtgttgctaggtgcacccaacattattactggtgcacccaacatttaattaaaataccaaaactgcctctgcacttttttcgcatttgtgatgggtgtgtgtgagggtgattcgtaaatcgtacggatcaagttgatccgtaaggtttctacggatcaagttgatccgtaagacttttacggatcaacttaaatgtcttacggatcaagggtattttcgtcattttaccttaagtgatgagtgcaccagcaataatgctgggtgcacctagcaacacccaaagatgaattataccaatactgggcccatggcaatactgcaaaccaaccttttaggttatcaaacacaaaacaacgcagatacatctccagagtcttgttcagtacctccgtttgtccatcggactacgggtgatatgaagagctcatggcaagtgttgttcttgagctttgaacaagtgttgccaaaaagaactaacaaaaattatgtcacgataaaaaaaaatagatcgtggaacaccatacaacttgacaatgttattaataaaagacttagcaacaatcttgctcgtatactcggcttttaaaggaataaagtgcccaaattttgataatcggtccactactaccataatagtagaataaccatgtgaaggtggaaagtttgt

SEQ ID NO: 8214 - DNA, 1158 bp, Glycine max
  Gm_smallRNAprecursor_1047
attattttgtgaatttattgtattatattttattttgcagtatcaatggcatcttcatcgtcatgtccatcaaatattaaaattaagtctggcccgattgatggtgacgtattatggatgcaagctaagcatgtttcagaacatgtttggaatggggaagaagaccgcaaattacacatcagacgagttgtccccacttatcaaggggaagaagaaataccaaagcaaattttttctttccttcgacaatctggtttttactggattatgaagatgggatacttaaaaataaatgtctcattaattagtgctttgatagaaagatagaggccggaaacacatacgtttcacatgagatgcggagagtgtactattactcttcaagatgtctctgtattgttaggtctacgtgtggatggtttaccattaattggtccaacaaatcttaattgggctgatttatgtgaggaattattgggagtcagaccacaagaaggtgaaattaaaggtagtgtggttaaattaagttggttggctcaccattttgcacaaataaataaccacgacgacaaagaacaagtacgaaggtttacccgtgcatggatactaagattcattggaggtgtcttgtttgttgacaaaagcagtaacaaagtttcgctaaggtaccttcaatttttacgtgactttggagactatagcacatatgcatggggacctgccgtacttgcttttctatatagagagatgtgcagtgccaccgattataaaactaaatcaatcggaggtatgtgcatctttctataaatgtgggcatgggaacgatgtataactttggctccaaagaggactccttcctaagtagaaaataaaccactcaggcacaagttagtcattcctaaaagcgtctttcatttcaaaagaataaatggttttagggtatattaaattttaatctttgtaggtggctgcgacgtggaaatcaacatatcggcaatgatgatgtgagagttttttgttgcaagttggatattatgaaacgtcatgaggtaagaacatggtattgtatttgtaaaataaaaaataatgtgttattttactaaaatgctgacaactatgttgttatatgcagtttgtgtgggagccttacacaacaac

SEQ ID NO: 8215 - DNA, 1035 bp, Glycine max
  Gm_smallRNAprecursor_1048
tattttgtgaatttattgtattatattttattttgcagtatcaatggcatcttcatcgtcatgtccatcaaatattaaaattaagtctggcccgattgatggtgacgtattatggatgcaagctaagcatgtttcagaacatgtttggaatggggaagaagaccgcaaattacacatcagacgagttgtccccacttatcaaggggaagaagaaataccaaagcaaattttttctttccttcgacaatctggtttttactggattatgaagatgggatacttaaaaataaatgtctcattaattagtgctttgatagaaagatagaggccggaaacacatacgtttcacatgagatgcggagagtgtactattactcttcaagatgtctctgtattgttaggtctacgtgtggatggtttaccattaattggtccaacaaatcttaattgggctgatttatgtgaggaattattgggagtcagaccacaagaaggtgaaattaaaggtagtgtggttaaattaagttggttggctcaccattttgcacaaataaataaccacgacgacaaagaacaagtacgaaggtttacccgtgcatggatactaagattcattggaggtgtcttgtttgttgacaaaagcagtaacaaagtttcgctaaggtaccttcaatttttacgtgactttggagactatagcacatatgcatggggacctgccgtacttgcttttctatatagagagatgtgcagtgccaccgattataaaactaaatcaatcggaggtatgtgcatctttctataaatgtgggcatgggaacgatgtataactttggctccaaagaggactccttcctaagtagaaaataaaccactcaggcacaagttagtcattcctaaaagcgtctttcatttcaaaagaataaatggttttagggtatattaaattttaatctttgtaggtggctgcgacgtggaaatcaacatatcggcaatgatgatgtgagagttttttgttgcaagttggatattatg

SEQ ID NO: 8216 - DNA, 1155 bp, Glycine max
  Gm_smallRNAprecursor_1049
tattttgtgaatttattgtattatattttattttgcagtatcaatggcatcttcatcgtcatgtccatcaaatattaaaattaagtctggcccgattgatggtgacgtattatggatgcaagctaagcatgtttcagaacatgtttggaatggggaagaagaccgcaaattacacatcagacgagttgtccccacttatcaaggggaagaagaaataccaaagcaaattttttctttccttcgacaatctggtttttactggattatgaagatgggatacttaaaaataaatgtctcattaattagtgctttgatagaaagatagaggccggaaacacatacgtttcacatgagatgcggagagtgtactattactcttcaagatgtctctgtattgttaggtctacgtgtggatggtttaccattaattggtccaacaaatcttaattgggctgatttatgtgaggaattattgggagtcagaccacaagaaggtgaaattaaaggtagtgtggttaaattaagttggttggctcaccattttgcacaaataaataaccacgacgacaaagaacaagtacgaaggtttacccgtgcatggatactaagattcattggaggtgtcttgtttgttgacaaaagcagtaacaaagtttcgctaaggtaccttcaatttttacgtgactttggagactatagcacatatgcatggggacctgccgtacttgcttttctatatagagagatgtgcagtgccaccgattataaaactaaatcaatcggaggtatgtgcatctttctataaatgtgggcatgggaacgatgtataactttggctccaaagaggactccttcctaagtagaaaataaaccactcaggcacaagttagtcattcctaaaagcgtctttcatttcaaaagaataaatggttttagggtatattaaattttaatctttgtaggtggctgcgacgtggaaatcaacatatcggcaatgatgatgtgagagttttttgttgcaagttggatattatgaaacgtcatgaggtaagaacatggtattgtatttgtaaaataaaaaataatgtgttattttactaaaatgctgacaactatgttgttatatgcagtttgtgtgggagccttacacaacaa

SEQ ID NO: 8217 - DNA, 1094 bp, Glycine max
  Gm_smallRNAprecursor_1050
gagtctttatctgttgatttgtcatcccttgtgtctgaatctggattgcgatatcactttgggatacataaaaatggtggtaatccccaggcaatgaatgcaaccgatggtaacccgccactgtctctactgccagggttatgtgcgaaggttgctgttagttatgagaagatcaaatacttctggagagataaaggtgctgcagaacaagagaatgaagaggcgcttccatatgatgtgcgtcttaaggaacctcacgcagcagtatctggaattattggtaatttctctagattgatgtaattattactgtttgagatgagagcaagtatgttcgcatagtgtgtcagtcactctttttcatatttgtggtatttgtttttacatgtttttcataattgctttcaggcatacaactttgtttttttttcatttcccctttttgttttctttccttttttctttcattttgttgaaattatatggctcaggctatgaaacaccgacactgacacggacaccagacacgacacggacacggacacatgaacacctgtcaaacacatcaaactcaacctggacacgggcgtcgttgtcgtgtcggtgtcggtgtcgtgtcggacactggacacggctaggggctggggtgtccgtgcttcatagggctcaggcagggaaaaaaaagaaagaggaaaggatacttgcgatacaataaaattatattgataagcgtgttatggtgtgatacaaaatacaaatcattaagaaatataatgaaatacaaaagttactccttagagatcacttttagatcctctaaattattctaaaatgtgatcaagagtcaagacattatgagatgttttctatcaaatttattgtacaagcaaaatccaaacaggttgatagcgagtgctttgtgtgcataagttacaaaaagtaggtagttttcatatatggataggaatgcattattgcatttaaagaattcttcactggatcatataaatttcccttgattaattgatttccttactaacattttttcataattggcgaattgatggatgatagctgggtggacaagtttgtgg

SEQ ID NO: 8218 - DNA, 1093 bp, Glycine max
  Gm_smallRNAprecursor_1051
agtctttatctgttgatttgtcatcccttgtgtctgaatctggattgcgatatcactttgggatacataaaaatggtggtaatccccaggcaatgaatgcaaccgatggtaacccgccactgtctctactgccagggttatgtgcgaaggttgctgttagttatgagaagatcaaatacttctggagagataaaggtgctgcagaacaagagaatgaagaggcgcttccatatgatgtgcgtcttaaggaacctcacgcagcagtatctggaattattggtaatttctctagattgatgtaattattactgtttgagatgagagcaagtatgttcgcatagtgtgtcagtcactctttttcatatttgtggtatttgtttttacatgtttttcataattgctttcaggcatacaactttgtttttttttcatttcccctttttgttttctttccttttttctttcattttgttgaaattatatggctcaggctatgaaacaccgacactgacacggacaccagacacgacacggacacggacacatgaacacctgtcaaacacatcaaactcaacctggacacgggcgtcgttgtcgtgtcggtgtcggtgtcgtgtcggacactggacacggctaggggctggggtgtccgtgcttcatagggctcaggcagggaaaaaaaagaaagaggaaaggatacttgcgatacaataaaattatattgataagcgtgttatggtgtgatacaaaatacaaatcattaagaaatataatgaaatacaaaagttactccttagagatcacttttagatcctctaaattattctaaaatgtgatcaagagtcaagacattatgagatgttttctatcaaatttattgtacaagcaaaatccaaacaggttgatagcgagtgctttgtgtgcataagttacaaaaagtaggtagttttcatatatggataggaatgcattattgcatttaaagaattcttcactggatcatataaatttcccttgattaattgatttccttactaacattttttcataattggcgaattgatggatgatagctgggtggacaagtttgtgg

SEQ ID NO: 8219 - DNA, 1195 bp, Glycine max
  Gm_smallRNAprecursor_1052
gaaaaaagataatgcatatttataaaattggttaaaactttgttagtcactagctaaatgcaataagccatataatttttaattttgactctttccgttgtagtctagttggttaggatactcggctctcacccgagagacccgggttcatgtcccagcaacggaaccagagatcagcggagtagggatcaacggacaaataggaagtaagaatgcaaaatgataaaaggaaattgaaattaaaattcttacaacaagtatcaagggcacaccagagaccggcttacaaatcccaggttttcataaacaaagaaaccgaagcggcggcagagccgcacaggatcggtacaagagggagaggggagacagatgagaaatagaaatttattaaaacttgaaagaagcgcttacaaaagttgttctttcagagcacctcctctcagaaacctaaaaaatgaccaaatgaaagggtgcctcacaatatggttgaggactccttatatagccaaaattatttgaccggtagttgccggtagttttgaccgaaactatttgactgtttgttacaaaacaattagttttgaccgggacttatttgctacaggacaggtagtattgtccaaaattacaaattaattacatacagacggtcttgtaaccgaaattactattaatctaaacaaataccaaaacaatcatcttcgttttggtaaaaagggtcttcttcttcttcagcagagcttgtttcttccttctttgaggatgaacattcttcctcttgctgtaacatttgcagaacttccttaaggtttttagttaggatctctttagattttgatcctgctaaaaatgctgccagatgggacttttgatttaaaaacacagaagtttctggatcagctgctttgaggaattctggatgggatttgaactagagtttcacttgttttggatctgctttggatgagttgaattgagtccaccattttacaaatgcatgtctttgcagtgatggatattagtttgttttttcagtcttactgtaacgatactggcatgagaaaatccatgacagagcaaaactgaaaaaatatttaagatctgctggaattcgtgattcttgagaattgtattgtttgtcaaattgagcaaatccttgttggactgtttccgggaatatttctggaattggtcc

SEQ ID NO: 8220 - DNA, 1215 bp, Glycine max
  Gm_smallRNAprecursor_1053
tatttgctacaggacaggtagtattgtccaaaattacaaattaattacatacagacggtcttgtaaccgaaattactattaatctaaacaaataccaaaacaatcatcttcgttttggtaaaaagggtcttcttcttcttcagcagagcttgtttcttccttctttgaggatgaacattcttcctcttgctgtaacatttgcagaacttccttaaggtttttagttaggatctctttagattttgatcctgctaaaaatgctgccagatgggacttttgatttaaaaacacagaagtttctggatcagctgctttgaggaattctggatgggatttgaactagagtttcacttgttttggatctgctttggatgagttgaattgagtccaccattttacaaatgcatgtctttgcagtgatggatattagtttgttttttcagtcttactgtaacgatactggcatgagaaaatccatgacagagcaaaactgaaaaaatatttaagatctgctggaattcgtgattcttgagaattgtattgtttgtcaaattgagcaaatccttgttggactgtttccgggaatatttctggaattggtccaaagaaaccccaccattgtaaaaaccaatttggaaaattataaattgtgttggtttcgaaatatatcagccatgaatgcttgaagcgggtattttggtgccaaaaaatcttagtccaagcatcaatataatcccaataggtataacctactgggtcaaatgatactgaaaatctctttcctttgtttaagtccgaaccaaaatgtcttggtagaagaactttagtatttggattgttgagtgggtgttcaatgtttggtcttttgggtctttgaaatgtttgatacacactaaatttgagtctaccaaaactaattcataaaaagtccatgacttcaggatggtagttggtttgtagtgaaatcctgacgggaaagccttggttgttgccttaaatgggtttttgtcccaaaatccaggttccatctgcaaaacaattgaaaatttatttttataaatataattgctagtttgtttggtaggtggtgtttgtactttggctaggggtagtttccctttaggattggtagttgttttggtcattgatgtattttggatcattgtttgtaaatttgattcagaatcatcgtcaaattctaaggcaatatctgcc

SEQ ID NO: 8221 - DNA, 1215 bp, Glycine max; identical to SEQ ID NO: 8220
  Gm_smallRNAprecursor_1054

SEQ ID NO: 8222 - DNA, 1216 bp, Glycine max
  Gm_smallRNAprecursor_1055
tatttgctacaggacaggtagtattgtccaaaattacaaattaattacatacagacggtcttgtaaccgaaattactattaatctaaacaaataccaaaacaatcatcttcgttttggtaaaaagggtcttcttcttcttcagcagagcttgtttcttccttctttgaggatgaacattcttcctcttgctgtaacatttgcagaacttccttaaggtttttagttaggatctctttagattttgatcctgctaaaaatgctgccagatgggacttttgatttaaaaacacagaagtttctggatcagctgctttgaggaattctggatgggatttgaactagagtttcacttgttttggatctgctttggatgagttgaattgagtccaccattttacaaatgcatgtctttgcagtgatggatattagtttgttttttcagtcttactgtaacgatactggcatgagaaaatccatgacagagcaaaactgaaaaaatatttaagatctgctggaattcgtgattcttgagaattgtattgtttgtcaaattgagcaaatccttgttggactgtttccgggaatatttctggaattggtccaaagaaaccccaccattgtaaaaaccaatttggaaaattataaattgtgttggtttcgaaatatatcagccatgaatgcttgaagcgggtattttggtgccaaaaaatcttagtccaagcatcaatataatcccaataggtataacctactgggtcaaatgatactgaaaatctctttcctttgtttaagtccgaaccaaaatgtcttggtagaagaactttagtatttggattgttgagtgggtgttcaatgtttggtcttttgggtctttgaaatgtttgatacacactaaatttgagtctaccaaaactaattcataaaaagtccatgacttcaggatggtagttggtttgtagtgaaatcctgacgggaaagccttggttgttgccttaaatgggtttttgtcccaaaatccaggttccatctgcaaaacaattgaaaatttatttttataaatataattgctagtttgtttggtaggtggtgtttgtactttggctaggggtagtttccctttaggattggtagttgttttggtcattgatgtattttggatcattgtttgtaaatttgattcagaatcatcgtcaaattctaaggcaatatctgccc

SEQ ID NO: 8223 - DNA, 1216 bp, Glycine max; identical to SEQ ID NO: 8222
  Gm_smallRNAprecursor_1056

SEQ ID NO: 8224 - DNA, 1219 bp, Glycine max
  Gm_smallRNAprecursor_1057
tatttgctacaggacaggtagtattgtccaaaattacaaattaattacatacagacggtcttgtaaccgaaattactattaatctaaacaaataccaaaacaatcatcttcgttttggtaaaaagggtcttcttcttcttcagcagagcttgtttcttccttctttgaggatgaacattcttcctcttgctgtaacatttgcagaacttccttaaggtttttagttaggatctctttagattttgatcctgctaaaaatgctgccagatgggacttttgatttaaaaacacagaagtttctggatcagctgctttgaggaattctggatgggatttgaactagagtttcacttgttttggatctgctttggatgagttgaattgagtccaccattttacaaatgcatgtctttgcagtgatggatattagtttgttttttcagtcttactgtaacgatactggcatgagaaaatccatgacagagcaaaactgaaaaaatatttaagatctgctggaattcgtgattcttgagaattgtattgtttgtcaaattgagcaaatccttgttggactgtttccgggaatatttctggaattggtccaaagaaaccccaccattgtaaaaaccaatttggaaaattataaattgtgttggtttcgaaatatatcagccatgaatgcttgaagcgggtattttggtgccaaaaaatcttagtccaagcatcaatataatcccaataggtataacctactgggtcaaatgatactgaaaatctctttcctttgtttaagtccgaaccaaaatgtcttggtagaagaactttagtatttggattgttgagtgggtgttcaatgtttggtcttttgggtctttgaaatgtttgatacacactaaatttgagtctaccaaaactaattcataaaaagtccatgacttcaggatggtagttggtttgtagtgaaatcctgacgggaaagccttggttgttgccttaaatgggtttttgtcccaaaatccaggttccatctgcaaaacaattgaaaatttatttttataaatataattgctagtttgtttggtaggtggtgtttgtactttggctaggggtagtttccctttaggattggtagttgttttggtcattgatgtattttggatcattgtttgtaaatttgattcagaatcatcgtcaaattctaaggcaatatctgcccaag

SEQ ID NO: 8225 - DNA, 1219 bp, Glycine max; identical to SEQ ID NO: 8224
  Gm_smallRNAprecursor_1058

SEQ ID NO: 8226 - DNA, 1162 bp, Glycine max
  Gm_smallRNAprecursor_1059
acggtcttgtaaccgaaattactattaatctaaacaaataccaaaacaatcatcttcgttttggtaaaaagggtcttcttcttcttcagcagagcttgtttcttccttctttgaggatgaacattcttcctcttgctgtaacatttgcagaacttccttaaggtttttagttaggatctctttagattttgatcctgctaaaaatgctgccagatgggacttttgatttaaaaacacagaagtttctggatcagctgctttgaggaattctggatgggatttgaactagagtttcacttgttttggatctgctttggatgagttgaattgagtccaccattttacaaatgcatgtctttgcagtgatggatattagtttgttttttcagtcttactgtaacgatactggcatgagaaaatccatgacagagcaaaactgaaaaaatatttaagatctgctggaattcgtgattcttgagaattgtattgtttgtcaaattgagcaaatccttgttggactgtttccgggaatatttctggaattggtccaaagaaaccccaccattgtaaaaaccaatttggaaaattataaattgtgttggtttcgaaatatatcagccatgaatgcttgaagcgggtattttggtgccaaaaaatcttagtccaagcatcaatataatcccaataggtataacctactgggtcaaatgatactgaaaatctctttcctttgtttaagtccgaaccaaaatgtcttggtagaagaactttagtatttggattgttgagtgggtgttcaatgtttggtcttttgggtctttgaaatgtttgatacacactaaatttgagtctaccaaaactaattcataaaaagtccatgacttcaggatggtagttggtttgtagtgaaatcctgacgggaaagccttggttgttgccttaaatgggtttttgtcccaaaatccaggttccatctgcaaaacaattgaaaatttatttttataaatataattgctagtttgtttggtaggtggtgtttgtactttggctaggggtagtttccctttaggattggtagttgttttggtcattgatgtattttggatcattgtttgtaaatttgattcagaatcatcgtcaaattctaaggcaatatctgccc

SEQ ID NO: 8227 - DNA, 1160 bp, Glycine max
  Gm_smallRNAprecursor_1060
cggtcttgtaaccgaaattactattaatctaaacaaataccaaaacaatcatcttcgttttggtaaaaagggtcttcttcttcttcagcagagcttgtttcttccttctttgaggatgaacattcttcctcttgctgtaacatttgcagaacttccttaaggtttttagttaggatctctttagattttgatcctgctaaaaatgctgccagatgggacttttgatttaaaaacacagaagtttctggatcagctgctttgaggaattctggatgggatttgaactagagtttcacttgttttggatctgctttggatgagttgaattgagtccaccattttacaaatgcatgtctttgcagtgatggatattagtttgttttttcagtcttactgtaacgatactggcatgagaaaatccatgacagagcaaaactgaaaaaatatttaagatctgctggaattcgtgattcttgagaattgtattgtttgtcaaattgagcaaatccttgttggactgtttccgggaatatttctggaattggtccaaagaaaccccaccattgtaaaaaccaatttggaaaattataaattgtgttggtttcgaaatatatcagccatgaatgcttgaagcgggtattttggtgccaaaaaatcttagtccaagcatcaatataatcccaataggtataacctactgggtcaaatgatactgaaaatctctttcctttgtttaagtccgaaccaaaatgtcttggtagaagaactttagtatttggattgttgagtgggtgttcaatgtttggtcttttgggtctttgaaatgtttgatacacactaaatttgagtctaccaaaactaattcataaaaagtccatgacttcaggatggtagttggtttgtagtgaaatcctgacgggaaagccttggttgttgccttaaatgggtttttgtcccaaaatccaggttccatctgcaaaacaattgaaaatttatttttataaatataattgctagtttgtttggtaggtggtgtttgtactttggctaggggtagtttccctttaggattggtagttgttttggtcattgatgtattttggatcattgtttgtaaatttgattcagaatcatcgtcaaattctaaggcaatatctgcc

SEQ ID NO: 8228 - DNA, 1161 bp, Glycine max
  Gm_smallRNAprecursor_1061
cggtcttgtaaccgaaattactattaatctaaacaaataccaaaacaatcatcttcgttttggtaaaaagggtcttcttcttcttcagcagagcttgtttcttccttctttgaggatgaacattcttcctcttgctgtaacatttgcagaacttccttaaggtttttagttaggatctctttagattttgatcctgctaaaaatgctgccagatgggacttttgatttaaaaacacagaagtttctggatcagctgctttgaggaattctggatgggatttgaactagagtttcacttgttttggatctgctttggatgagttgaattgagtccaccattttacaaatgcatgtctttgcagtgatggatattagtttgttttttcagtcttactgtaacgatactggcatgagaaaatccatgacagagcaaaactgaaaaaatatttaagatctgctggaattcgtgattcttgagaattgtattgtttgtcaaattgagcaaatccttgttggactgtttccgggaatatttctggaattggtccaaagaaaccccaccattgtaaaaaccaatttggaaaattataaattgtgttggtttcgaaatatatcagccatgaatgcttgaagcgggtattttggtgccaaaaaatcttagtccaagcatcaatataatcccaataggtataacctactgggtcaaatgatactgaaaatctctttcctttgtttaagtccgaaccaaaatgtcttggtagaagaactttagtatttggattgttgagtgggtgttcaatgtttggtcttttgggtctttgaaatgtttgatacacactaaatttgagtctaccaaaactaattcataaaaagtccatgacttcaggatggtagttggtttgtagtgaaatcctgacgggaaagccttggttgttgccttaaatgggtttttgtcccaaaatccaggttccatctgcaaaacaattgaaaatttatttttataaatataattgctagtttgtttggtaggtggtgtttgtactttggctaggggtagtttccctttaggattggtagttgttttggtcattgatgtattttggatcattgtttgtaaatttgattcagaatcatcgtcaaattctaaggcaatatctgccc

SEQ ID NO: 8229 - DNA, 1049 bp, Glycine max
  Gm_smallRNAprecursor_1062
tttgaggtgcccttgatatattctatgtcataatcaaagacacttaaaattgcttgccatcttgcaaaaatttgttttgaggcaaggtttttaacatccttttgtaaaatatctttggctgacttgcaatcaaccctgattaaaaaattttgatttaataaatctgattgaaatttggaaatgcacaaaacaattgctaaaacttcttttttaacagttgaatattttaattgtgcagggttccaatattttgatttatatgcaatgacatgatcttgaccatgtactctttatttcaggatgccaccataacctttgtctgatgcatcagtttcgacaattttaaaggcctgaggaataggaagatacatgcattttatagattggactttgagtttgatctctttaactgtttcggtatggagatcagaccaaggaggcggatttttcttcagcctatcatgcaatggcttgaaaatattgtttaaataggggacaaattctcctacataatttagacaacctagaaatctttgtaactgggttttgtctaagatttggttgggaaattttctagcaaactctattgacctttctattagaatgattgttccttgatatatattgtgaccaaggaatcgaatttgagtttggaaaaaattgatttttgatttggagactgccaaaccattctgtttgatgatatggatgaaagtctggagatgtttgaaatgttggtcaatgttttgggaaaagattaaaacatcatctatgtagacaatgacaaattttgaatagggattaaaaatatcattcataattttttgaaattctgaaggggcattctttagtccgaatggcatcacattcgattcatattgcccgaaaggtacagtaaacgctgttttgtacctatctgattcttggatttggatttgccaaaatccagatttcatatcaaattttgaaaatatttttgcagaatttaatctgttaagtaaatcttttttgtttggaataggatacctaatccattgtaatgcttgatt

SEQ ID NO: 8230 - DNA, 1049 bp, Glycine max; identical to SEQ ID NO: 8229
  Gm_smallRNAprecursor_1063

SEQ ID NO: 8231 - DNA, 1050 bp, Glycine max
  Gm_smallRNAprecursor_1064
tttgaggtgcccttgatatattctatgtcataatcaaagacacttaaaattgcttgccatcttgcaaaaatttgttttgaggcaaggtttttaacatccttttgtaaaatatctttggctgacttgcaatcaaccctgattaaaaaattttgatttaataaatctgattgaaatttggaaatgcacaaaacaattgctaaaacttcttttttaacagttgaatattttaattgtgcagggttccaatattttgatttatatgcaatgacatgatcttgaccatgtactctttatttcaggatgccaccataacctttgtctgatgcatcagtttcgacaattttaaaggcctgaggaataggaagatacatgcattttatagattggactttgagtttgatctctttaactgtttcggtatggagatcagaccaaggaggcggatttttcttcagcctatcatgcaatggcttgaaaatattgtttaaataggggacaaattctcctacataatttagacaacctagaaatctttgtaactgggttttgtctaagatttggttgggaaattttctagcaaactctattgacctttctattagaatgattgttccttgatatatattgtgaccaaggaatcgaatttgagtttggaaaaaattgatttttgatttggagactgccaaaccattctgtttgatgatatggatgaaagtctggagatgtttgaaatgttggtcaatgttttgggaaaagattaaaacatcatctatgtagacaatgacaaattttgaatagggattaaaaatatcattcataattttttgaaattctgaaggggcattctttagtccgaatggcatcacattcgattcatattgcccgaaaggtacagtaaacgctgttttgtacctatctgattcttggatttggatttgccaaaatccagatttcatatcaaattttgaaaatatttttgcagaatttaatctgttaagtaaatcttttttgtttggaataggatacctaatccattgtaatgcttgattt

SEQ ID NO: 8232 - DNA, 1050 bp, Glycine max; identical to SEQ ID NO: 8231
  Gm_smallRNAprecursor_1065

SEQ ID NO: 8233 - DNA, 1047 bp, Glycine max
  Gm_smallRNAprecursor_1066
ttgaggtgcccttgatatattctatgtcataatcaaagacacttaaaattgcttgccatcttgcaaaaatttgttttgaggcaaggtttttaacatccttttgtaaaatatctttggctgacttgcaatcaaccctgattaaaaaattttgatttaataaatctgattgaaatttggaaatgcacaaaacaattgctaaaacttcttttttaacagttgaatattttaattgtgcagggttccaatattttgatttatatgcaatgacatgatcttgaccatgtactctttatttcaggatgccaccataacctttgtctgatgcatcagtttcgacaattttaaaggcctgaggaataggaagatacatgcattttatagattggactttgagtttgatctctttaactgtttcggtatggagatcagaccaaggaggcggatttttcttcagcctatcatgcaatggcttgaaaatattgtttaaataggggacaaattctcctacataatttagacaacctagaaatctttgtaactgggttttgtctaagatttggttgggaaattttctagcaaactctattgacctttctattagaatgattgttccttgatatatattgtgaccaaggaatcgaatttgagtttggaaaaaattgatttttgatttggagactgccaaaccattctgtttgatgatatggatgaaagtctggagatgtttgaaatgttggtcaatgttttgggaaaagattaaaacatcatctatgtagacaatgacaaattttgaatagggattaaaaatatcattcataattttttgaaattctgaaggggcattctttagtccgaatggcatcacattcgattcatattgcccgaaaggtacagtaaacgctgttttgtacctatctgattcttggatttggatttgccaaaatccagatttcatatcaaattttgaaaatatttttgcagaatttaatctgttaagtaaatcttttttgtttggaataggatacctaatccattgtaatgcttgat

SEQ ID NO: 8234 - DNA, 1048 bp, Glycine max
  Gm_smallRNAprecursor_1067
ttgaggtgcccttgatatattctatgtcataatcaaagacacttaaaattgcttgccatcttgcaaaaatttgttttgaggcaaggtttttaacatccttttgtaaaatatctttggctgacttgcaatcaaccctgattaaaaaattttgatttaataaatctgattgaaatttggaaatgcacaaaacaattgctaaaacttcttttttaacagttgaatattttaattgtgcagggttccaatattttgatttatatgcaatgacatgatcttgaccatgtactctttatttcaggatgccaccataacctttgtctgatgcatcagtttcgacaattttaaaggcctgaggaataggaagatacatgcattttatagattggactttgagtttgatctctttaactgtttcggtatggagatcagaccaaggaggcggatttttcttcagcctatcatgcaatggcttgaaaatattgtttaaataggggacaaattctcctacataatttagacaacctagaaatctttgtaactgggttttgtctaagatttggttgggaaattttctagcaaactctattgacctttctattagaatgattgttccttgatatatattgtgaccaaggaatcgaatttgagtttggaaaaaattgatttttgatttggagactgccaaaccattctgtttgatgatatggatgaaagtctggagatgtttgaaatgttggtcaatgttttgggaaaagattaaaacatcatctatgtagacaatgacaaattttgaatagggattaaaaatatcattcataattttttgaaattctgaaggggcattctttagtccgaatggcatcacattcgattcatattgcccgaaaggtacagtaaacgctgttttgtacctatctgattcttggatttggatttgccaaaatccagatttcatatcaaattttgaaaatatttttgcagaatttaatctgttaagtaaatcttttttgtttggaataggatacctaatccattgtaatgcttgatt

SEQ ID NO: 8235 - DNA, 1049 bp, Glycine max
  Gm_smallRNAprecursor_1068
ttgaggtgcccttgatatattctatgtcataatcaaagacacttaaaattgcttgccatcttgcaaaaatttgttttgaggcaaggtttttaacatccttttgtaaaatatctttggctgacttgcaatcaaccctgattaaaaaattttgatttaataaatctgattgaaatttggaaatgcacaaaacaattgctaaaacttcttttttaacagttgaatattttaattgtgcagggttccaatattttgatttatatgcaatgacatgatcttgaccatgtactctttatttcaggatgccaccataacctttgtctgatgcatcagtttcgacaattttaaaggcctgaggaataggaagatacatgcattttatagattggactttgagtttgatctctttaactgtttcggtatggagatcagaccaaggaggcggatttttcttcagcctatcatgcaatggcttgaaaatattgtttaaataggggacaaattctcctacataatttagacaacctagaaatctttgtaactgggttttgtctaagatttggttgggaaattttctagcaaactctattgacctttctattagaatgattgttccttgatatatattgtgaccaaggaatcgaatttgagtttggaaaaaattgatttttgatttggagactgccaaaccattctgtttgatgatatggatgaaagtctggagatgtttgaaatgttggtcaatgttttgggaaaagattaaaacatcatctatgtagacaatgacaaattttgaatagggattaaaaatatcattcataattttttgaaattctgaaggggcattctttagtccgaatggcatcacattcgattcatattgcccgaaaggtacagtaaacgctgttttgtacctatctgattcttggatttggatttgccaaaatccagatttcatatcaaattttgaaaatatttttgcagaatttaatctgttaagtaaatcttttttgtttggaataggatacctaatccattgtaatgcttgattt

SEQ ID NO: 8236 - DNA, 1232 bp, Glycine max
  Gm_smallRNAprecursor_1069
aattgcttgccatcttgcaaaaatttgttttgaggcaaggtttttaacatccttttgtaaaatatctttggctgacttgcaatcaaccctgattaaaaaattttgatttaataaatctgattgaaatttggaaatgcacaaaacaattgctaaaacttcttttttaacagttgaatattttaattgtgcagggttccaatattttgatttatatgcaatgacatgatcttgaccatgtactctttatttcaggatgccaccataacctttgtctgatgcatcagtttcgacaattttaaaggcctgaggaataggaagatacatgcattttatagattggactttgagtttgatctctttaactgtttcggtatggagatcagaccaaggaggcggatttttcttcagcctatcatgcaatggcttgaaaatattgtttaaataggggacaaattctcctacataatttagacaacctagaaatctttgtaactgggttttgtctaagatttggttgggaaattttctagcaaactctattgacctttctattagaatgattgttccttgatatatattgtgaccaaggaatcgaatttgagtttggaaaaaattgatttttgatttggagactgccaaaccattctgtttgatgatatggatgaaagtctggagatgtttgaaatgttggtcaatgttttgggaaaagattaaaacatcatctatgtagacaatgacaaattttgaatagggattaaaaatatcattcataattttttgaaattctgaaggggcattctttagtccgaatggcatcacattcgattcatattgcccgaaaggtacagtaaacgctgttttgtacctatctgattcttggatttggatttgccaaaatccagatttcatatcaaattttgaaaatatttttgcagaatttaatctgttaagtaaatcttttttgtttggaataggatacctaatccattgtaatgcttgatttagtggtttgtaatttatgactaagcggggtgtttcacgctcaagctcagattgtttattgacataaaaagccgcacaagaccatgggcttttgcttttccggattaggcctttatcaagcaaatccttgatttccttttggcattattgaaggagttcttcgttcatttgaattggtttgacttttgtgggaatttttttttccctaaagtctttctcagaagagagat

SEQ ID NO: 8237 - DNA, 1048 bp, Glycine max
  Gm_smallRNAprecursor_1070
aatatttttgcagaatttaatctgttaagtaaatcttttttgtttggaataggatacctaatccattgtaatgcttgatttagtggtttgtaatttatgactaagcggggtgtttcacgctcaagctcagattgtttattgacataaaaagccgcacaagaccatgggcttttgcttttccggattaggcctttatcaagcaaatccttgatttccttttggcattattgaaggagttcttcgttcatttgaattggtttgacttttgtgggaatttttttttccctaaagtctttctcagaagagagatcaacaatatatttctttctatcccaaaatgcatgtggcaaatcagaacagacagttgattcgatatgacttaataaagattgaattttttcttttacttggggatttcccagttgtatctgaatattattaaaagatacttctttttttaagaagttaatttggttaatattattttctataagatttatatttctggagattggtttagtagagaaattaaatataatttttcttcctaaataatttgtagttattcctttattggatatttgaattggaaacaaggctttaatgaagggagttcctaggatcactttgttcttaaggttttttaccagaagaaagtttgtgttaatcctaagaccttggttttcgatgattgcatttgataacttaaaattaatctttaattttgagccatttgttgaacttaatttttctgaggttttcttaaagaattttgtaggaattaatccttctaaaatatagtttgaatcagcccttgtgtcaaataggaccattgtatctaaaacaaaatcattaataattatttttaggtttatgtaaaaattttggattttaatcttgttgattaatcccataaacatatcatcttctagattatctggttggttttcttcactgttgttgacactttcataatcaatatcttcctcaagctgagaaagaatgatctgatgaatttcttgttgttgatgaagttctttcacttcct

SEQ ID NO: 8238 - DNA, 1051 bp, Glycine max
  Gm_smallRNAprecursor_1071
gagtcgcaaatattattaatgtctttgacataatttgaaaaaaaatgcagaacatgggcacttaagtatatttgcaagggttcaaatcatagtttacaactctttgctaataaaggttgacaaactcaggcaatgatcaactctttgccttgttcaaaaacacaatacatttgtcggtgtcatcgttggttgaggagacgtatttcaagaccgcacaactctttgctaataaaggttgacaaactcaggcaatgatcaactccgggtcatagtattctgaagtcatcttcgatgcaatgaatagcgttcaacaagaatctaatacacacattgtaaatgaattcaacagacacaatcacacttttattataatagagactcaatccccacttgaaacacccagaccacctaaaaggtttagagtaatgttacaatcccaaaagtgtgattgtggtgaatatcagactaaacatttaccatgttctcatgtcatggctgcctgtaaatctgtcaatgttgatcccatgacctatgtcccaatgttattcactttacaacacattttgcacatctacgacaactcctttggtttactaccacacgaatcaatgtggcaagaatatgaaggagataagtggggtcctgatccaaggagaaagaggactgcaaagggtcgtcccgtttcaactcgcattcccactgagatggacgaagatgaaaatgaacgagcaagtagaaaaaaatgtggactttgccggtaacatggtcatagtagaaacaattgtcctaatatatcttgatcttcaatttttctttagccaaatgtcattgtttaaatattttattgataatgcagtataatattcttttataaataaattgttaaaagttttagttttatcatttttaattaaatctaatgacataaacaaactaattatatttagtaaaataattaaatttaatatttaaaatttttctaaaataaatatattattatacaaaattcagattttaaatcaaatattcaaccaaaaatatctcaaataaa

SEQ ID NO: 8239 - DNA, 1052 bp, Glycine max
  Gm_smallRNAprecursor_1072
gagtcgcaaatattattaatgtctttgacataatttgaaaaaaaatgcagaacatgggcacttaagtatatttgcaagggttcaaatcatagtttacaactctttgctaataaaggttgacaaactcaggcaatgatcaactctttgccttgttcaaaaacacaatacatttgtcggtgtcatcgttggttgaggagacgtatttcaagaccgcacaactctttgctaataaaggttgacaaactcaggcaatgatcaactccgggtcatagtattctgaagtcatcttcgatgcaatgaatagcgttcaacaagaatctaatacacacattgtaaatgaattcaacagacacaatcacacttttattataatagagactcaatccccacttgaaacacccagaccacctaaaaggtttagagtaatgttacaatcccaaaagtgtgattgtggtgaatatcagactaaacatttaccatgttctcatgtcatggctgcctgtaaatctgtcaatgttgatcccatgacctatgtcccaatgttattcactttacaacacattttgcacatctacgacaactcctttggtttactaccacacgaatcaatgtggcaagaatatgaaggagataagtggggtcctgatccaaggagaaagaggactgcaaagggtcgtcccgtttcaactcgcattcccactgagatggacgaagatgaaaatgaacgagcaagtagaaaaaaatgtggactttgccggtaacatggtcatagtagaaacaattgtcctaatatatcttgatcttcaatttttctttagccaaatgtcattgtttaaatattttattgataatgcagtataatattcttttataaataaattgttaaaagttttagttttatcatttttaattaaatctaatgacataaacaaactaattatatttagtaaaataattaaatttaatatttaaaatttttctaaaataaatatattattatacaaaattcagattttaaatcaaatattcaaccaaaaatatctcaaataaat

SEQ ID NO: 8240 - DNA, 1036 bp, Glycine max
  Gm_smallRNAprecursor_1073
agaccacaagaaggtgaaattaaaggtagtgtggttaaattaagttggctgactcatcattttgcacaaataaataaccacgatgacgaagaacaagtatgaaggtttgcccgtgcatggatactgagattcattggaggtgtcttgttcgttgacaaaagcagtaacaaagtttcactaaggtaccttcaatttttacgtgattttggagactttagcacatatgcatggggacctgccgtacttgcttttctatacagagagatgtgcagtgccaccgattataaaactaaatcaatcagaggtatgtgcatcttactacaaatgtgggcatgggaacgatgtccaagcttggctccaaagaggactccttcccaagtagaaaataaaccactggggcacatgttaatcatttttaaaagcgtctttcatttcaaaagaataaatggttttaaggtatattaaattttaatctttgtaggtgactacgacgtggaaaccaacatatcggcaatgatgatgtgcgagtttttcgtcgcaagttggatattatgaaacgtcatgaggtaagaacatggtattgtatttgtaaaataaaaaatgatatgtgttattttactaaaatgctgacaactatgttgttatatgcagtttgtgtgggagccttacacaacaactgttatatcattgttgcctcccatttgtgtagttggaagtgtcgcgtggtgcgcggtggtgccactaatttgtttccaagttattgagtggcaccaaccagatagagtattgagacaatttgcaatgcaacaaccaatttcagagtctcattcacaacccttgaacattcatagcataacactaaaagggaaacatgacgaaaatggggggcaattgttcgccccaatgattgatcagtggaacaatctccatgcttttagggtcgacgcttatcccctacaagagggcctattgagctttaacgcggactacatggtctggtataggcgaaagacaaagatgtttgttgacccacaaa

SEQ ID NO: 8241 - DNA, 1197 bp, Glycine max
  Gm_smallRNAprecursor_1074
tatagatatatatatatatatatatatatatatatatatatatatatatatatatatatatatatatatatatcgtttgatcttattccgctgatctctggtatcagagcctgatggggaagtaggaatactatccgtaaggacatatgttaacaaattttatggatctgaaactaaaaccttgtatagtacaagtaatattttactttgatttgtacagtaaatgtttgaacagtacttcctggaagtacatcagtctaatattttagttgaatagtactatagcagtaagacccgtgatggataaagggcggtaaggctaaggtgtactgtttaaccaaaatatcaagacataatatactagtggctataggattgtcgtccaaactatttttcaaaaaaaaaaagagtttttcttaaaaataattcagatccagaaaaattttgtgacatatttacttacggagatatttctatggaaccaaatgagggcaaagatattagagaatattataatcatgtctagactattacgatctttttcccgtatctcttttcgctcaaactcctcctcatcatcttcttcaagaaactccaatttattaaatgatcaagataaccagacccaagaggtcgccccaaaacacaatctcttcgatgaggaagtccgattcgaagatatcaatcaaaacatggatgactggaacattccagaaatccctcaggatcaactatacgttcttgaaacaataaaggacaaacacaactttgattacataatcaaaacaatagaaaacaatattcctctaggacaagatataggggaagaatttcatttactttcaaaaaattcaatttatgaacatagccgtaagtataaatatctacacattggttgtgtacaagtagccatcaagcccttaattgatatgggcatagatgcagcagttttaatgtgtctaagagacattaggcataatcaatttgaagactccctaattggaatagtcgaaaccagtctgggacaaggtccaatatattttaactgttatccaaacaaaacagtgagtctgatggacagaaacattcttgactctctgttcttaaacatccactttcatggccttgacatgaaagaaggatcaatcccagcaaccttaatttataggatccagtacaaggtcatgaatacttatg

SEQ ID NO: 8242 - DNA, 1157 bp, Glycine max
  Gm_smallRNAprecursor_1075
atgttaacaaattttatggatctgaaactaaaaccttgtatagtacaagtaatattttactttgatttgtacagtaaatgtttgaacagtacttcctggaagtacatcagtctaatattttagttgaatagtactatagcagtaagacccgtgatggataaagggcggtaaggctaaggtgtactgtttaaccaaaatatcaagacataatatactagtggctataggattgtcgtccaaactatttttcaaaaaaaaaaagagtttttcttaaaaataattcagatccagaaaaattttgtgacatatttacttacggagatatttctatggaaccaaatgagggcaaagatattagagaatattataatcatgtctagactattacgatctttttcccgtatctcttttcgctcaaactcctcctcatcatcttcttcaagaaactccaatttattaaatgatcaagataaccagacccaagaggtcgccccaaaacacaatctcttcgatgaggaagtccgattcgaagatatcaatcaaaacatggatgactggaacattccagaaatccctcaggatcaactatacgttcttgaaacaataaaggacaaacacaactttgattacataatcaaaacaatagaaaacaatattcctctaggacaagatataggggaagaatttcatttactttcaaaaaattcaatttatgaacatagccgtaagtataaatatctacacattggttgtgtacaagtagccatcaagcccttaattgatatgggcatagatgcagcagttttaatgtgtctaagagacattaggcataatcaatttgaagactccctaattggaatagtcgaaaccagtctgggacaaggtccaatatattttaactgttatccaaacaaaacagtgagtctgatggacagaaacattcttgactctctgttcttaaacatccactttcatggccttgacatgaaagaaggatcaatcccagcaaccttaatttataggatccagtacaaggtcatgaatacttatgcatctagagtcctgttaaaacctcaaaaaggagaaacaaccttgtttatcactaatatgacaaaggctaacgtttctctcccgagaaaaataaaatgggatgaagt

SEQ ID NO: 8243 - DNA, 1033 bp, Glycine max
  Gm_smallRNAprecursor_1076
ggctaaggtgtactgtttaaccaaaatatcaagacataatatactagtggctataggattgtcgtccaaactatttttcaaaaaaaaaaagagtttttcttaaaaataattcagatccagaaaaattttgtgacatatttacttacggagatatttctatggaaccaaatgagggcaaagatattagagaatattataatcatgtctagactattacgatctttttcccgtatctcttttcgctcaaactcctcctcatcatcttcttcaagaaactccaatttattaaatgatcaagataaccagacccaagaggtcgccccaaaacacaatctcttcgatgaggaagtccgattcgaagatatcaatcaaaacatggatgactggaacattccagaaatccctcaggatcaactatacgttcttgaaacaataaaggacaaacacaactttgattacataatcaaaacaatagaaaacaatattcctctaggacaagatataggggaagaatttcatttactttcaaaaaattcaatttatgaacatagccgtaagtataaatatctacacattggttgtgtacaagtagccatcaagcccttaattgatatgggcatagatgcagcagttttaatgtgtctaagagacattaggcataatcaatttgaagactccctaattggaatagtcgaaaccagtctgggacaaggtccaatatattttaactgttatccaaacaaaacagtgagtctgatggacagaaacattcttgactctctgttcttaaacatccactttcatggccttgacatgaaagaaggatcaatcccagcaaccttaatttataggatccagtacaaggtcatgaatacttatgcatctagagtcctgttaaaacctcaaaaaggagaaacaaccttgtttatcactaatatgacaaaggctaacgtttctctcccgagaaaaataaaatgggatgaagtaactcttcctgaaagatgggttatggataaggccacaccgtctattc

SEQ ID NO: 8244 - DNA, 1047 bp, Glycine max
  Gm_smallRNAprecursor_1077
gacataatatactagtggctataggattgtcgtccaaactatttttcaaaaaaaaaaagagtttttcttaaaaataattcagatccagaaaaattttgtgacatatttacttacggagatatttctatggaaccaaatgagggcaaagatattagagaatattataatcatgtctagactattacgatctttttcccgtatctcttttcgctcaaactcctcctcatcatcttcttcaagaaactccaatttattaaatgatcaagataaccagacccaagaggtcgccccaaaacacaatctcttcgatgaggaagtccgattcgaagatatcaatcaaaacatggatgactggaacattccagaaatccctcaggatcaactatacgttcttgaaacaataaaggacaaacacaactttgattacataatcaaaacaatagaaaacaatattcctctaggacaagatataggggaagaatttcatttactttcaaaaaattcaatttatgaacatagccgtaagtataaatatctacacattggttgtgtacaagtagccatcaagcccttaattgatatgggcatagatgcagcagttttaatgtgtctaagagacattaggcataatcaatttgaagactccctaattggaatagtcgaaaccagtctgggacaaggtccaatatattttaactgttatccaaacaaaacagtgagtctgatggacagaaacattcttgactctctgttcttaaacatccactttcatggccttgacatgaaagaaggatcaatcccagcaaccttaatttataggatccagtacaaggtcatgaatacttatgcatctagagtcctgttaaaacctcaaaaaggagaaacaaccttgtttatcactaatatgacaaaggctaacgtttctctcccgagaaaaataaaatgggatgaagtaactcttcctgaaagatgggttatggataaggccacaccgtctattccccgacctgctccaaccatagagcatattaagcaagataactccgg

SEQ ID NO: 8245 - DNA, 1126 bp, Glycine max
  Gm_smallRNAprecursor_1078
aagattaacacaaactttcttctggtaaaaaaccttaagaatgaggtaatcttaggaacgcccttcattagagccctgtttcccatccaaatatctaatgaaggaataaccacaaattatttaggaagaaaaattatatttaatttttctactaaaccaatttccagaaatataaatcttatagaaaataagattaatcaaattaacttcttaaaagaagaagtatcttttagtaatattcaaatacaactgggaaaaccccaggtaaaagaaaaaattcaatctttattaaatcatattgaatcgaccgtctgttctgaattgccacatgcattttgggatagaaagaaacatattgttgatctcccttatgagaaagactttagggaaaaacaaattcccaccaaagccagaccaatccaaatgaatgaagaacttcttcaatattgtcaaaaagaaatcaaggatttgcttgataaaggcctaatccggaaaagcaaaagcccatggtcttgtgcggctttttatgtcaacaagcaatctgagattgagcgtggaataccccgcttggtcataaattacaaaccactaaatcaagcattacaatcgattagatatcatattccaaacaaaaaagatttgcttaacagattaaattctgcaaagatattttcaaaatttgatatgaaatctggattttggcaaatccaaatccaagaatcagataggtacaaaacagcgtttactgtacctttcgggcaatatgaatggaatgtgatgccattcggactgaagaatgccccttcagaatttcaaaaaattatgaatgatatttttaatcgctattcaaaatttgtcactgtctatatagatgatgttttaatcttttcccaaaacattgaccaacatttcaaacatctccaaaccttcatccatatcatcaaacaaaatggtttggcagtctccaaatcaaaaatcaatcttttccaaactcgaattcgattccttggtcacaatatttatcaaggtacaatcattccaatcgaaaagtcaatagagtttgctagcaaatttcccaaccaaatcttagacaaaacccaattacaaagatttctaggttgtctaa

SEQ ID NO: 8246 - DNA, 1036 bp, Glycine max
  Gm_smallRNAprecursor_1079
agaccacaagaaggtgaaattaaaggtagtgtgattaaattaagttggctggctcaccattttgatcaaataaataatgatgacgacgaagaacaagtacgaaggtttgcccgtgcatggatactgagatttattggaggtgtcttgttcgttgacaaaaccagtaacagagtttcggtaaggtaccttcaatttttacgtgactttgaagaatgtggcagatatgcatggggagctgccgtacttggttttctatatagagagatgtgcagtgccaccgattataaaactaaatcaatcggaggtatgtgcatcttactacaattgtgggcatgggaacgatgtccaaccttggctccaaagaggactccttcccaaatagaaaatacaccactagggcacaagtgagtcatttttaacagcgtctttcatttcaatagaataaatggttttagggtatattaaattttattctttgtaggtggctgcgacgtggaaatcaacatatcggcaatgatgatgtgaaagtttttcgtcgcaagttggatattatgaaacgtcatgaggtaagaagcatgctattgtatttgtaaaataaaaaattatgtcttattttactacaatgttcatgtaacatatgttgttatatgcagtttgtgtgggagccttacccatcaaccgttatatcattgttgcctcccgtttgtttagtcggaagtatcgcgtggtacgcggtggtgccactaatttgttttcaagttattgagtggcaccaaccagacagagtcttgagacaattcgggatgcagcaaccagttccagagtctccttcacaacccctaaacattcatggcataacattaaaggggaaacatgacgaaaattgggggcaattattcgccccaatgattcaacagtggaataatcgacatgcatttagggtcgacgcttatccccgacaagaaggcctattgagttttaactcggactacatggtctggtataggcgaaagacaaagatgtttgttgacccaga

SEQ ID NO: 8247 - DNA, 1079 bp, Glycine max
  Gm_smallRNAprecursor_1080
acagattcaattaatcaggcaagctaacattccagtagaagccttacctaatgacattgccaacaagatataacaagaagcctaatatttcaaaaggccttttggtccttaaaaactaaggaatgcatctccagaaagaagtacaatcataatagttgctaagaatgcagcaaaattgataaattaatcgagaaaccacaccacaaatcacacatggccattagagaaaaagaaaggtttcaggaaaataaaagaaaagaaaaagtcaattactgcttagctacctctctatattcccatgtgccccttgcttgaaattggaaccactaccaggcaacagagttgttccctttcaagcaataagagttagaaatatttttatatcaaccgaagtggcaaaaagtcagaaaccatgacatacgtttactttgttagtcccacattggatagttttagtaaaacacaggtcattatatagctaaacgctaacatctatggtcacgaccttacttgaacaggatctgttctataggcttgtacctctgtatccttgagttctaaggagacaggaacctacgtctggtggatgaatcatgaccgtgtgatcagagcgtgattaacggcccgggtgagtttctctttggagtagtctcatctttggctgtagaggatcgttcttaggacacttccatgtgcctgggaatggtcatacggttgtctgacagacctaaattttttttccccaccattctacaatttgtgcacatttgcatggaagctagtttgtgtttaaggaagggtctcttcccttccccaaagataagtttaatatatttttgggtaaataaatatgttggaaaaaaaaactcaatactcttttttatttggcttttgagtaaaattgttaaacatttaactttctttccggttaagacactaatgcaacggaacactcttagttttattattattttatattcatcattggagtcaaattgagttatcaagaattttacaacttacatgcacatggtttaatggactgaaattgattagactattgcaatcacttttaatca

SEQ ID NO: 8248 - DNA, 1080 bp, Glycine max
  Gm_smallRNAprecursor_1081
acagattcaattaatcaggcaagctaacattccagtagaagccttacctaatgacattgccaacaagatataacaagaagcctaatatttcaaaaggccttttggtccttaaaaactaaggaatgcatctccagaaagaagtacaatcataatagttgctaagaatgcagcaaaattgataaattaatcgagaaaccacaccacaaatcacacatggccattagagaaaaagaaaggtttcaggaaaataaaagaaaagaaaaagtcaattactgcttagctacctctctatattcccatgtgccccttgcttgaaattggaaccactaccaggcaacagagttgttccctttcaagcaataagagttagaaatatttttatatcaaccgaagtggcaaaaagtcagaaaccatgacatacgtttactttgttagtcccacattggatagttttagtaaaacacaggtcattatatagctaaacgctaacatctatggtcacgaccttacttgaacaggatctgttctataggcttgtacctctgtatccttgagttctaaggagacaggaacctacgtctggtggatgaatcatgaccgtgtgatcagagcgtgattaacggcccgggtgagtttctctttggagtagtctcatctttggctgtagaggatcgttcttaggacacttccatgtgcctgggaatggtcatacggttgtctgacagacctaaattttttttccccaccattctacaatttgtgcacatttgcatggaagctagtttgtgtttaaggaagggtctcttcccttccccaaagataagtttaatatatttttgggtaaataaatatgttggaaaaaaaaactcaatactcttttttatttggcttttgagtaaaattgttaaacatttaactttctttccggttaagacactaatgcaacggaacactcttagttttattattattttatattcatcattggagtcaaattgagttatcaagaattttacaacttacatgcacatggtttaatggactgaaattgattagactattgcaatcacttttaatcat

SEQ ID NO: 8249 - DNA, 1183 bp, Glycine max
  Gm_smallRNAprecursor_1082
gagagaaacgtacaacggtacaagccttcccccaaaaggttattgaacatttgtataccatactatatatatatatataaatgttatgtaaccatttgataacaacatcccactggagtgtaaaaaccaaccgaaaaacaacaggataaaagataaatgaccacatgtttcattaatgatgcaaactagggtggtagtataaaaatttgtgtatgatgtataattttttaaatcattggattaatcttactcaaaatttacatggtgcatctcccgcaccataccttctcatttctctctcacttttcctccataaaaaaacccattttcctccattggtacactttcacttacctacttggatgtctgcacattttccgcatctattaattgttggggtgatccaacattttattaaaataccaaaattacctctatgcttttttcgcatttgttatgggtgtgtgtgagggtgatccataaatcattcggatcaagttgatccgtaaggttgatacggatcaacttgatccgtaaaccttttacggaacaatacgaatcaatttaatccgtagaagtcttacagatcaacttgatccataaaaagcttacggatcaagttgatccgtaagacttctacagatcaagttgatccgtaaaaatattatggatcaagttgattcgtaagacttttacggatcaacttaaataggttacggatcaaggatattttcgtcatttcaccttaagtgatgggtgcaccaataataatgctgggtgcatctagcaacaccctaattgttgtttgctccccctcgtgtccaaaaacacgtttgccttcttattagccccactgagaaatggcccaaatctttgctacacataactgccacctcacaactcgtttttggtgtgggctttagtcatatctggagaacggcccaaaataacctcagctctcccactagttacgaaacagatattgagcaagatgtatagatggcaaaattgatgtacaaagcctacgtattaacagcaataagagcattggatacatcaataattactcaaatctgcttattaaaaaacattattactcaaatctgactataaattagcctacactgattctggacgaatgttaaaaataaaattgacatttaattaaagatataataataca

SEQ ID NO: 8250 - DNA, 1106 bp, Glycine max
  Gm_smallRNAprecursor_1083
tggaggacatcatattgaatcaagtcaatatcaattttatcatactcagtgatcactctctttttggtcatttttcctctctaatttataaaatatccttgctggatagatgcgcaaatgaagttgcattagatttcaatctgaagtttctgattctattcctatatatgtagtaacttcgtggagaatatttctttaaattaacaagaaggtagccaatagattaagtcaagcaaaatgttgggtgaaaggcaatggataacagcttggttaaaaagtggacaaatatagaagctgatatggctttcttttgtgtgtagccatattatttctcttaactgtgagaaaatgtataatgtaaacgtatttttaatgttcaacaggataggatggtaggtgcaaagctaatagcatcactcatggccagcgaagatatgattttggaaaacatatcagttggactattacaagcaaggtctgtactctcaacctatgaagcaccgacaccgacacggacaccggacacgacacgacacggacacgtggatacctgtaatgtccaaaatatagaacgtaatacgggtgtcgtgtcggtgtccgacaccgacacggacgcgtgtcggacaccggacacggcaaagggctgaagtgtccgtgcttcatagctctcaaccatatcctcgtcagatcctttacctgagttacaacagctatgccgcaagttgctagcatgcatatcttctccgtgagctgcgacaaactttttttcaagtatattagaaaagatctcatttagttgttgtatcactcttctcccctttttatttatttgttcagtgtacatagcatagttaacttttgtatgcgcagataatatgtttttgaaataggcttcattgcatacttgaatattcatcataggaagtatatattcccatgatcatgttgtatacaatagctgttaataccagtttaatatcaaattcagggatatatgcttatgcacacatgcatactgtttttttttttttggtacagattatattatttcttctatatcatgtattattgtcctgttgctcctttttgaaaatgaaacatcatgc

SEQ ID NO: 8251 - DNA, 1111 bp, Glycine max
  Gm_smallRNAprecursor_1084
tggaggacatcatattgaatcaagtcaatatcaattttatcatactcagtgatcactctctttttggtcatttttcctctctaatttataaaatatccttgctggatagatgcgcaaatgaagttgcattagatttcaatctgaagtttctgattctattcctatatatgtagtaacttcgtggagaatatttctttaaattaacaagaaggtagccaatagattaagtcaagcaaaatgttgggtgaaaggcaatggataacagcttggttaaaaagtggacaaatatagaagctgatatggctttcttttgtgtgtagccatattatttctcttaactgtgagaaaatgtataatgtaaacgtatttttaatgttcaacaggataggatggtaggtgcaaagctaatagcatcactcatggccagcgaagatatgattttggaaaacatatcagttggactattacaagcaaggtctgtactctcaacctatgaagcaccgacaccgacacggacaccggacacgacacgacacggacacgtggatacctgtaatgtccaaaatatagaacgtaatacgggtgtcgtgtcggtgtccgacaccgacacggacgcgtgtcggacaccggacacggcaaagggctgaagtgtccgtgcttcatagctctcaaccatatcctcgtcagatcctttacctgagttacaacagctatgccgcaagttgctagcatgcatatcttctccgtgagctgcgacaaactttttttcaagtatattagaaaagatctcatttagttgttgtatcactcttctcccctttttatttatttgttcagtgtacatagcatagttaacttttgtatgcgcagataatatgtttttgaaataggcttcattgcatacttgaatattcatcataggaagtatatattcccatgatcatgttgtatacaatagctgttaataccagtttaatatcaaattcagggatatatgcttatgcacacatgcatactgtttttttttttttggtacagattatattatttcttctatatcatgtattattgtcctgttgctcctttttgaaaatgaaacatcatgcaagag

SEQ ID NO: 8252 - DNA, 1112 bp, Glycine max
  Gm_smallRNAprecursor_1085
tggaggacatcatattgaatcaagtcaatatcaattttatcatactcagtgatcactctctttttggtcatttttcctctctaatttataaaatatccttgctggatagatgcgcaaatgaagttgcattagatttcaatctgaagtttctgattctattcctatatatgtagtaacttcgtggagaatatttctttaaattaacaagaaggtagccaatagattaagtcaagcaaaatgttgggtgaaaggcaatggataacagcttggttaaaaagtggacaaatatagaagctgatatggctttcttttgtgtgtagccatattatttctcttaactgtgagaaaatgtataatgtaaacgtatttttaatgttcaacaggataggatggtaggtgcaaagctaatagcatcactcatggccagcgaagatatgattttggaaaacatatcagttggactattacaagcaaggtctgtactctcaacctatgaagcaccgacaccgacacggacaccggacacgacacgacacggacacgtggatacctgtaatgtccaaaatatagaacgtaatacgggtgtcgtgtcggtgtccgacaccgacacggacgcgtgtcggacaccggacacggcaaagggctgaagtgtccgtgcttcatagctctcaaccatatcctcgtcagatcctttacctgagttacaacagctatgccgcaagttgctagcatgcatatcttctccgtgagctgcgacaaactttttttcaagtatattagaaaagatctcatttagttgttgtatcactcttctcccctttttatttatttgttcagtgtacatagcatagttaacttttgtatgcgcagataatatgtttttgaaataggcttcattgcatacttgaatattcatcataggaagtatatattcccatgatcatgttgtatacaatagctgttaataccagtttaatatcaaattcagggatatatgcttatgcacacatgcatactgtttttttttttttggtacagattatattatttcttctatatcatgtattattgtcctgttgctcctttttgaaaatgaaacatcatgcaagagt

SEQ ID NO: 8253 - DNA, 1112 bp, Glycine max; identical to SEQ ID NO: 8252
  Gm_smallRNAprecursor_1086

SEQ ID NO: 8254 - DNA, 1117 bp, Glycine max
  Gm_smallRNAprecursor_1087
tggaggacatcatattgaatcaagtcaatatcaattttatcatactcagtgatcactctctttttggtcatttttcctctctaatttataaaatatccttgctggatagatgcgcaaatgaagttgcattagatttcaatctgaagtttctgattctattcctatatatgtagtaacttcgtggagaatatttctttaaattaacaagaaggtagccaatagattaagtcaagcaaaatgttgggtgaaaggcaatggataacagcttggttaaaaagtggacaaatatagaagctgatatggctttcttttgtgtgtagccatattatttctcttaactgtgagaaaatgtataatgtaaacgtatttttaatgttcaacaggataggatggtaggtgcaaagctaatagcatcactcatggccagcgaagatatgattttggaaaacatatcagttggactattacaagcaaggtctgtactctcaacctatgaagcaccgacaccgacacggacaccggacacgacacgacacggacacgtggatacctgtaatgtccaaaatatagaacgtaatacgggtgtcgtgtcggtgtccgacaccgacacggacgcgtgtcggacaccggacacggcaaagggctgaagtgtccgtgcttcatagctctcaaccatatcctcgtcagatcctttacctgagttacaacagctatgccgcaagttgctagcatgcatatcttctccgtgagctgcgacaaactttttttcaagtatattagaaaagatctcatttagttgttgtatcactcttctcccctttttatttatttgttcagtgtacatagcatagttaacttttgtatgcgcagataatatgtttttgaaataggcttcattgcatacttgaatattcatcataggaagtatatattcccatgatcatgttgtatacaatagctgttaataccagtttaatatcaaattcagggatatatgcttatgcacacatgcatactgtttttttttttttggtacagattatattatttcttctatatcatgtattattgtcctgttgctcctttttgaaaatgaaacatcatgcaagagttcaac

SEQ ID NO: 8255 - DNA, 1118 bp, Glycine max
  Gm_smallRNAprecursor_1088
tggaggacatcatattgaatcaagtcaatatcaattttatcatactcagtgatcactctctttttggtcatttttcctctctaatttataaaatatccttgctggatagatgcgcaaatgaagttgcattagatttcaatctgaagtttctgattctattcctatatatgtagtaacttcgtggagaatatttctttaaattaacaagaaggtagccaatagattaagtcaagcaaaatgttgggtgaaaggcaatggataacagcttggttaaaaagtggacaaatatagaagctgatatggctttcttttgtgtgtagccatattatttctcttaactgtgagaaaatgtataatgtaaacgtatttttaatgttcaacaggataggatggtaggtgcaaagctaatagcatcactcatggccagcgaagatatgattttggaaaacatatcagttggactattacaagcaaggtctgtactctcaacctatgaagcaccgacaccgacacggacaccggacacgacacgacacggacacgtggatacctgtaatgtccaaaatatagaacgtaatacgggtgtcgtgtcggtgtccgacaccgacacggacgcgtgtcggacaccggacacggcaaagggctgaagtgtccgtgcttcatagctctcaaccatatcctcgtcagatcctttacctgagttacaacagctatgccgcaagttgctagcatgcatatcttctccgtgagctgcgacaaactttttttcaagtatattagaaaagatctcatttagttgttgtatcactcttctcccctttttatttatttgttcagtgtacatagcatagttaacttttgtatgcgcagataatatgtttttgaaataggcttcattgcatacttgaatattcatcataggaagtatatattcccatgatcatgttgtatacaatagctgttaataccagtttaatatcaaattcagggatatatgcttatgcacacatgcatactgtttttttttttttggtacagattatattatttcttctatatcatgtattattgtcctgttgctcctttttgaaaatgaaacatcatgcaagagttcaact

SEQ ID NO: 8256 - DNA, 1118 bp, Glycine max; identical to SEQ ID NO: 8255
  Gm_smallRNAprecursor_1089

SEQ ID NO: 8257 - DNA, 1119 bp, Glycine max
  Gm_smallRNAprecursor_1090
tggaggacatcatattgaatcaagtcaatatcaattttatcatactcagtgatcactctctttttggtcatttttcctctctaatttataaaatatccttgctggatagatgcgcaaatgaagttgcattagatttcaatctgaagtttctgattctattcctatatatgtagtaacttcgtggagaatatttctttaaattaacaagaaggtagccaatagattaagtcaagcaaaatgttgggtgaaaggcaatggataacagcttggttaaaaagtggacaaatatagaagctgatatggctttcttttgtgtgtagccatattatttctcttaactgtgagaaaatgtataatgtaaacgtatttttaatgttcaacaggataggatggtaggtgcaaagctaatagcatcactcatggccagcgaagatatgattttggaaaacatatcagttggactattacaagcaaggtctgtactctcaacctatgaagcaccgacaccgacacggacaccggacacgacacgacacggacacgtggatacctgtaatgtccaaaatatagaacgtaatacgggtgtcgtgtcggtgtccgacaccgacacggacgcgtgtcggacaccggacacggcaaagggctgaagtgtccgtgcttcatagctctcaaccatatcctcgtcagatcctttacctgagttacaacagctatgccgcaagttgctagcatgcatatcttctccgtgagctgcgacaaactttttttcaagtatattagaaaagatctcatttagttgttgtatcactcttctcccctttttatttatttgttcagtgtacatagcatagttaacttttgtatgcgcagataatatgtttttgaaataggcttcattgcatacttgaatattcatcataggaagtatatattcccatgatcatgttgtatacaatagctgttaataccagtttaatatcaaattcagggatatatgcttatgcacacatgcatactgtttttttttttttggtacagattatattatttcttctatatcatgtattattgtcctgttgctcctttttgaaaatgaaacatcatgcaagagttcaactt

SEQ ID NO: 8258 - DNA, 1116 bp, Glycine max
  Gm_smallRNAprecursor_1091
ggaggacatcatattgaatcaagtcaatatcaattttatcatactcagtgatcactctctttttggtcatttttcctctctaatttataaaatatccttgctggatagatgcgcaaatgaagttgcattagatttcaatctgaagtttctgattctattcctatatatgtagtaacttcgtggagaatatttctttaaattaacaagaaggtagccaatagattaagtcaagcaaaatgttgggtgaaaggcaatggataacagcttggttaaaaagtggacaaatatagaagctgatatggctttcttttgtgtgtagccatattatttctcttaactgtgagaaaatgtataatgtaaacgtatttttaatgttcaacaggataggatggtaggtgcaaagctaatagcatcactcatggccagcgaagatatgattttggaaaacatatcagttggactattacaagcaaggtctgtactctcaacctatgaagcaccgacaccgacacggacaccggacacgacacgacacggacacgtggatacctgtaatgtccaaaatatagaacgtaatacgggtgtcgtgtcggtgtccgacaccgacacggacgcgtgtcggacaccggacacggcaaagggctgaagtgtccgtgcttcatagctctcaaccatatcctcgtcagatcctttacctgagttacaacagctatgccgcaagttgctagcatgcatatcttctccgtgagctgcgacaaactttttttcaagtatattagaaaagatctcatttagttgttgtatcactcttctcccctttttatttatttgttcagtgtacatagcatagttaacttttgtatgcgcagataatatgtttttgaaataggcttcattgcatacttgaatattcatcataggaagtatatattcccatgatcatgttgtatacaatagctgttaataccagtttaatatcaaattcagggatatatgcttatgcacacatgcatactgtttttttttttttggtacagattatattatttcttctatatcatgtattattgtcctgttgctcctttttgaaaatgaaacatcatgcaagagttcaac

SEQ ID NO: 8259 - DNA, 1116 bp, Glycine max; identical to SEQ ID NO: 8258
  Gm_smallRNAprecursor_1092

SEQ ID NO: 8260 - DNA, 1117 bp, Glycine max
  Gm_smallRNAprecursor_1093
ggaggacatcatattgaatcaagtcaatatcaattttatcatactcagtgatcactctctttttggtcatttttcctctctaatttataaaatatccttgctggatagatgcgcaaatgaagttgcattagatttcaatctgaagtttctgattctattcctatatatgtagtaacttcgtggagaatatttctttaaattaacaagaaggtagccaatagattaagtcaagcaaaatgttgggtgaaaggcaatggataacagcttggttaaaaagtggacaaatatagaagctgatatggctttcttttgtgtgtagccatattatttctcttaactgtgagaaaatgtataatgtaaacgtatttttaatgttcaacaggataggatggtaggtgcaaagctaatagcatcactcatggccagcgaagatatgattttggaaaacatatcagttggactattacaagcaaggtctgtactctcaacctatgaagcaccgacaccgacacggacaccggacacgacacgacacggacacgtggatacctgtaatgtccaaaatatagaacgtaatacgggtgtcgtgtcggtgtccgacaccgacacggacgcgtgtcggacaccggacacggcaaagggctgaagtgtccgtgcttcatagctctcaaccatatcctcgtcagatcctttacctgagttacaacagctatgccgcaagttgctagcatgcatatcttctccgtgagctgcgacaaactttttttcaagtatattagaaaagatctcatttagttgttgtatcactcttctcccctttttatttatttgttcagtgtacatagcatagttaacttttgtatgcgcagataatatgtttttgaaataggcttcattgcatacttgaatattcatcataggaagtatatattcccatgatcatgttgtatacaatagctgttaataccagtttaatatcaaattcagggatatatgcttatgcacacatgcatactgtttttttttttttggtacagattatattatttcttctatatcatgtattattgtcctgttgctcctttttgaaaatgaaacatcatgcaagagttcaact

SEQ ID NO: 8261 - DNA, 1100 bp, Glycine max
  Gm_smallRNAprecursor_1094
acatcatattgaatcaagtcaatatcaattttatcatactcagtgatcactctctttttggtcatttttcctctctaatttataaaatatccttgctggatagatgcgcaaatgaagttgcattagatttcaatctgaagtttctgattctattcctatatatgtagtaacttcgtggagaatatttctttaaattaacaagaaggtagccaatagattaagtcaagcaaaatgttgggtgaaaggcaatggataacagcttggttaaaaagtggacaaatatagaagctgatatggctttcttttgtgtgtagccatattatttctcttaactgtgagaaaatgtataatgtaaacgtatttttaatgttcaacaggataggatggtaggtgcaaagctaatagcatcactcatggccagcgaagatatgattttggaaaacatatcagttggactattacaagcaaggtctgtactctcaacctatgaagcaccgacaccgacacggacaccggacacgacacgacacggacacgtggatacctgtaatgtccaaaatatagaacgtaatacgggtgtcgtgtcggtgtccgacaccgacacggacgcgtgtcggacaccggacacggcaaagggctgaagtgtccgtgcttcatagctctcaaccatatcctcgtcagatcctttacctgagttacaacagctatgccgcaagttgctagcatgcatatcttctccgtgagctgcgacaaactttttttcaagtatattagaaaagatctcatttagttgttgtatcactcttctcccctttttatttatttgttcagtgtacatagcatagttaacttttgtatgcgcagataatatgtttttgaaataggcttcattgcatacttgaatattcatcataggaagtatatattcccatgatcatgttgtatacaatagctgttaataccagtttaatatcaaattcagggatatatgcttatgcacacatgcatactgtttttttttttttggtacagattatattatttcttctatatcatgtattattgtcctgttgctcctttttgaaaatgaaacatcatgc

SEQ ID NO: 8262 - DNA, 1100 bp, Glycine max; identical to SEQ ID NO: 8261
  Gm_smallRNAprecursor_1095

SEQ ID NO: 8263 - DNA, 1111 bp, Glycine max
  Gm_smallRNAprecursor_1096
acatcatattgaatcaagtcaatatcaattttatcatactcagtgatcactctctttttggtcatttttcctctctaatttataaaatatccttgctggatagatgcgcaaatgaagttgcattagatttcaatctgaagtttctgattctattcctatatatgtagtaacttcgtggagaatatttctttaaattaacaagaaggtagccaatagattaagtcaagcaaaatgttgggtgaaaggcaatggataacagcttggttaaaaagtggacaaatatagaagctgatatggctttcttttgtgtgtagccatattatttctcttaactgtgagaaaatgtataatgtaaacgtatttttaatgttcaacaggataggatggtaggtgcaaagctaatagcatcactcatggccagcgaagatatgattttggaaaacatatcagttggactattacaagcaaggtctgtactctcaacctatgaagcaccgacaccgacacggacaccggacacgacacgacacggacacgtggatacctgtaatgtccaaaatatagaacgtaatacgggtgtcgtgtcggtgtccgacaccgacacggacgcgtgtcggacaccggacacggcaaagggctgaagtgtccgtgcttcatagctctcaaccatatcctcgtcagatcctttacctgagttacaacagctatgccgcaagttgctagcatgcatatcttctccgtgagctgcgacaaactttttttcaagtatattagaaaagatctcatttagttgttgtatcactcttctcccctttttatttatttgttcagtgtacatagcatagttaacttttgtatgcgcagataatatgtttttgaaataggcttcattgcatacttgaatattcatcataggaagtatatattcccatgatcatgttgtatacaatagctgttaataccagtttaatatcaaattcagggatatatgcttatgcacacatgcatactgtttttttttttttggtacagattatattatttcttctatatcatgtattattgtcctgttgctcctttttgaaaatgaaacatcatgcaagagttcaac

SEQ ID NO: 8264 - DNA, 1111 bp, Glycine max; identical to SEQ ID NO: 8263
  Gm_smallRNAprecursor_1097

SEQ ID NO: 8265 - DNA, 1112 bp, Glycine max
  Gm_smallRNAprecursor_1098
acatcatattgaatcaagtcaatatcaattttatcatactcagtgatcactctctttttggtcatttttcctctctaatttataaaatatccttgctggatagatgcgcaaatgaagttgcattagatttcaatctgaagtttctgattctattcctatatatgtagtaacttcgtggagaatatttctttaaattaacaagaaggtagccaatagattaagtcaagcaaaatgttgggtgaaaggcaatggataacagcttggttaaaaagtggacaaatatagaagctgatatggctttcttttgtgtgtagccatattatttctcttaactgtgagaaaatgtataatgtaaacgtatttttaatgttcaacaggataggatggtaggtgcaaagctaatagcatcactcatggccagcgaagatatgattttggaaaacatatcagttggactattacaagcaaggtctgtactctcaacctatgaagcaccgacaccgacacggacaccggacacgacacgacacggacacgtggatacctgtaatgtccaaaatatagaacgtaatacgggtgtcgtgtcggtgtccgacaccgacacggacgcgtgtcggacaccggacacggcaaagggctgaagtgtccgtgcttcatagctctcaaccatatcctcgtcagatcctttacctgagttacaacagctatgccgcaagttgctagcatgcatatcttctccgtgagctgcgacaaactttttttcaagtatattagaaaagatctcatttagttgttgtatcactcttctcccctttttatttatttgttcagtgtacatagcatagttaacttttgtatgcgcagataatatgtttttgaaataggcttcattgcatacttgaatattcatcataggaagtatatattcccatgatcatgttgtatacaatagctgttaataccagtttaatatcaaattcagggatatatgcttatgcacacatgcatactgtttttttttttttggtacagattatattatttcttctatatcatgtattattgtcctgttgctcctttttgaaaatgaaacatcatgcaagagttcaact

SEQ ID NO: 8266 - DNA, 1112 bp, Glycine max; identical to SEQ ID NO: 8265
  Gm_smallRNAprecursor_1099

SEQ ID NO: 8267 - DNA, 1112 bp, Glycine max; identical to SEQ ID NO: 8265
  Gm_smallRNAprecursor_1100

SEQ ID NO: 8268 - DNA, 1112 bp, Glycine max; identical to SEQ ID NO: 8265
  Gm_smallRNAprecursor_1101

SEQ ID NO: 8269 - DNA, 1113 bp, Glycine max
  Gm_smallRNAprecursor_1102
acatcatattgaatcaagtcaatatcaattttatcatactcagtgatcactctctttttggtcatttttcctctctaatttataaaatatccttgctggatagatgcgcaaatgaagttgcattagatttcaatctgaagtttctgattctattcctatatatgtagtaacttcgtggagaatatttctttaaattaacaagaaggtagccaatagattaagtcaagcaaaatgttgggtgaaaggcaatggataacagcttggttaaaaagtggacaaatatagaagctgatatggctttcttttgtgtgtagccatattatttctcttaactgtgagaaaatgtataatgtaaacgtatttttaatgttcaacaggataggatggtaggtgcaaagctaatagcatcactcatggccagcgaagatatgattttggaaaacatatcagttggactattacaagcaaggtctgtactctcaacctatgaagcaccgacaccgacacggacaccggacacgacacgacacggacacgtggatacctgtaatgtccaaaatatagaacgtaatacgggtgtcgtgtcggtgtccgacaccgacacggacgcgtgtcggacaccggacacggcaaagggctgaagtgtccgtgcttcatagctctcaaccatatcctcgtcagatcctttacctgagttacaacagctatgccgcaagttgctagcatgcatatcttctccgtgagctgcgacaaactttttttcaagtatattagaaaagatctcatttagttgttgtatcactcttctcccctttttatttatttgttcagtgtacatagcatagttaacttttgtatgcgcagataatatgtttttgaaataggcttcattgcatacttgaatattcatcataggaagtatatattcccatgatcatgttgtatacaatagctgttaataccagtttaatatcaaattcagggatatatgcttatgcacacatgcatactgtttttttttttttggtacagattatattatttcttctatatcatgtattattgtcctgttgctcctttttgaaaatgaaacatcatgcaagagttcaactt

SEQ ID NO: 8270 - DNA, 1113 bp, Glycine max; identical to SEQ ID NO: 8269
  Gm_smallRNAprecursor_1103

SEQ ID NO: 8271 - DNA, 1114 bp, Glycine max
  Gm_smallRNAprecursor_1104
acatcatattgaatcaagtcaatatcaattttatcatactcagtgatcactctctttttggtcatttttcctctctaatttataaaatatccttgctggatagatgcgcaaatgaagttgcattagatttcaatctgaagtttctgattctattcctatatatgtagtaacttcgtggagaatatttctttaaattaacaagaaggtagccaatagattaagtcaagcaaaatgttgggtgaaaggcaatggataacagcttggttaaaaagtggacaaatatagaagctgatatggctttcttttgtgtgtagccatattatttctcttaactgtgagaaaatgtataatgtaaacgtatttttaatgttcaacaggataggatggtaggtgcaaagctaatagcatcactcatggccagcgaagatatgattttggaaaacatatcagttggactattacaagcaaggtctgtactctcaacctatgaagcaccgacaccgacacggacaccggacacgacacgacacggacacgtggatacctgtaatgtccaaaatatagaacgtaatacgggtgtcgtgtcggtgtccgacaccgacacggacgcgtgtcggacaccggacacggcaaagggctgaagtgtccgtgcttcatagctctcaaccatatcctcgtcagatcctttacctgagttacaacagctatgccgcaagttgctagcatgcatatcttctccgtgagctgcgacaaactttttttcaagtatattagaaaagatctcatttagttgttgtatcactcttctcccctttttatttatttgttcagtgtacatagcatagttaacttttgtatgcgcagataatatgtttttgaaataggcttcattgcatacttgaatattcatcataggaagtatatattcccatgatcatgttgtatacaatagctgttaataccagtttaatatcaaattcagggatatatgcttatgcacacatgcatactgtttttttttttttggtacagattatattatttcttctatatcatgtattattgtcctgttgctcctttttgaaaatgaaacatcatgcaagagttcaacttg

SEQ ID NO: 8272 - DNA, 1114 bp, Glycine max; identical to SEQ ID NO: 8271
  Gm_smallRNAprecursor_1105

SEQ ID NO: 8273 - DNA, 1115 bp, Glycine max
  Gm_smallRNAprecursor_1106
acatcatattgaatcaagtcaatatcaattttatcatactcagtgatcactctctttttggtcatttttcctctctaatttataaaatatccttgctggatagatgcgcaaatgaagttgcattagatttcaatctgaagtttctgattctattcctatatatgtagtaacttcgtggagaatatttctttaaattaacaagaaggtagccaatagattaagtcaagcaaaatgttgggtgaaaggcaatggataacagcttggttaaaaagtggacaaatatagaagctgatatggctttcttttgtgtgtagccatattatttctcttaactgtgagaaaatgtataatgtaaacgtatttttaatgttcaacaggataggatggtaggtgcaaagctaatagcatcactcatggccagcgaagatatgattttggaaaacatatcagttggactattacaagcaaggtctgtactctcaacctatgaagcaccgacaccgacacggacaccggacacgacacgacacggacacgtggatacctgtaatgtccaaaatatagaacgtaatacgggtgtcgtgtcggtgtccgacaccgacacggacgcgtgtcggacaccggacacggcaaagggctgaagtgtccgtgcttcatagctctcaaccatatcctcgtcagatcctttacctgagttacaacagctatgccgcaagttgctagcatgcatatcttctccgtgagctgcgacaaactttttttcaagtatattagaaaagatctcatttagttgttgtatcactcttctcccctttttatttatttgttcagtgtacatagcatagttaacttttgtatgcgcagataatatgtttttgaaataggcttcattgcatacttgaatattcatcataggaagtatatattcccatgatcatgttgtatacaatagctgttaataccagtttaatatcaaattcagggatatatgcttatgcacacatgcatactgtttttttttttttggtacagattatattatttcttctatatcatgtattattgtcctgttgctcctttttgaaaatgaaacatcatgcaagagttcaacttgt

SEQ ID NO: 8274 - DNA, 1115 bp, Glycine max; identical to SEQ ID NO: 8273
  Gm_smallRNAprecursor_1107

SEQ ID NO: 8275 - DNA, 1105 bp, Glycine max
  Gm_smallRNAprecursor_1108
tattgaatcaagtcaatatcaattttatcatactcagtgatcactctctttttggtcatttttcctctctaatttataaaatatccttgctggatagatgcgcaaatgaagttgcattagatttcaatctgaagtttctgattctattcctatatatgtagtaacttcgtggagaatatttctttaaattaacaagaaggtagccaatagattaagtcaagcaaaatgttgggtgaaaggcaatggataacagcttggttaaaaagtggacaaatatagaagctgatatggctttcttttgtgtgtagccatattatttctcttaactgtgagaaaatgtataatgtaaacgtatttttaatgttcaacaggataggatggtaggtgcaaagctaatagcatcactcatggccagcgaagatatgattttggaaaacatatcagttggactattacaagcaaggtctgtactctcaacctatgaagcaccgacaccgacacggacaccggacacgacacgacacggacacgtggatacctgtaatgtccaaaatatagaacgtaatacgggtgtcgtgtcggtgtccgacaccgacacggacgcgtgtcggacaccggacacggcaaagggctgaagtgtccgtgcttcatagctctcaaccatatcctcgtcagatcctttacctgagttacaacagctatgccgcaagttgctagcatgcatatcttctccgtgagctgcgacaaactttttttcaagtatattagaaaagatctcatttagttgttgtatcactcttctcccctttttatttatttgttcagtgtacatagcatagttaacttttgtatgcgcagataatatgtttttgaaataggcttcattgcatacttgaatattcatcataggaagtatatattcccatgatcatgttgtatacaatagctgttaataccagtttaatatcaaattcagggatatatgcttatgcacacatgcatactgtttttttttttttggtacagattatattatttcttctatatcatgtattattgtcctgttgctcctttttgaaaatgaaacatcatgcaagagttcaac

SEQ ID NO: 8276 - DNA, 1106 bp, Glycine max
  Gm_smallRNAprecursor_1109
tattgaatcaagtcaatatcaattttatcatactcagtgatcactctctttttggtcatttttcctctctaatttataaaatatccttgctggatagatgcgcaaatgaagttgcattagatttcaatctgaagtttctgattctattcctatatatgtagtaacttcgtggagaatatttctttaaattaacaagaaggtagccaatagattaagtcaagcaaaatgttgggtgaaaggcaatggataacagcttggttaaaaagtggacaaatatagaagctgatatggctttcttttgtgtgtagccatattatttctcttaactgtgagaaaatgtataatgtaaacgtatttttaatgttcaacaggataggatggtaggtgcaaagctaatagcatcactcatggccagcgaagatatgattttggaaaacatatcagttggactattacaagcaaggtctgtactctcaacctatgaagcaccgacaccgacacggacaccggacacgacacgacacggacacgtggatacctgtaatgtccaaaatatagaacgtaatacgggtgtcgtgtcggtgtccgacaccgacacggacgcgtgtcggacaccggacacggcaaagggctgaagtgtccgtgcttcatagctctcaaccatatcctcgtcagatcctttacctgagttacaacagctatgccgcaagttgctagcatgcatatcttctccgtgagctgcgacaaactttttttcaagtatattagaaaagatctcatttagttgttgtatcactcttctcccctttttatttatttgttcagtgtacatagcatagttaacttttgtatgcgcagataatatgtttttgaaataggcttcattgcatacttgaatattcatcataggaagtatatattcccatgatcatgttgtatacaatagctgttaataccagtttaatatcaaattcagggatatatgcttatgcacacatgcatactgtttttttttttttggtacagattatattatttcttctatatcatgtattattgtcctgttgctcctttttgaaaatgaaacatcatgcaagagttcaact

SEQ ID NO: 8277 - DNA, 1106 bp, Glycine max; identical to SEQ ID NO: 8276
  Gm_smallRNAprecursor_1110

SEQ ID NO: 8278 - DNA, 1107 bp, Glycine max
  Gm_smallRNAprecursor_1111
tattgaatcaagtcaatatcaattttatcatactcagtgatcactctctttttggtcatttttcctctctaatttataaaatatccttgctggatagatgcgcaaatgaagttgcattagatttcaatctgaagtttctgattctattcctatatatgtagtaacttcgtggagaatatttctttaaattaacaagaaggtagccaatagattaagtcaagcaaaatgttgggtgaaaggcaatggataacagcttggttaaaaagtggacaaatatagaagctgatatggctttcttttgtgtgtagccatattatttctcttaactgtgagaaaatgtataatgtaaacgtatttttaatgttcaacaggataggatggtaggtgcaaagctaatagcatcactcatggccagcgaagatatgattttggaaaacatatcagttggactattacaagcaaggtctgtactctcaacctatgaagcaccgacaccgacacggacaccggacacgacacgacacggacacgtggatacctgtaatgtccaaaatatagaacgtaatacgggtgtcgtgtcggtgtccgacaccgacacggacgcgtgtcggacaccggacacggcaaagggctgaagtgtccgtgcttcatagctctcaaccatatcctcgtcagatcctttacctgagttacaacagctatgccgcaagttgctagcatgcatatcttctccgtgagctgcgacaaactttttttcaagtatattagaaaagatctcatttagttgttgtatcactcttctcccctttttatttatttgttcagtgtacatagcatagttaacttttgtatgcgcagataatatgtttttgaaataggcttcattgcatacttgaatattcatcataggaagtatatattcccatgatcatgttgtatacaatagctgttaataccagtttaatatcaaattcagggatatatgcttatgcacacatgcatactgtttttttttttttggtacagattatattatttcttctatatcatgtattattgtcctgttgctcctttttgaaaatgaaacatcatgcaagagttcaactt

SEQ ID NO: 8279 - DNA, 1039 bp, Glycine max
  Gm_smallRNAprecursor_1112
agcaatcaaagaatacaacatcagaaatcattttgattgcagaacaatttactctgaccaaagaaggctacacttcgtatgcaagttacatgaaaatggttgtacatggagcttgggcgcatgcaattcaaagaggcataacaaatggattatcaagagtatcagaggtcatcacacttgtctcgtgccgatgcttacacaagatcatcgccaactcgacaaacacgtcatagcacagatcatccaaccaattgtcaaaacaaacccaactgtctccatcaagacattgattgcagagattaaaacgttcatgaattataccccatcctacaagaagacatggttagcaaagcaaaaagcattggagatgattcatggaaactgggaagaatcatatgccaaactgccaaaacttttcggagctttgcaatcttgtgttcccgggactgtggtcgctgctcaaacagaatccttgtatgaggggggagaaatagtaccgggcaaaagattgtttaaacgtgtcttttggtcatttggtccatgcattaatggttttgcatattgcaaacccattgtacaagtagacggtacatggctttacggaaagtatactggcacactgttgatagctaccgcacaagatggagctaaccatatcttcccgattgcctatgccattgtagaaggggagacaacttcagcttgggggttttttctaaagaatttgagaagacatgttactccgcaaattaacatttctcttatttcagaccgacacccctcaattataagtgcctacaacaacccaagtaacttatgggtccaggacacatcccatttcttttgcctgcgccacattgcacaaaactttcttcgtggtaactcaaactgcaaacatttaaagaaaccacttatgttggctggtgagaatctattttatttattcgttataattttctttcaatcaaattttataacataatacattgattaaatatttacagggtacgcatacacagagaagatgcactggcgacat

SEQ ID NO: 8280 - DNA, 1051 bp, Glycine max
  Gm_smallRNAprecursor_1113
actggcgacatcttgggaatattcgtgcgaataagccaagtgcagctgaatggcttgatcaattacccaaacaaaaatgggtacaatgctttgatgaggggaagcgttggggacatatgactaccaatttgtcggagtctgttaattccatgttcaaaaacacaagacatttgccggtgtcatcattggttgaggagacctatttcaagaccgcacaactctttgctaatagaggtcgacaaactcaggcaatgatcaactccggctcacagtattctgaagtcgtcttcgatgcaatcaatagtggtcaacaagaatctaatacacacattgtaaatgaattcgacagacacaatcacacttttattataaccgagactcaatccccacttgaaacacccagaccacctggaaggtttagagtaatgttacaatcctaaaagtgtgattgtggtgaatttcaggctaaacatttaccgtgttctcacgtcatggctgcctgtaaatctgtcaatgttgatcccatgacctatgtgccgatgatattcactttacaacacattttgcacatctacgacaactcctttggtttattgtcacacgaatcaatgtggcaagaatatgaaggagatcagtggggtcctgatccaaggagaaagaggactgtaaagggtcgtcccgtttcaactcgcattcctactaagatggacgaagacgaaaatgaacgagcaagtagaaaaaaatgtggactttgccggcaacatggtcatagcagaaataattgtcctaatgtatcctcatcttagtttttccttagacaaatgtcattgtttaaatattttattgatgacgtagtataatgttcttatataaataaattgttaaaagctttagttttatcatttttaattaaatctaaaaacataaacaaactaattatatttagtaaaatagttaaattaaaaattttaaaattcaaattattatacaaaataaatatttactaaaataaatatattattatacaaaatttaaattttaaaacatatat

SEQ ID NO: 8281 - DNA, 1052 bp, Glycine max
  Gm_smallRNAprecursor_1114
actggcgacatcttgggaatattcgtgcgaataagccaagtgcagctgaatggcttgatcaattacccaaacaaaaatgggtacaatgctttgatgaggggaagcgttggggacatatgactaccaatttgtcggagtctgttaattccatgttcaaaaacacaagacatttgccggtgtcatcattggttgaggagacctatttcaagaccgcacaactctttgctaatagaggtcgacaaactcaggcaatgatcaactccggctcacagtattctgaagtcgtcttcgatgcaatcaatagtggtcaacaagaatctaatacacacattgtaaatgaattcgacagacacaatcacacttttattataaccgagactcaatccccacttgaaacacccagaccacctggaaggtttagagtaatgttacaatcctaaaagtgtgattgtggtgaatttcaggctaaacatttaccgtgttctcacgtcatggctgcctgtaaatctgtcaatgttgatcccatgacctatgtgccgatgatattcactttacaacacattttgcacatctacgacaactcctttggtttattgtcacacgaatcaatgtggcaagaatatgaaggagatcagtggggtcctgatccaaggagaaagaggactgtaaagggtcgtcccgtttcaactcgcattcctactaagatggacgaagacgaaaatgaacgagcaagtagaaaaaaatgtggactttgccggcaacatggtcatagcagaaataattgtcctaatgtatcctcatcttagtttttccttagacaaatgtcattgtttaaatattttattgatgacgtagtataatgttcttatataaataaattgttaaaagctttagttttatcatttttaattaaatctaaaaacataaacaaactaattatatttagtaaaatagttaaattaaaaattttaaaattcaaattattatacaaaataaatatttactaaaataaatatattattatacaaaatttaaattttaaaacatatatt

SEQ ID NO: 8282 - DNA, 1068 bp, Glycine max
  Gm_smallRNAprecursor_1115
gtcaaatctatactagcatggctgttatcacttccaatcttttcacacccagtactacccacaatgcaaccatcacgaagtaaattgataaatatcttttttttttttttatcaaaaaacattgataaaaataaacatattgatgacattaaatgttactagatcttaaaggcaggaattctgaagagaagaggcaaaataaaaggggaagggcaggccattccatccccctctatttttattcgaaactatacgcaaagtacgtcgtggaagttcatattgcttctttagctcatttgggtctttaaagaatggccacttcaatactcaatgtcttaatttcttttccacactgacacacatctactaattactctccttccatctcttcttgacggtatataaatatgcatgattgcatgagcttttctcatggcatgccactcatcaaccattgcctatttggttctctattctcatcattggtggctaggtcttgctggagaagcagggcacgtgcaacttccctctcactcagagactctatgcttgttcaagctgattttgcacgtgctctccttttccagcttgattttcctaccatgttatttcttcttctaagctcagcacaacccaattcaattcatttttggtaagatgatcaatcattctaggtaattacagaaccaagctcttccccttccccttttctcatataacccccgcaaatataaattttgaattccaatgtaagcatttttttactactgataatggcacactgagtggcttcattcataggctaggggatatagcatatgtgtaagtgggctttcattaataaaaaaatatgagttttaccttctgaaacagagcttttcatgtgattcgtattttgcagggtcaattggaatgtacgcaaaacttcagactagttagaaacagaaggatttgaagagggatggcatattcagactcacattgttctctgcttctgcttctccctcacaaatacacttcaaaattcaaatgctgttttgttagattaattagctcattgctgcacca

SEQ ID NO: 8283 - DNA, 1057 bp, Glycine max
  Gm_smallRNAprecursor_1116
tgaataaaggacttgttggctttgttacacagtactccttaagggtcaaagtgcaaactattgttagcttcatttatattttatagttaggacgttggaaataaggttgagtttttatattatatgaaataaaaataataatttgtctgtgctgaattttaggaggagaatttgcagtttacttttgttttttttaacgaaattaaagcagacaacactctagttgggtttccttcaatatagctacctttgtgtactggcatgatggtatggtggtatggcagagttttatttgtttatttatttaattttctgcagaggaagacctgaatttcactcattgttcatgccaatgtccttagataaatctaattttctctctctctaaagttgcacctataaatatgagccttttcccttggtgtagttcaacttgaactttcattaccgttctcatgaagcagctcaaggtacttactaatggttgagaagctccttgttggagaagcagggcacgtgcaagtctcttggctctcaaatgccactgaaccctttgcacgtgctccccttctccaacacgggtttctccccttatttctcctaactaaaccaattgtgtctagcactttatttgaggtagttgctttcctcctatatgtcttaatttgttcctacgtaaagttttgcaacatgcatcttctttgagaaacgagctgaagcatgtcactttcaaattcaggtctccaataactatagaggaaaaaaaaatttaaaaaaaggaagaaattttattttatgtattaacacatttactgatttacattttacttctgttctctgtgcatcatatcagcatcaggctctgaacttaaacaccttttaagttaaggaatgtaactgaatgccagatacaaagcagacttatggcatgcggaggatgaggtttctgtggagtgtaatgtattacaaacttatgcaagaatatttcaaagtgtggagcaacacagcaaggcttgtcatgtgatcgaaaccttttggaaggattcatctcttcttc

SEQ ID NO: 8284 - DNA, 1078 bp, Glycine max
  Gm_smallRNAprecursor_1117
aacaaccttccatctaagagagaacccaaccgcgagcctcccctgcaccagccgcgtccctcccgcaccccacacgcgcacccagccgcgacacccgcagccgcacgcgcacgcagccgcgacgacctccggcagcgacgcaccggcacaaacggcagcgacgagctccggcagcgacgcacctgtcaggaacggcggcctgcagcgagaagttctcgcggagaagacgaagctgtcgcgaagaagaagaagacgcaggttttcttagttttatttttgctgtttgacaccccctgttttctgtctgcagctttttttttccttttgctatttgacacccctttttacttttaacagtcccatttttttttcgtatttgacactacaattttttttttctgttcagtcctcttttaaatggctgagtttatttgaactctttaatgagtttatttggtgttggtacttgattattgtatgaactcatgaaacttttttagtttatttgaatgcaatcctttgtttttttcaatttcaatgagtttatatatatgtttttttttttttggtccgccatgacatccgccattttccgctacgccatccgccatatttttatggcggattttttactttccgccatgaaccgccatccgccattaacaacattgggtgaaactctcaaactccatcatcatcgccaaacgaagcctcgtcctttaattcctccacgtggctctcaggcattaacatgtcagcaaccggtgagtcctcttcatcatcaaattggtaaaacccctccagccttggtagcttccctttgttacacgtccttattacgtgtttaggggtttcgatttgtgtttcaaaacacaacaccacagccgccacaccatcattcctcgctgctatgctgtgggcaccaatgaggtccatcacgcccaccttggagatggtgagattcagcaacgtgcacgagagaaggggaggaagatgacctctggtaatggtagcgatatgcaccgtcaccatcatggctgtgatggtccttagggtgggtagggttctgattgagatt

SEQ ID NO: 8285 - DNA, 1064 bp, Glycine max
  Gm_smallRNAprecursor_1118
gaaatacaacgggaagctttttattttttaaaatagtaataaatgtaaaactgtcactatttgtaaaggaaaactgtcacaactcacatcctaacagcatcagtttaattggacggataaaacctgattggggcatctttttaaaattagaggaccttattggagcgttctaaaatagcggggcctaatttagcttttttaaaataattaagggaccaaattaataattaagccttaaaaaaatacataatgttgaaaagatatagtccatttcaccttcaaggatgattacacggctgaagttatgcttgtagaacagttgatctagagcccacttgtaatgacctgataacggaatcaattgaatattctttaggcaaaattgcaaatttggtccctcagtttatctccagtttcggatttggtcccctagtaatttaattcacaaatttggtccccctattttgtaaaatcgtacaatgttggtcctccaggccacaattggatgttgaccgttaacaagtgatgttgactgccacgtgtcagattcttattggatgataactgtcacgtgtcatgttctgattggatgtcaactccacgaaagatgaaatgaattgttttttcattgaccaatcagaacatgacacgtgacaatcattatccaataagaatgtgaaacgtgacagtcaacatcacttgttaacaatcaacgtccaattgtagcctaggagactaacattgcacgactttacaaaatagggggaccaaatttgtgaattaaattattcggagaccaaatccgaaactagagataaactgggggaccaaaaatgcaattttgtctattctttatagagaacacaacaaggaaaccatgaagaaaactcttacgtgcaattttgtagtaagcagttaactctcctggccgttcagtttgaactggttcaaaatccaagtgctgcatcaaactattattattagtaaagagaacctggttttttattatcaaactattaggtccctcaatagccacaaatcagaaattattgagatcaaaataa

SEQ ID NO: 8286 - DNA, 1172 bp, Glycine max
  Gm_smallRNAprecursor_1119
gaaatacaacgggaagctttttattttttaaaatagtaataaatgtaaaactgtcactatttgtaaaggaaaactgtcacaactcacatcctaacagcatcagtttaattggacggataaaacctgattggggcatctttttaaaattagaggaccttattggagcgttctaaaatagcggggcctaatttagcttttttaaaataattaagggaccaaattaataattaagccttaaaaaaatacataatgttgaaaagatatagtccatttcaccttcaaggatgattacacggctgaagttatgcttgtagaacagttgatctagagcccacttgtaatgacctgataacggaatcaattgaatattctttaggcaaaattgcaaatttggtccctcagtttatctccagtttcggatttggtcccctagtaatttaattcacaaatttggtccccctattttgtaaaatcgtacaatgttggtcctccaggccacaattggatgttgaccgttaacaagtgatgttgactgccacgtgtcagattcttattggatgataactgtcacgtgtcatgttctgattggatgtcaactccacgaaagatgaaatgaattgttttttcattgaccaatcagaacatgacacgtgacaatcattatccaataagaatgtgaaacgtgacagtcaacatcacttgttaacaatcaacgtccaattgtagcctaggagactaacattgcacgactttacaaaatagggggaccaaatttgtgaattaaattattcggagaccaaatccgaaactagagataaactgggggaccaaaaatgcaattttgtctattctttatagagaacacaacaaggaaaccatgaagaaaactcttacgtgcaattttgtagtaagcagttaactctcctggccgttcagtttgaactggttcaaaatccaagtgctgcatcaaactattattattagtaaagagaacctggttttttattatcaaactattaggtccctcaatagccacaaatcagaaattattgagatcaaaataattttagtgagaacacaatattagttttatatctctagcacatcactatgataagaaatttgaaaatgaataatcttgaattctttatgtaagactaaggaactcccca

SEQ ID NO: 8287 - DNA, 1199 bp, Glycine max
  Gm_smallRNAprecursor_1120
gaaatacaacgggaagctttttattttttaaaatagtaataaatgtaaaactgtcactatttgtaaaggaaaactgtcacaactcacatcctaacagcatcagtttaattggacggataaaacctgattggggcatctttttaaaattagaggaccttattggagcgttctaaaatagcggggcctaatttagcttttttaaaataattaagggaccaaattaataattaagccttaaaaaaatacataatgttgaaaagatatagtccatttcaccttcaaggatgattacacggctgaagttatgcttgtagaacagttgatctagagcccacttgtaatgacctgataacggaatcaattgaatattctttaggcaaaattgcaaatttggtccctcagtttatctccagtttcggatttggtcccctagtaatttaattcacaaatttggtccccctattttgtaaaatcgtacaatgttggtcctccaggccacaattggatgttgaccgttaacaagtgatgttgactgccacgtgtcagattcttattggatgataactgtcacgtgtcatgttctgattggatgtcaactccacgaaagatgaaatgaattgttttttcattgaccaatcagaacatgacacgtgacaatcattatccaataagaatgtgaaacgtgacagtcaacatcacttgttaacaatcaacgtccaattgtagcctaggagactaacattgcacgactttacaaaatagggggaccaaatttgtgaattaaattattcggagaccaaatccgaaactagagataaactgggggaccaaaaatgcaattttgtctattctttatagagaacacaacaaggaaaccatgaagaaaactcttacgtgcaattttgtagtaagcagttaactctcctggccgttcagtttgaactggttcaaaatccaagtgctgcatcaaactattattattagtaaagagaacctggttttttattatcaaactattaggtccctcaatagccacaaatcagaaattattgagatcaaaataattttagtgagaacacaatattagttttatatctctagcacatcactatgataagaaatttgaaaatgaataatcttgaattctttatgtaagactaaggaactccccaactcaaatactcttacatcagtaattc

SEQ ID NO: 8288 - DNA, 1132 bp, Glycine max
  Gm_smallRNAprecursor_1121
aacgggaagctttttattttttaaaatagtaataaatgtaaaactgtcactatttgtaaaggaaaactgtcacaactcacatcctaacagcatcagtttaattggacggataaaacctgattggggcatctttttaaaattagaggaccttattggagcgttctaaaatagcggggcctaatttagcttttttaaaataattaagggaccaaattaataattaagccttaaaaaaatacataatgttgaaaagatatagtccatttcaccttcaaggatgattacacggctgaagttatgcttgtagaacagttgatctagagcccacttgtaatgacctgataacggaatcaattgaatattctttaggcaaaattgcaaatttggtccctcagtttatctccagtttcggatttggtcccctagtaatttaattcacaaatttggtccccctattttgtaaaatcgtacaatgttggtcctccaggccacaattggatgttgaccgttaacaagtgatgttgactgccacgtgtcagattcttattggatgataactgtcacgtgtcatgttctgattggatgtcaactccacgaaagatgaaatgaattgttttttcattgaccaatcagaacatgacacgtgacaatcattatccaataagaatgtgaaacgtgacagtcaacatcacttgttaacaatcaacgtccaattgtagcctaggagactaacattgcacgactttacaaaatagggggaccaaatttgtgaattaaattattcggagaccaaatccgaaactagagataaactgggggaccaaaaatgcaattttgtctattctttatagagaacacaacaaggaaaccatgaagaaaactcttacgtgcaattttgtagtaagcagttaactctcctggccgttcagtttgaactggttcaaaatccaagtgctgcatcaaactattattattagtaaagagaacctggttttttattatcaaactattaggtccctcaatagccacaaatcagaaattattgagatcaaaataattttagtgagaacacaatattagttttatatctctagcacatcactatgataagaaatttgaaaatgaataatct

SEQ ID NO: 8289 - DNA, 1113 bp, Glycine max
  Gm_smallRNAprecursor_1122
tttaaaatagtaataaatgtaaaactgtcactatttgtaaaggaaaactgtcacaactcacatcctaacagcatcagtttaattggacggataaaacctgattggggcatctttttaaaattagaggaccttattggagcgttctaaaatagcggggcctaatttagcttttttaaaataattaagggaccaaattaataattaagccttaaaaaaatacataatgttgaaaagatatagtccatttcaccttcaaggatgattacacggctgaagttatgcttgtagaacagttgatctagagcccacttgtaatgacctgataacggaatcaattgaatattctttaggcaaaattgcaaatttggtccctcagtttatctccagtttcggatttggtcccctagtaatttaattcacaaatttggtccccctattttgtaaaatcgtacaatgttggtcctccaggccacaattggatgttgaccgttaacaagtgatgttgactgccacgtgtcagattcttattggatgataactgtcacgtgtcatgttctgattggatgtcaactccacgaaagatgaaatgaattgttttttcattgaccaatcagaacatgacacgtgacaatcattatccaataagaatgtgaaacgtgacagtcaacatcacttgttaacaatcaacgtccaattgtagcctaggagactaacattgcacgactttacaaaatagggggaccaaatttgtgaattaaattattcggagaccaaatccgaaactagagataaactgggggaccaaaaatgcaattttgtctattctttatagagaacacaacaaggaaaccatgaagaaaactcttacgtgcaattttgtagtaagcagttaactctcctggccgttcagtttgaactggttcaaaatccaagtgctgcatcaaactattattattagtaaagagaacctggttttttattatcaaactattaggtccctcaatagccacaaatcagaaattattgagatcaaaataattttagtgagaacacaatattagttttatatctctagcacatcactatgataagaaatttgaaaatgaataatct

SEQ ID NO: 8290 - DNA, 1146 bp, Glycine max
  Gm_smallRNAprecursor_1123
tttaaaatagtaataaatgtaaaactgtcactatttgtaaaggaaaactgtcacaactcacatcctaacagcatcagtttaattggacggataaaacctgattggggcatctttttaaaattagaggaccttattggagcgttctaaaatagcggggcctaatttagcttttttaaaataattaagggaccaaattaataattaagccttaaaaaaatacataatgttgaaaagatatagtccatttcaccttcaaggatgattacacggctgaagttatgcttgtagaacagttgatctagagcccacttgtaatgacctgataacggaatcaattgaatattctttaggcaaaattgcaaatttggtccctcagtttatctccagtttcggatttggtcccctagtaatttaattcacaaatttggtccccctattttgtaaaatcgtacaatgttggtcctccaggccacaattggatgttgaccgttaacaagtgatgttgactgccacgtgtcagattcttattggatgataactgtcacgtgtcatgttctgattggatgtcaactccacgaaagatgaaatgaattgttttttcattgaccaatcagaacatgacacgtgacaatcattatccaataagaatgtgaaacgtgacagtcaacatcacttgttaacaatcaacgtccaattgtagcctaggagactaacattgcacgactttacaaaatagggggaccaaatttgtgaattaaattattcggagaccaaatccgaaactagagataaactgggggaccaaaaatgcaattttgtctattctttatagagaacacaacaaggaaaccatgaagaaaactcttacgtgcaattttgtagtaagcagttaactctcctggccgttcagtttgaactggttcaaaatccaagtgctgcatcaaactattattattagtaaagagaacctggttttttattatcaaactattaggtccctcaatagccacaaatcagaaattattgagatcaaaataattttagtgagaacacaatattagttttatatctctagcacatcactatgataagaaatttgaaaatgaataatcttgaattctttatgtaagactaaggaactcccca

SEQ ID NO: 8291 - DNA, 1092 bp, Glycine max
  Gm_smallRNAprecursor_1124
tcactatttgtaaaggaaaactgtcacaactcacatcctaacagcatcagtttaattggacggataaaacctgattggggcatctttttaaaattagaggaccttattggagcgttctaaaatagcggggcctaatttagcttttttaaaataattaagggaccaaattaataattaagccttaaaaaaatacataatgttgaaaagatatagtccatttcaccttcaaggatgattacacggctgaagttatgcttgtagaacagttgatctagagcccacttgtaatgacctgataacggaatcaattgaatattctttaggcaaaattgcaaatttggtccctcagtttatctccagtttcggatttggtcccctagtaatttaattcacaaatttggtccccctattttgtaaaatcgtacaatgttggtcctccaggccacaattggatgttgaccgttaacaagtgatgttgactgccacgtgtcagattcttattggatgataactgtcacgtgtcatgttctgattggatgtcaactccacgaaagatgaaatgaattgttttttcattgaccaatcagaacatgacacgtgacaatcattatccaataagaatgtgaaacgtgacagtcaacatcacttgttaacaatcaacgtccaattgtagcctaggagactaacattgcacgactttacaaaatagggggaccaaatttgtgaattaaattattcggagaccaaatccgaaactagagataaactgggggaccaaaaatgcaattttgtctattctttatagagaacacaacaaggaaaccatgaagaaaactcttacgtgcaattttgtagtaagcagttaactctcctggccgttcagtttgaactggttcaaaatccaagtgctgcatcaaactattattattagtaaagagaacctggttttttattatcaaactattaggtccctcaatagccacaaatcagaaattattgagatcaaaataattttagtgagaacacaatattagttttatatctctagcacatcactatgataagaaatttgaaaatgaataatcttgaatt

SEQ ID NO: 8292 - DNA, 1151 bp, Glycine max
  Gm_smallRNAprecursor_1125
ggctaacaaaaaattaccaagatcaaacttaaattctagctgaaaaacactagagctaaatctaatttttattcgcaataaaatgatatttttattctaccttacattaaatattcgaacaatatttttactccattcaatgtcattctattttgtttcactccgcgacattccaatctaatccactccaatattgatttttgatgggaaaaatacgtattttccaatttcaaacgtcatgacgccaaatgatacagatctgagacactattggcatgcaatgtctctagcaagttctttcagaggtttttgcgtatgaaaggctaaatcaaattacaacccaatatcgtataatttaggcaaacgtcaaatttggtcccctaatttatcttcagttttggatttggtaccccagtaatttaatttacaaatttggtcctcctattttgtaaaatgttggtctcccaagtcacaattgaactttgaccgttaataagttaataagtgatgctgacgatcacgtgtcacgtttttattagatgatgactgctacgtgtcatgttctaattaatcaatgaaaacaacaattcatttcttttatggagttgacatccaatcagaacatgacacgtgacagtcatcatccaataagaacgtgacacgtgacagtcaacatcacttgttaacgatcaacgtccaattgtggcctaggggaccaacattgaacggttttacaaaatagggggaccaaattcaaaactagagataaattggagatcaaatttgtaattttgcctatattttatcctcaaattttttcacgccaacaacacggtgtcattatcggtgaatagaaactctagatcattccctacctctatcagtaaaaaagaaagaataaagtgtctactgcttataaataagtcaaaatactttacaaaacgtccaagtcagaacaaggaccagaggagaagagagacagaatctacactaaataattacataaacacgtcctccacttccaaaggaaacaggatgagtgctcaaaccaaatagacatgacaaacatttccaaactagtctctgtccatgaaagtagaaagactacagcttactactagataactttgtatgtgtttgtctggccccta

SEQ ID NO: 8293 - DNA, 1160 bp, Glycine max
  Gm_smallRNAprecursor_1126
ggctaacaaaaaattaccaagatcaaacttaaattctagctgaaaaacactagagctaaatctaatttttattcgcaataaaatgatatttttattctaccttacattaaatattcgaacaatatttttactccattcaatgtcattctattttgtttcactccgcgacattccaatctaatccactccaatattgatttttgatgggaaaaatacgtattttccaatttcaaacgtcatgacgccaaatgatacagatctgagacactattggcatgcaatgtctctagcaagttctttcagaggtttttgcgtatgaaaggctaaatcaaattacaacccaatatcgtataatttaggcaaacgtcaaatttggtcccctaatttatcttcagttttggatttggtaccccagtaatttaatttacaaatttggtcctcctattttgtaaaatgttggtctcccaagtcacaattgaactttgaccgttaataagttaataagtgatgctgacgatcacgtgtcacgtttttattagatgatgactgctacgtgtcatgttctaattaatcaatgaaaacaacaattcatttcttttatggagttgacatccaatcagaacatgacacgtgacagtcatcatccaataagaacgtgacacgtgacagtcaacatcacttgttaacgatcaacgtccaattgtggcctaggggaccaacattgaacggttttacaaaatagggggaccaaattcaaaactagagataaattggagatcaaatttgtaattttgcctatattttatcctcaaattttttcacgccaacaacacggtgtcattatcggtgaatagaaactctagatcattccctacctctatcagtaaaaaagaaagaataaagtgtctactgcttataaataagtcaaaatactttacaaaacgtccaagtcagaacaaggaccagaggagaagagagacagaatctacactaaataattacataaacacgtcctccacttccaaaggaaacaggatgagtgctcaaaccaaatagacatgacaaacatttccaaactagtctctgtccatgaaagtagaaagactacagcttactactagataactttgtatgtgtttgtctggcccctacccaggatt

SEQ ID NO: 8294 - DNA, 1118 bp, Glycine max
  Gm_smallRNAprecursor_1127
acaaaaaattaccaagatcaaacttaaattctagctgaaaaacactagagctaaatctaatttttattcgcaataaaatgatatttttattctaccttacattaaatattcgaacaatatttttactccattcaatgtcattctattttgtttcactccgcgacattccaatctaatccactccaatattgatttttgatgggaaaaatacgtattttccaatttcaaacgtcatgacgccaaatgatacagatctgagacactattggcatgcaatgtctctagcaagttctttcagaggtttttgcgtatgaaaggctaaatcaaattacaacccaatatcgtataatttaggcaaacgtcaaatttggtcccctaatttatcttcagttttggatttggtaccccagtaatttaatttacaaatttggtcctcctattttgtaaaatgttggtctcccaagtcacaattgaactttgaccgttaataagttaataagtgatgctgacgatcacgtgtcacgtttttattagatgatgactgctacgtgtcatgttctaattaatcaatgaaaacaacaattcatttcttttatggagttgacatccaatcagaacatgacacgtgacagtcatcatccaataagaacgtgacacgtgacagtcaacatcacttgttaacgatcaacgtccaattgtggcctaggggaccaacattgaacggttttacaaaatagggggaccaaattcaaaactagagataaattggagatcaaatttgtaattttgcctatattttatcctcaaattttttcacgccaacaacacggtgtcattatcggtgaatagaaactctagatcattccctacctctatcagtaaaaaagaaagaataaagtgtctactgcttataaataagtcaaaatactttacaaaacgtccaagtcagaacaaggaccagaggagaagagagacagaatctacactaaataattacataaacacgtcctccacttccaaaggaaacaggatgagtgctcaaaccaaatagacatgacaaacatttccaaactagtctctgtccatgaaagtagaaagactacagcttactactagat

SEQ ID NO: 8295 - DNA, 1119 bp, Glycine max
  Gm_smallRNAprecursor_1128
acaaaaaattaccaagatcaaacttaaattctagctgaaaaacactagagctaaatctaatttttattcgcaataaaatgatatttttattctaccttacattaaatattcgaacaatatttttactccattcaatgtcattctattttgtttcactccgcgacattccaatctaatccactccaatattgatttttgatgggaaaaatacgtattttccaatttcaaacgtcatgacgccaaatgatacagatctgagacactattggcatgcaatgtctctagcaagttctttcagaggtttttgcgtatgaaaggctaaatcaaattacaacccaatatcgtataatttaggcaaacgtcaaatttggtcccctaatttatcttcagttttggatttggtaccccagtaatttaatttacaaatttggtcctcctattttgtaaaatgttggtctcccaagtcacaattgaactttgaccgttaataagttaataagtgatgctgacgatcacgtgtcacgtttttattagatgatgactgctacgtgtcatgttctaattaatcaatgaaaacaacaattcatttcttttatggagttgacatccaatcagaacatgacacgtgacagtcatcatccaataagaacgtgacacgtgacagtcaacatcacttgttaacgatcaacgtccaattgtggcctaggggaccaacattgaacggttttacaaaatagggggaccaaattcaaaactagagataaattggagatcaaatttgtaattttgcctatattttatcctcaaattttttcacgccaacaacacggtgtcattatcggtgaatagaaactctagatcattccctacctctatcagtaaaaaagaaagaataaagtgtctactgcttataaataagtcaaaatactttacaaaacgtccaagtcagaacaaggaccagaggagaagagagacagaatctacactaaataattacataaacacgtcctccacttccaaaggaaacaggatgagtgctcaaaccaaatagacatgacaaacatttccaaactagtctctgtccatgaaagtagaaagactacagcttactactagata

SEQ ID NO: 8296 - DNA, 1117 bp, Glycine max
  Gm_smallRNAprecursor_1129
caaaaaattaccaagatcaaacttaaattctagctgaaaaacactagagctaaatctaatttttattcgcaataaaatgatatttttattctaccttacattaaatattcgaacaatatttttactccattcaatgtcattctattttgtttcactccgcgacattccaatctaatccactccaatattgatttttgatgggaaaaatacgtattttccaatttcaaacgtcatgacgccaaatgatacagatctgagacactattggcatgcaatgtctctagcaagttctttcagaggtttttgcgtatgaaaggctaaatcaaattacaacccaatatcgtataatttaggcaaacgtcaaatttggtcccctaatttatcttcagttttggatttggtaccccagtaatttaatttacaaatttggtcctcctattttgtaaaatgttggtctcccaagtcacaattgaactttgaccgttaataagttaataagtgatgctgacgatcacgtgtcacgtttttattagatgatgactgctacgtgtcatgttctaattaatcaatgaaaacaacaattcatttcttttatggagttgacatccaatcagaacatgacacgtgacagtcatcatccaataagaacgtgacacgtgacagtcaacatcacttgttaacgatcaacgtccaattgtggcctaggggaccaacattgaacggttttacaaaatagggggaccaaattcaaaactagagataaattggagatcaaatttgtaattttgcctatattttatcctcaaattttttcacgccaacaacacggtgtcattatcggtgaatagaaactctagatcattccctacctctatcagtaaaaaagaaagaataaagtgtctactgcttataaataagtcaaaatactttacaaaacgtccaagtcagaacaaggaccagaggagaagagagacagaatctacactaaataattacataaacacgtcctccacttccaaaggaaacaggatgagtgctcaaaccaaatagacatgacaaacatttccaaactagtctctgtccatgaaagtagaaagactacagcttactactagat

SEQ ID NO: 8297 - DNA, 1110 bp, Glycine max
  Gm_smallRNAprecursor_1130
aaaattaccaagatcaaacttaaattctagctgaaaaacactagagctaaatctaatttttattcgcaataaaatgatatttttattctaccttacattaaatattcgaacaatatttttactccattcaatgtcattctattttgtttcactccgcgacattccaatctaatccactccaatattgatttttgatgggaaaaatacgtattttccaatttcaaacgtcatgacgccaaatgatacagatctgagacactattggcatgcaatgtctctagcaagttctttcagaggtttttgcgtatgaaaggctaaatcaaattacaacccaatatcgtataatttaggcaaacgtcaaatttggtcccctaatttatcttcagttttggatttggtaccccagtaatttaatttacaaatttggtcctcctattttgtaaaatgttggtctcccaagtcacaattgaactttgaccgttaataagttaataagtgatgctgacgatcacgtgtcacgtttttattagatgatgactgctacgtgtcatgttctaattaatcaatgaaaacaacaattcatttcttttatggagttgacatccaatcagaacatgacacgtgacagtcatcatccaataagaacgtgacacgtgacagtcaacatcacttgttaacgatcaacgtccaattgtggcctaggggaccaacattgaacggttttacaaaatagggggaccaaattcaaaactagagataaattggagatcaaatttgtaattttgcctatattttatcctcaaattttttcacgccaacaacacggtgtcattatcggtgaatagaaactctagatcattccctacctctatcagtaaaaaagaaagaataaagtgtctactgcttataaataagtcaaaatactttacaaaacgtccaagtcagaacaaggaccagaggagaagagagacagaatctacactaaataattacataaacacgtcctccacttccaaaggaaacaggatgagtgctcaaaccaaatagacatgacaaacatttccaaactagtctctgtccatgaaagtagaaagactacagcttactact

SEQ ID NO: 8298 - DNA, 1110 bp, Glycine max; identical to SEQ ID NO: 8297
  Gm_smallRNAprecursor_1131

SEQ ID NO: 8299 - DNA, 1111 bp, Glycine max
  Gm_smallRNAprecursor_1132
aaaattaccaagatcaaacttaaattctagctgaaaaacactagagctaaatctaatttttattcgcaataaaatgatatttttattctaccttacattaaatattcgaacaatatttttactccattcaatgtcattctattttgtttcactccgcgacattccaatctaatccactccaatattgatttttgatgggaaaaatacgtattttccaatttcaaacgtcatgacgccaaatgatacagatctgagacactattggcatgcaatgtctctagcaagttctttcagaggtttttgcgtatgaaaggctaaatcaaattacaacccaatatcgtataatttaggcaaacgtcaaatttggtcccctaatttatcttcagttttggatttggtaccccagtaatttaatttacaaatttggtcctcctattttgtaaaatgttggtctcccaagtcacaattgaactttgaccgttaataagttaataagtgatgctgacgatcacgtgtcacgtttttattagatgatgactgctacgtgtcatgttctaattaatcaatgaaaacaacaattcatttcttttatggagttgacatccaatcagaacatgacacgtgacagtcatcatccaataagaacgtgacacgtgacagtcaacatcacttgttaacgatcaacgtccaattgtggcctaggggaccaacattgaacggttttacaaaatagggggaccaaattcaaaactagagataaattggagatcaaatttgtaattttgcctatattttatcctcaaattttttcacgccaacaacacggtgtcattatcggtgaatagaaactctagatcattccctacctctatcagtaaaaaagaaagaataaagtgtctactgcttataaataagtcaaaatactttacaaaacgtccaagtcagaacaaggaccagaggagaagagagacagaatctacactaaataattacataaacacgtcctccacttccaaaggaaacaggatgagtgctcaaaccaaatagacatgacaaacatttccaaactagtctctgtccatgaaagtagaaagactacagcttactacta

SEQ ID NO: 8300 - DNA, 1118 bp, Glycine max
  Gm_smallRNAprecursor_1133
aaaattaccaagatcaaacttaaattctagctgaaaaacactagagctaaatctaatttttattcgcaataaaatgatatttttattctaccttacattaaatattcgaacaatatttttactccattcaatgtcattctattttgtttcactccgcgacattccaatctaatccactccaatattgatttttgatgggaaaaatacgtattttccaatttcaaacgtcatgacgccaaatgatacagatctgagacactattggcatgcaatgtctctagcaagttctttcagaggtttttgcgtatgaaaggctaaatcaaattacaacccaatatcgtataatttaggcaaacgtcaaatttggtcccctaatttatcttcagttttggatttggtaccccagtaatttaatttacaaatttggtcctcctattttgtaaaatgttggtctcccaagtcacaattgaactttgaccgttaataagttaataagtgatgctgacgatcacgtgtcacgtttttattagatgatgactgctacgtgtcatgttctaattaatcaatgaaaacaacaattcatttcttttatggagttgacatccaatcagaacatgacacgtgacagtcatcatccaataagaacgtgacacgtgacagtcaacatcacttgttaacgatcaacgtccaattgtggcctaggggaccaacattgaacggttttacaaaatagggggaccaaattcaaaactagagataaattggagatcaaatttgtaattttgcctatattttatcctcaaattttttcacgccaacaacacggtgtcattatcggtgaatagaaactctagatcattccctacctctatcagtaaaaaagaaagaataaagtgtctactgcttataaataagtcaaaatactttacaaaacgtccaagtcagaacaaggaccagaggagaagagagacagaatctacactaaataattacataaacacgtcctccacttccaaaggaaacaggatgagtgctcaaaccaaatagacatgacaaacatttccaaactagtctctgtccatgaaagtagaaagactacagcttactactagataact

SEQ ID NO: 8301 - DNA, 1142 bp, Glycine max
  Gm_smallRNAprecursor_1134
aaaattaccaagatcaaacttaaattctagctgaaaaacactagagctaaatctaatttttattcgcaataaaatgatatttttattctaccttacattaaatattcgaacaatatttttactccattcaatgtcattctattttgtttcactccgcgacattccaatctaatccactccaatattgatttttgatgggaaaaatacgtattttccaatttcaaacgtcatgacgccaaatgatacagatctgagacactattggcatgcaatgtctctagcaagttctttcagaggtttttgcgtatgaaaggctaaatcaaattacaacccaatatcgtataatttaggcaaacgtcaaatttggtcccctaatttatcttcagttttggatttggtaccccagtaatttaatttacaaatttggtcctcctattttgtaaaatgttggtctcccaagtcacaattgaactttgaccgttaataagttaataagtgatgctgacgatcacgtgtcacgtttttattagatgatgactgctacgtgtcatgttctaattaatcaatgaaaacaacaattcatttcttttatggagttgacatccaatcagaacatgacacgtgacagtcatcatccaataagaacgtgacacgtgacagtcaacatcacttgttaacgatcaacgtccaattgtggcctaggggaccaacattgaacggttttacaaaatagggggaccaaattcaaaactagagataaattggagatcaaatttgtaattttgcctatattttatcctcaaattttttcacgccaacaacacggtgtcattatcggtgaatagaaactctagatcattccctacctctatcagtaaaaaagaaagaataaagtgtctactgcttataaataagtcaaaatactttacaaaacgtccaagtcagaacaaggaccagaggagaagagagacagaatctacactaaataattacataaacacgtcctccacttccaaaggaaacaggatgagtgctcaaaccaaatagacatgacaaacatttccaaactagtctctgtccatgaaagtagaaagactacagcttactactagataactttgtatgtgtttgtctggccccta

SEQ ID NO: 8302 - DNA, 1142 bp, Glycine max; identical to SEQ ID NO: 8301
  Gm_smallRNAprecursor_1135

SEQ ID NO: 8303 - DNA, 1035 bp, Glycine max
  Gm_smallRNAprecursor_1136
atttttactccattcaatgtcattctattttgtttcactccgcgacattccaatctaatccactccaatattgatttttgatgggaaaaatacgtattttccaatttcaaacgtcatgacgccaaatgatacagatctgagacactattggcatgcaatgtctctagcaagttctttcagaggtttttgcgtatgaaaggctaaatcaaattacaacccaatatcgtataatttaggcaaacgtcaaatttggtcccctaatttatcttcagttttggatttggtaccccagtaatttaatttacaaatttggtcctcctattttgtaaaatgttggtctcccaagtcacaattgaactttgaccgttaataagttaataagtgatgctgacgatcacgtgtcacgtttttattagatgatgactgctacgtgtcatgttctaattaatcaatgaaaacaacaattcatttcttttatggagttgacatccaatcagaacatgacacgtgacagtcatcatccaataagaacgtgacacgtgacagtcaacatcacttgttaacgatcaacgtccaattgtggcctaggggaccaacattgaacggttttacaaaatagggggaccaaattcaaaactagagataaattggagatcaaatttgtaattttgcctatattttatcctcaaattttttcacgccaacaacacggtgtcattatcggtgaatagaaactctagatcattccctacctctatcagtaaaaaagaaagaataaagtgtctactgcttataaataagtcaaaatactttacaaaacgtccaagtcagaacaaggaccagaggagaagagagacagaatctacactaaataattacataaacacgtcctccacttccaaaggaaacaggatgagtgctcaaaccaaatagacatgacaaacatttccaaactagtctctgtccatgaaagtagaaagactacagcttactactagataactttgtatgtgtttgtctggcccctacccagga

SEQ ID NO: 8304 - DNA, 1070 bp, Glycine max
  Gm_smallRNAprecursor_1137
gttgttttctcatgccaaccaactatatcgcaggagtctcgagtgtggccctttatcttacaaagtgtgcaataaagctaaccatttcttccaccaccatgtcctccacgtccacgatttccacgacctcctcttcctcgattggacaccattgctgaagattcagtaagctcaagtgaattttcattctttcttggattaggaacatgaaggagatgtgcaagaagactctccattgagggaacttcttgattagtcaaaacttaatcacgaatatgatcaaaatctgggttcatggcccgaaaggccagcaccatatccaggttagggtgttgctaggtgcacccaacattattgctatgcacctagcacttaacgtgaaaaggcaaaaatacccctgtgtatttttaaaaatgtttttgtgcacccagctcattcaggttgatccgcataggttttagttgatccgcagttgatatagatgatccgcaagttgatttttaagacttacggatcaagttgattcataaaagacttacggatcaacttgatccgcaagcttcttacagatcaatttgatccgtaagttttaaaaatcaacttgcggattaacttgatccgtaaagggatatagaaggtaggggtaatttagccatttttaaaaaatgctgagtgcatcaacaataatgttgggtgcacctaacaacactctcaggttatcatgctttttctcatttcttccacttactcaacatcttggaacattcttaattcttcaactgcagacttaaactgtgctacaaatgaggtcatatcatgatctgtttgtttaagagaggtcaatttgtcaactgcatcatacaatctctgaatatcattggcaaaaatctgttgggccttcttccaaaagaagtaacatattttgaaagaccttaaggtcactaagatgtttggctctactgactgccacagcaaggcacaaagctggaaatcaagttgtttccattgttcttgtttttctgcagatatttcagtaacttgcttctctaagtgcttttgatgtccttggc

SEQ ID NO: 8305 - DNA, 1041 bp, Glycine max
  Gm_smallRNAprecursor_1138
gcaggagtctcgagtgtggccctttatcttacaaagtgtgcaataaagctaaccatttcttccaccaccatgtcctccacgtccacgatttccacgacctcctcttcctcgattggacaccattgctgaagattcagtaagctcaagtgaattttcattctttcttggattaggaacatgaaggagatgtgcaagaagactctccattgagggaacttcttgattagtcaaaacttaatcacgaatatgatcaaaatctgggttcatggcccgaaaggccagcaccatatccaggttagggtgttgctaggtgcacccaacattattgctatgcacctagcacttaacgtgaaaaggcaaaaatacccctgtgtatttttaaaaatgtttttgtgcacccagctcattcaggttgatccgcataggttttagttgatccgcagttgatatagatgatccgcaagttgatttttaagacttacggatcaagttgattcataaaagacttacggatcaacttgatccgcaagcttcttacagatcaatttgatccgtaagttttaaaaatcaacttgcggattaacttgatccgtaaagggatatagaaggtaggggtaatttagccatttttaaaaaatgctgagtgcatcaacaataatgttgggtgcacctaacaacactctcaggttatcatgctttttctcatttcttccacttactcaacatcttggaacattcttaattcttcaactgcagacttaaactgtgctacaaatgaggtcatatcatgatctgtttgtttaagagaggtcaatttgtcaactgcatcatacaatctctgaatatcattggcaaaaatctgttgggccttcttccaaaagaagtaacatattttgaaagaccttaaggtcactaagatgtttggctctactgactgccacagcaaggcacaaagctggaaatcaagttgtttccattgttcttgtttttctgcagatatttcagtaacttgcttctctaagtgcttttgatgtccttggc

SEQ ID NO: 8306 - DNA, 1041 bp, Glycine max; identical to SEQ ID NO: 8305
  Gm_smallRNAprecursor_1139

SEQ ID NO: 8307 - DNA, 1062 bp, Glycine max
  Gm_smallRNAprecursor_1140
gcaaaagaacgtttgagagaagaaaaattgatgaggaccatactatatgacgtgaatggtcccatgctatgctatagtattgtacacatattttaaaaaaatgcccctaaattaatctgcactaataatgagggggttcgttctgccacacgctatagaaagtcacgtttttccgtttaattatagataatattaaattacataaagacaagtaaaacactgctataatataatataatataatataataaaaatcaataagataatagatcatcaaactgaaacataaaaatgaaaaataaaataggaaaaggaaaacataggaacggcaaaacgacactgctttttactgtttgatataattaacctgttgaagtagcaattgatgttcttcagttccatcagagtgtggagaaagatcgagagtgtgggtggggttggggtttggaatttggaacaaagcagagccagaattgaaaggaattttccagcactggaagttgacagaaagagaagtgagcacgcaaaagcaacagtatataactataccaagtgcttctgtgtgctcactctcttctgtcaatttctaagttccaaagaaagaaaaactgagtggaggggtaaatacaaatacttgcccaaatttggaaagcttcacataaagaaaagtggatttggaaaaatcaaaaggggggaaaattcggaattgaatcagatctggaagaatagagagatacccattaaaggaaaaacgatggacttattgatccacatccacccaccatcttattcatcaacaattttatataattactagaagaaaaaaatttagggtttgacaccaaacaagaacataatctcaaaagaaaaggaaaaataacaaggatcttaacgtatcaattttgtaataattaattaaaaacttgggggaaaaatagatatcaacacagtcataccaaatttaagcatatttttcaataataataaaaatattcgtaattcttttaactaatataaaatacttgttaaaaaaagtaatatgaaatcaagaaataagagaaa

SEQ ID NO: 8308 - DNA, 1062 bp, Glycine max; identical to SEQ ID NO: 8307
  Gm_smallRNAprecursor_1141

SEQ ID NO: 8309 - DNA, 1122 bp, Glycine max
  Gm_smallRNAprecursor_1142
ggtgtcaatgagatatttgcaatttttgagagaccttagagaatgcagcacttacatgcatgggaaactgctcttttggataacctgtatagagagatgtgcatcgcaaataatattaaatcaataggcagtttcactctcttgattcaattatgggcatgggaacaatgtccaacgttagcccccgtcgtttattcctccacaacaataaaacgcgccacttgcctaaaggtatacttttctttactattttgaattgattattaataaatatgcttggttgatgttaatcattattctatgtaatattttattttgttatttatttttttgtgaagatggttgggaggtgaatttcatcacatagacaatgacaatttacttgatttttgtcgtaaattagatgtcatgaaacgcgacgaggtaacaattttgacgtttatttattaaatgatgttgtaattcttaattaatttattaaatttaacttttgcatgcagtttgtctgggtcccttattctggacatgtggaaatgaatttaagctaagtttgttttattgggtctgtattatagacatgtatcatactacttttttgttttcaaagaatggaatgacattagccgaatagagtcatgagacaatttggaatgcaacaacctattccaggcggcccactaatgcaacccagcaacatacatgacttgacattaaaggaaaaaaaaaagaaattggatgcaactaatgcaaccttcgcttaatgaatggaatagtcgctatgaaaggagagtagagcaaacgccgccacaaacagggacccttagtcttaactctgaatatatgaggtggtacagtcgtaaaacaaaagtttatgtcgacccaaaacatgcaagaagatgactattggtatacattgttcattataatgtagaaaagaatgttgtgcttattgaaaattattttaattactattccattattttatatgcatagtgaaatcgccgaaacactgcattttatgatgtcgcctgttgggagaagggtttgtacttttgacgatttattgtcatgtattgagaagatcactcttttgtctgacgaagaggataagatacttgaggc

SEQ ID NO: 8310 - DNA, 1110 bp, Glycine max
  Gm_smallRNAprecursor_1143
tgatcaacatttggcaaagggactgcttcgatccattttgtaaagtaatcgataccaactataatataacgctggttcttagaagagacaggcttgatttcaccaattaagtccaaagcccatcctctgaaaggccaaggtttgattatggagtgtaactcactagcaggtaaatgctgtatcccggcatgcttttggcattcctgacagcctttagcaaattctatacagtcttttaacatcgaaggccaatacaaaccttgtcgaaataaaagccatttcattttatggcttgcttgatgtgatccacaagccccactgtgaacatgggaaactgccaagtatgcttctgattcacttagacattttagcaacactccttctgcagtctttttaaacaaatcatttcccacaatcacataatttaaagccctatatttgatctttcgagccacattgcctattggattttccaaatattcaataatggactttctccaatcattatctaacatattgtcaatggccaaaatttgaattttttcctgaagatcattcatactttcatcttcattattttgtggtatacttgcccccacaagttttggcattggcaatttagtgcttaatggctctggtaacaccagtttatcttttatttcgatcaactgagttaacttttccttcgacattttgtaccctgaagctatttgggctaaatcatttgcttctcggttttcttgtcgaggtacatgctcaatgttaatataatcgaaatgattcagaagagaacttgctataacaaaatattttgctaagtgttcattaacacatttgtattcttgcgttaattgcctcaacactaattctgaatcacctcttatattaacatttcttgcccccaggctaattaaaatctcaaggcctgtaattagagcttcatactcagcctcattattagaacaaagccctttgattttatatttgaacttagttggaactttattgggggatattattaaaactccaattccagttccatgtttgtgtttcgatccatcgaaatacaaaatccaaggctctgtatcgacataatcttgcggcatctcg

SEQ ID NO: 8311 - DNA, 1083 bp, Glycine max
  Gm_smallRNAprecursor_1144
caaagggactgcttcgatccattttgtaaagtaatcgataccaactataatataacgctggttcttagaagagacaggcttgatttcaccaattaagtccaaagcccatcctctgaaaggccaaggtttgattatggagtgtaactcactagcaggtaaatgctgtatcccggcatgcttttggcattcctgacagcctttagcaaattctatacagtcttttaacatcgaaggccaatacaaaccttgtcgaaataaaagccatttcattttatggcttgcttgatgtgatccacaagccccactgtgaacatgggaaactgccaagtatgcttctgattcacttagacattttagcaacactccttctgcagtctttttaaacaaatcatttcccacaatcacataatttaaagccctatatttgatctttcgagccacattgcctattggattttccaaatattcaataatggactttctccaatcattatctaacatattgtcaatggccaaaatttgaattttttcctgaagatcattcatactttcatcttcattattttgtggtatacttgcccccacaagttttggcattggcaatttagtgcttaatggctctggtaacaccagtttatcttttatttcgatcaactgagttaacttttccttcgacattttgtaccctgaagctatttgggctaaatcatttgcttctcggttttcttgtcgaggtacatgctcaatgttaatataatcgaaatgattcagaagagaacttgctataacaaaatattttgctaagtgttcattaacacatttgtattcttgcgttaattgcctcaacactaattctgaatcacctcttatattaacatttcttgcccccaggctaattaaaatctcaaggcctgtaattagagcttcatactcagcctcattattagaacaaagccctttgattttatatttgaacttagttggaactttattgggggatattattaaaactccaattccagttccatgtttgtgtttcgatccatcgaaatacaaaatccaaggctctgtatcgacataatc

SEQ ID NO: 8312 - DNA, 1176 bp, Glycine max
  Gm_smallRNAprecursor_1145
agccacaatctgacccttaacagatttcaaaggcttgtacgttaaagaatattctgttaatgctaaagcccattttccaattctactgtgtaaaatcggttttgacaacatgtgcttaataatatcataatgagaatacacataaacatcaacaggctttatatattgcttaagttttgcacaagagaaatacagacaaagacaaagtttttctatggcagtatatctagtttctgcatcatttagtacacgactaagataataaattgcatgttctatgccatcatcatcttcctgagccaacatgctaccaatggtcttgtcagacgcagcaatatacaacttcatagacttgtttcgactaggaggcattaacacaggaggcttgatcagatattctttaatttcatcgaaagccttttgatgctcttcattccatttgaatggttcatctttcttgagtcgaagtaatggcgaaaaaatctgagctttgccacttagattcgaaatgaatcgcctcaagaagttgatttttcctagcaaagactgaagctgttttttggtcgaaggaggcttcgtctcaagaatagcctttgtcttattttgatttatctcaatgccttttttatgcaccacaaaaccaaggaaatctcctgcacgcacacaaaaagcacactttaatggattcatttttaatccatgtttcctcattcgttcgaaagattgcctaagataatccaaatggctatcttctgaggaggatttgatgattatatcatcaatataaatttgcataaatgtgtcaataaaatcatgaaacatggaattcatggccctttgataagtggccccagcatttttcaacccaaagggcataaccacccattcataagtgcctaaagcaccagggcatcgaaatgctgttttcgacacatcatcttcagcaataaatatttggttataaccagaataaccatctaacatgcttaaaaatttgaaaccggctgccgaatctaccaacaattccgctactggcatagcatattcatctttaggtgtagcattatttaaatccctaaaatctatgcatactctaagagttccattctttttaataacagggactatatttgctaaccattcgacatacctggcagccctgatgaatttacacct

SEQ ID NO: 8313 - DNA, 1157 bp, Glycine max
  Gm_smallRNAprecursor_1146
caattctactgtgtaaaatcggttttgacaacatgtgcttaataatatcataatgagaatacacataaacatcaacaggctttatatattgcttaagttttgcacaagagaaatacagacaaagacaaagtttttctatggcagtatatctagtttctgcatcatttagtacacgactaagataataaattgcatgttctatgccatcatcatcttcctgagccaacatgctaccaatggtcttgtcagacgcagcaatatacaacttcatagacttgtttcgactaggaggcattaacacaggaggcttgatcagatattctttaatttcatcgaaagccttttgatgctcttcattccatttgaatggttcatctttcttgagtcgaagtaatggcgaaaaaatctgagctttgccacttagattcgaaatgaatcgcctcaagaagttgatttttcctagcaaagactgaagctgttttttggtcgaaggaggcttcgtctcaagaatagcctttgtcttattttgatttatctcaatgccttttttatgcaccacaaaaccaaggaaatctcctgcacgcacacaaaaagcacactttaatggattcatttttaatccatgtttcctcattcgttcgaaagattgcctaagataatccaaatggctatcttctgaggaggatttgatgattatatcatcaatataaatttgcataaatgtgtcaataaaatcatgaaacatggaattcatggccctttgataagtggccccagcatttttcaacccaaagggcataaccacccattcataagtgcctaaagcaccagggcatcgaaatgctgttttcgacacatcatcttcagcaataaatatttggttataaccagaataaccatctaacatgcttaaaaatttgaaaccggctgccgaatctaccaacaattccgctactggcatagcatattcatctttaggtgtagcattatttaaatccctaaaatctatgcatactctaagagttccattctttttaataacagggactatatttgctaaccattcgacatacctggcagccctgatgaatttacacctcagcagcctttcgatctcttccttaatcttggacatgatttctggtgcgaatcttctt

SEQ ID NO: 8314 - DNA, 1039 bp, Glycine max
  Gm_smallRNAprecursor_1147
atttctggtgcgaatcttcttggtagttgttttactggtctttttccttccttaataggtaacttcatttcgaccatttctctgcttaacccaggcatttcgtggtaatcccaagcaaaacagcctttgaactctctaagaagaggcaccagcttttctttcaaacttgaggtgatattggcactgatataagttggccttttaatcgagccatctccaatatcgacctcttccaaaggatcttgagcctgcatctttggcgcctcacttatgggatttttctcaaaacccagcggctcatcatcataaatacaatccagtcttcgatcctttgtttctttgttttcatgatcttcgatcttggcttcaactgccatattttgttgagattcagcctcaaaggccgtatttagtctattttcggccatataagccgtaattctggcccatgcagtggcctcagtcatattaatcttcatatatattccacccagttggtggaatgactccatcttcagagggaacagcatcaatttcctccctctcccatataaacccataggtaggatggagtttgacagagtggacaacattgtcactcgattcgacaacagcctccttgtcaccacaaggtgctatgttagccaactttttgtcaaaggtttgtgcagtaacattatcgacctctgacttatagaagctttgatccgcctctatattttcaacaatcccatcctccctccagataatgagcttctggtgaagggtagatggcacagccccaactccatgaatccactcccttcctaatagcaagttaaaattagccttagactgtatcaccaggaaaagagttggtcgaactatactgcctacagcaacatctacttgaatggctcccaaagaatagccagttttaccctcataattcgaaagcacaatgttgtgggcagatagatcagtgtcatgtttcccgatcttgtagagcatagatcgaggcattaagttgacagccgctcctccatcaatgagcactttg

SEQ ID NO: 8315 - DNA, 1053 bp, Glycine max
  Gm_smallRNAprecursor_1148
ccttaattataaaagagttacctcctttaaaaaaataattaatctagttaattttttatattatcgttttaaaattattttttttcttatttttatatccacttaattatttcagattaatttttaaaaagagaacaattaatttaagaaaaaacataattaatatatctaaaaattaaaaaaaaatcttataaaaaaaataaaaaaatttctaattaaagttttataattagttatgaaggaaataataattgtgaataataataataataataataataataataataataataataatacactgcagatgaaactatagagtcggactgagtcctacatgagtgttgctagttgcacccagtattattgttggtgcacccaacattctttgaaaatggtaaaactatccctactaatttctcaccttacggatcaagttgatccgtaagttgatttttaagatttacgaatcaagttgatccgtaaaaaacttacagatcaagttgatccgtaagtcttaaaaattaacttatagatcaacttgatccgtaaaagacttacggatcaagttgatccgtaagtcttaaaatttaacttacagatcaacttgattcgtaaggggtatttttgtctttttattattagtgttggttgcatcagtaataatattggatgcacctagcaacactatgctcattttttggccctccccggccctcttcccacaaaaagaaaaaaaaatgcactcttactgattgttaatttagttatatgcatgagaccccttaaattgcttcatatcgatataaagagtttgacagaggctaatttgaataattaaactttttcatgtacatacgttttaggagttttgttttttggaacatgtgggaaagaaaaagcagaaaaagaaaccaagtaacagaaatagaatcttccagcaaaagccctataacatcattccttgatttgattcctgttactaaacatgcaccagcgagataatctgcctgcgatcttagttattggcttcacgagggatacactcaa

SEQ ID NO: 8316 - DNA, 1033 bp, Glycine max
  Gm_smallRNAprecursor_1149
taaaagagttacctcctttaaaaaaataattaatctagttaattttttatattatcgttttaaaattattttttttcttatttttatatccacttaattatttcagattaatttttaaaaagagaacaattaatttaagaaaaaacataattaatatatctaaaaattaaaaaaaaatcttataaaaaaaataaaaaaatttctaattaaagttttataattagttatgaaggaaataataattgtgaataataataataataataataataataataataataataataatacactgcagatgaaactatagagtcggactgagtcctacatgagtgttgctagttgcacccagtattattgttggtgcacccaacattctttgaaaatggtaaaactatccctactaatttctcaccttacggatcaagttgatccgtaagttgatttttaagatttacgaatcaagttgatccgtaaaaaacttacagatcaagttgatccgtaagtcttaaaaattaacttatagatcaacttgatccgtaaaagacttacggatcaagttgatccgtaagtcttaaaatttaacttacagatcaacttgattcgtaaggggtatttttgtctttttattattagtgttggttgcatcagtaataatattggatgcacctagcaacactatgctcattttttggccctccccggccctcttcccacaaaaagaaaaaaaaatgcactcttactgattgttaatttagttatatgcatgagaccccttaaattgcttcatatcgatataaagagtttgacagaggctaatttgaataattaaactttttcatgtacatacgttttaggagttttgttttttggaacatgtgggaaagaaaaagcagaaaaagaaaccaagtaacagaaatagaatcttccagcaaaagccctataacatcattccttgatttgattcctgttactaaacatgcaccagcgagataatctgcctgcgatcttagttattggcttcacgagg

SEQ ID NO: 8317 - DNA, 1189 bp, Glycine max
  Gm_smallRNAprecursor_1150
atggaggccgaaaacacatacctttcacatgagatgcggagaatgtactattactctccaagacgtctctgtattgttaggtataagtgtggatggtttaccattaatcggtccaacaaatcttgattgggctgatttatgtgaggaattattgggagtcagaccacaagaagatgaaattagaggtagtgtggttaaattaagttggttggctcaccattttgcacaaataaataacaacgacgacgaagaacaagtacgaaggtttgcccgtgcatggatactgagattcattggaggtgtcttgttcgttgacaaaagcagtaacaaagtttcgctaaggtaccttcaatttttacgtgactttgaagaatgtggcagatatgcatggggagccgccgtacttggttttctatacagagagatgtgcaatgccaccgattataaaactaaatccatcggaggtatgtgcatcttactacaaatgtgggcttgggaacgatgtccaaccttggctccaaagaggactccttcccaagtagaaaatacatcactggggcacaggttagtcatttttaacagcgtctttcatttcaatagaataaatggttttagcatatattaaattttaatctttgtaggtggctgcgacgtggaaaccaacatatcggcaatgatgatgtgagagtttttcgtcgcaagttggatattatgaaacgtcatgaggtaagaacatgctattgtatttgtaaaataaaaaattatatgtgttattttactaaaatgttcacaactatgttgttaattgcagtttgtgtgggagcacccatcaaccgttatatcactgttgcctcccgtttgtttagtcggaagtctcgcgtggtacgcggtggtgccactaatttgtttccaagttattgagtggcaccaaccggacagagtattgagacaatttgggatgcagcaaccaattccagagtctccttcacaacccttaaacattcatggcataacattaaaagggaaacatgacgaaaattgggggcaattgttcgccccaatgattcataagtggaataatcgtcatgcatttagggtcgtcgcttatccccgacaagaaggcctattaagctttaactcggactacatggtctggtataggcaaaagacaaagatgtttgttgaccca

SEQ ID NO: 8318 - DNA, 1130 bp, Glycine max
  Gm_smallRNAprecursor_1151
tggttctgactttgcaatggctcaaagaaaaactcattctcctagtaagaaacttttaccatatgacaaatacaaataccatactatttttttatgtattagttataattcagaattctaactttgaagttatgctcttggttggtaattggtattgcagcatattggtggcgaatgtttgggtcacaaactccaaatttgcaaaagctagctattaaaattttaagtttgacttgcagtgcttcaggatgtgaaagaaattggagtgtgtttgagcaagtaattgtgacaaaactctaactatactttttaattttatataattttgatgatcaagttttatttggagtatatttgagattgaaatcaacatttatttgttatgttgtagattcattccaaagaaagaaatagggttgagcacaagaggttgcatgatttggtgtttgtcaaatacaaccaacaattgaagcaaagatataatgcaagagatgaaattgatccaatttctcttaatgatattgatgtgtgcaatgaatggctcgtgggagagatggatcaagatgatgataatgatgctggaaatgatttggtatttgaagatgatgatgctctaaattgggcaactgtgtatcaggcttcgggggttggagagtgtaggatgtatactaggcggaaaaagcaaaaaacaacaagtgttgctgctgcccaaacttctaaaaaacaggcaatggttgttggatcttcatcaaggaagcaaaaagcagtccaagaaaatgatgaagatctagattttgaggagaatattgatcttgaatctaaagaagaagaaatcatggtcaattttgaggcgtctgatggggaagagggagagggagatgctccattaccatatgataacaacaaagatgattatgttgggattggagaagatgattagagcctcaaccttcactttgcactttgcattatgtttttatcattttcttattttgaactctttaatgagtttatttggtgttggtacttgattactgtatgaactcgtgacttttttagtttatttgaatgcaatccttttggtttttttcaatttcaatgagtttatatatatgtatttctttttttgt

SEQ ID NO: 8319 - DNA, 1130 bp, Glycine max
  Gm_smallRNAprecursor_1152
ctttacaagattggtgctgaccactttggttccgactttgcaatggctcaaaggaaaacccattctcctagtaagaaacttttatcatactattttttttatgtattagttttataattcagaattctaagttatgctcttggttggtaattggtattgcagcatattggtggcgaatgtttgggtcacaaactccaaatttgcagaagctagctattaagattttgagtttaacttgcagtgcttcaggatgtgaaagaaattggagtgtctttgagcaagtaattgtgacaactctaactatactttttaattttatttaattttgatgatcaagttttatttggagtatatttgagattgaaatcaacatttatttgttatgttgtagattcattccaaaaaaagaaataggcttgagcacaagaggttgcatgatttggtgtttgtcaaatacaaccaacaattgaagcaaagatataatgcaagagatgaaattgatccaatttctcttaatgatattgatgtatgcaatgaatgactcgtgggagagatggatcaaaatgatgataatgatgctggaaatgatttggtatttgaagatgatgatgctctaaattggacaactgtgtatcaggcttcgggggttggagagtgtaggatgtatactaggcggaaaaagcaaaaaacaagtgttgctgctgcccaaacttctaaaaaacaggcaatgattgttggatcttcatcaaggaagcaaaaagcagtccaagaaaatgatgaggatctagatgttgaggagaatattgatgttgaatttgaagaagaagaaatcatggtcaattttgaggcgtctgatggggaagagggagagggagatgctccattaccatatgataacaacgaagatgattatgtggggattggagaagatgattagagcctcaaccttcactttgcactttgcataattttttttttgatcagcaaaaataagtatttatattaatgaagtatcaggggtactttaaagtacagatataggggtcagatttttggttccatggcagacttaatgtagtctaacatagaaccagtttctgggtacataaaatataataaactctagtaac

SEQ ID NO: 8320 - DNA, 1076 bp, Glycine max
  Gm_smallRNAprecursor_1153
gcctgccaaagagggagttgtcgagtttcctttctagttcgtgcttgtcttccactccgctgaatctgacaaagccatatttcttccccaacttgtttctccttgctgaaatgaaaatttccctcaccgcgccaaactgtttgaaatagcgccacaactcctccatgtttgcttcatcggggaaacgggtgaagtagaaagattgaatatctttctgatcccgccagtttctccgtatgtaaccttgtcgttggccagtaccttctccagcgagtgtcagaccgggaccctctctcagattctcacgaccactcgttttcctctcccttctactcctaactctctcccacccagtgtttctctctctagacatatctctctcttcgatttgaactttgcactttgcattatgtttttatcattttcttattttgaactctttaatgagtttatttggtgttggtacttgattattgtatgaactcatgaaacttttttagtttatttgaatgcaatcctttgtttttttcaatttcaatgagtttatatatatgttttttttttttgtccaccatgacatccgccattttccgctacgccatccgccatatttttatggcggatttttgactttccgccatgaaccgccatccgccattaacaacatatataaattctcaagaaatgagattttactctagagttaataatttctaaaaaaaaattgacaggagttacaatacgaactctcgttttctccaccttttgatctttcatcacatgtgctaacagtagcccaaagaggataaatgatcaaataaagtgatcatgctcctttatggggatgtgttaccattttaggaaatggatcagaaggtgcaggaaacacaagctggtcttgtaacttctgtcaaaaagttttagaagttattactctatagtgaaagctcatttgttgagtttttatgaaactgaaatttctgtatattcaaatgtaaatgaagagtatttggatgaattgaaatcagttaattaactgaaaaagagtgaaacgtaagcatatcccattgcttact

SEQ ID NO: 8321 - DNA, 1061 bp, Glycine max
  Gm_smallRNAprecursor_1154
aagttaacaacgagtttaatatttcttagacatccaaagcagaataagatcaaacagacagataggaagtaagaatgcagtatgataaatgaaaatattatcttgaaaaatagatatcaagggtacaccggagaccggcttacaaaccccaggttttcataaacaaagaaaccgaagcggcgaagggagaagagagaaggatgaaaaatagaaatttattgattctagaaagaagcgcttacaaaaatcttgtttcagagcacctctcttcagaaacctgaaaaatggctaaatgaaagggtacctcacaacatacttgaggactccttatatagccaaaaatctaagaccggtagttttgaccgggactatttgactctttgttacaagacaagtagttttgaccgggactttaatggctacaagacaggtagtattgtccagcattaattacacattaattacaaacagactgttttgtgaccgaaattaaatttaatctaaacagataccaaaacaatcatcttcgttttggtaaaagggatcttcttcttcttcttcagcagaacttgtttcttccttctttgaggatgaagcttcttcttcctgctgtaacatttgtagaaattccttcagatttttagctaagacctcctttgatgtcgatcctgctaaaaatgctgccagatgagacttttggttcaaaaacacagaagtttctggatcagctgctttgaggaattctggatgggattggaaccagagttttacttgttctggatccgctttggatgagtgaaattatgcccaccattttacgaatgcgtgcctttgtagtgatggatattggtttgtcttttcagtcttgctgtaacgatattgccatgagaatatccatgacagtgcaaagcttgaaaagtatttaagatatgctggaattcgtgattcctgcgaattgtattgtttcttaaattgggcaaatccttgttggaccgtttctgggaatatctctgggattggtccaaagaagtcccaccattgcaaaaaccaattgggaaaat

SEQ ID NO: 8322 - DNA, 1063 bp, Glycine max
  Gm_smallRNAprecursor_1155
aagttaacaacgagtttaatatttcttagacatccaaagcagaataagatcaaacagacagataggaagtaagaatgcagtatgataaatgaaaatattatcttgaaaaatagatatcaagggtacaccggagaccggcttacaaaccccaggttttcataaacaaagaaaccgaagcggcgaagggagaagagagaaggatgaaaaatagaaatttattgattctagaaagaagcgcttacaaaaatcttgtttcagagcacctctcttcagaaacctgaaaaatggctaaatgaaagggtacctcacaacatacttgaggactccttatatagccaaaaatctaagaccggtagttttgaccgggactatttgactctttgttacaagacaagtagttttgaccgggactttaatggctacaagacaggtagtattgtccagcattaattacacattaattacaaacagactgttttgtgaccgaaattaaatttaatctaaacagataccaaaacaatcatcttcgttttggtaaaagggatcttcttcttcttcttcagcagaacttgtttcttccttctttgaggatgaagcttcttcttcctgctgtaacatttgtagaaattccttcagatttttagctaagacctcctttgatgtcgatcctgctaaaaatgctgccagatgagacttttggttcaaaaacacagaagtttctggatcagctgctttgaggaattctggatgggattggaaccagagttttacttgttctggatccgctttggatgagtgaaattatgcccaccattttacgaatgcgtgcctttgtagtgatggatattggtttgtcttttcagtcttgctgtaacgatattgccatgagaatatccatgacagtgcaaagcttgaaaagtatttaagatatgctggaattcgtgattcctgcgaattgtattgtttcttaaattgggcaaatccttgttggaccgtttctgggaatatctctgggattggtccaaagaagtcccaccattgcaaaaaccaattgggaaaattg

SEQ ID NO: 8323 - DNA, 1063 bp, Glycine max; identical to SEQ ID NO: 8322
  Gm_smallRNAprecursor_1156

SEQ ID NO: 8324 - DNA, 1064 bp, Glycine max
  Gm_smallRNAprecursor_1157
aagttaacaacgagtttaatatttcttagacatccaaagcagaataagatcaaacagacagataggaagtaagaatgcagtatgataaatgaaaatattatcttgaaaaatagatatcaagggtacaccggagaccggcttacaaaccccaggttttcataaacaaagaaaccgaagcggcgaagggagaagagagaaggatgaaaaatagaaatttattgattctagaaagaagcgcttacaaaaatcttgtttcagagcacctctcttcagaaacctgaaaaatggctaaatgaaagggtacctcacaacatacttgaggactccttatatagccaaaaatctaagaccggtagttttgaccgggactatttgactctttgttacaagacaagtagttttgaccgggactttaatggctacaagacaggtagtattgtccagcattaattacacattaattacaaacagactgttttgtgaccgaaattaaatttaatctaaacagataccaaaacaatcatcttcgttttggtaaaagggatcttcttcttcttcttcagcagaacttgtttcttccttctttgaggatgaagcttcttcttcctgctgtaacatttgtagaaattccttcagatttttagctaagacctcctttgatgtcgatcctgctaaaaatgctgccagatgagacttttggttcaaaaacacagaagtttctggatcagctgctttgaggaattctggatgggattggaaccagagttttacttgttctggatccgctttggatgagtgaaattatgcccaccattttacgaatgcgtgcctttgtagtgatggatattggtttgtcttttcagtcttgctgtaacgatattgccatgagaatatccatgacagtgcaaagcttgaaaagtatttaagatatgctggaattcgtgattcctgcgaattgtattgtttcttaaattgggcaaatccttgttggaccgtttctgggaatatctctgggattggtccaaagaagtcccaccattgcaaaaaccaattgggaaaattgt

SEQ ID NO: 8325 - DNA, 1057 bp, Glycine max
  Gm_smallRNAprecursor_1158
ttaacaacgagtttaatatttcttagacatccaaagcagaataagatcaaacagacagataggaagtaagaatgcagtatgataaatgaaaatattatcttgaaaaatagatatcaagggtacaccggagaccggcttacaaaccccaggttttcataaacaaagaaaccgaagcggcgaagggagaagagagaaggatgaaaaatagaaatttattgattctagaaagaagcgcttacaaaaatcttgtttcagagcacctctcttcagaaacctgaaaaatggctaaatgaaagggtacctcacaacatacttgaggactccttatatagccaaaaatctaagaccggtagttttgaccgggactatttgactctttgttacaagacaagtagttttgaccgggactttaatggctacaagacaggtagtattgtccagcattaattacacattaattacaaacagactgttttgtgaccgaaattaaatttaatctaaacagataccaaaacaatcatcttcgttttggtaaaagggatcttcttcttcttcttcagcagaacttgtttcttccttctttgaggatgaagcttcttcttcctgctgtaacatttgtagaaattccttcagatttttagctaagacctcctttgatgtcgatcctgctaaaaatgctgccagatgagacttttggttcaaaaacacagaagtttctggatcagctgctttgaggaattctggatgggattggaaccagagttttacttgttctggatccgctttggatgagtgaaattatgcccaccattttacgaatgcgtgcctttgtagtgatggatattggtttgtcttttcagtcttgctgtaacgatattgccatgagaatatccatgacagtgcaaagcttgaaaagtatttaagatatgctggaattcgtgattcctgcgaattgtattgtttcttaaattgggcaaatccttgttggaccgtttctgggaatatctctgggattggtccaaagaagtcccaccattgcaaaaaccaattgggaaaa

SEQ ID NO: 8326 - DNA, 1058 bp, Glycine max
  Gm_smallRNAprecursor_1159
ttaacaacgagtttaatatttcttagacatccaaagcagaataagatcaaacagacagataggaagtaagaatgcagtatgataaatgaaaatattatcttgaaaaatagatatcaagggtacaccggagaccggcttacaaaccccaggttttcataaacaaagaaaccgaagcggcgaagggagaagagagaaggatgaaaaatagaaatttattgattctagaaagaagcgcttacaaaaatcttgtttcagagcacctctcttcagaaacctgaaaaatggctaaatgaaagggtacctcacaacatacttgaggactccttatatagccaaaaatctaagaccggtagttttgaccgggactatttgactctttgttacaagacaagtagttttgaccgggactttaatggctacaagacaggtagtattgtccagcattaattacacattaattacaaacagactgttttgtgaccgaaattaaatttaatctaaacagataccaaaacaatcatcttcgttttggtaaaagggatcttcttcttcttcttcagcagaacttgtttcttccttctttgaggatgaagcttcttcttcctgctgtaacatttgtagaaattccttcagatttttagctaagacctcctttgatgtcgatcctgctaaaaatgctgccagatgagacttttggttcaaaaacacagaagtttctggatcagctgctttgaggaattctggatgggattggaaccagagttttacttgttctggatccgctttggatgagtgaaattatgcccaccattttacgaatgcgtgcctttgtagtgatggatattggtttgtcttttcagtcttgctgtaacgatattgccatgagaatatccatgacagtgcaaagcttgaaaagtatttaagatatgctggaattcgtgattcctgcgaattgtattgtttcttaaattgggcaaatccttgttggaccgtttctgggaatatctctgggattggtccaaagaagtcccaccattgcaaaaaccaattgggaaaat

SEQ ID NO: 8327 - DNA, 1083 bp, Glycine max
  Gm_smallRNAprecursor_1160
ttaacaacgagtttaatatttcttagacatccaaagcagaataagatcaaacagacagataggaagtaagaatgcagtatgataaatgaaaatattatcttgaaaaatagatatcaagggtacaccggagaccggcttacaaaccccaggttttcataaacaaagaaaccgaagcggcgaagggagaagagagaaggatgaaaaatagaaatttattgattctagaaagaagcgcttacaaaaatcttgtttcagagcacctctcttcagaaacctgaaaaatggctaaatgaaagggtacctcacaacatacttgaggactccttatatagccaaaaatctaagaccggtagttttgaccgggactatttgactctttgttacaagacaagtagttttgaccgggactttaatggctacaagacaggtagtattgtccagcattaattacacattaattacaaacagactgttttgtgaccgaaattaaatttaatctaaacagataccaaaacaatcatcttcgttttggtaaaagggatcttcttcttcttcttcagcagaacttgtttcttccttctttgaggatgaagcttcttcttcctgctgtaacatttgtagaaattccttcagatttttagctaagacctcctttgatgtcgatcctgctaaaaatgctgccagatgagacttttggttcaaaaacacagaagtttctggatcagctgctttgaggaattctggatgggattggaaccagagttttacttgttctggatccgctttggatgagtgaaattatgcccaccattttacgaatgcgtgcctttgtagtgatggatattggtttgtcttttcagtcttgctgtaacgatattgccatgagaatatccatgacagtgcaaagcttgaaaagtatttaagatatgctggaattcgtgattcctgcgaattgtattgtttcttaaattgggcaaatccttgttggaccgtttctgggaatatctctgggattggtccaaagaagtcccaccattgcaaaaaccaattgggaaaattgtaaattgtgttggtcttgaaata

SEQ ID NO: 8328 - DNA, 1056 bp, Glycine max
  Gm_smallRNAprecursor_1161
taacaacgagtttaatatttcttagacatccaaagcagaataagatcaaacagacagataggaagtaagaatgcagtatgataaatgaaaatattatcttgaaaaatagatatcaagggtacaccggagaccggcttacaaaccccaggttttcataaacaaagaaaccgaagcggcgaagggagaagagagaaggatgaaaaatagaaatttattgattctagaaagaagcgcttacaaaaatcttgtttcagagcacctctcttcagaaacctgaaaaatggctaaatgaaagggtacctcacaacatacttgaggactccttatatagccaaaaatctaagaccggtagttttgaccgggactatttgactctttgttacaagacaagtagttttgaccgggactttaatggctacaagacaggtagtattgtccagcattaattacacattaattacaaacagactgttttgtgaccgaaattaaatttaatctaaacagataccaaaacaatcatcttcgttttggtaaaagggatcttcttcttcttcttcagcagaacttgtttcttccttctttgaggatgaagcttcttcttcctgctgtaacatttgtagaaattccttcagatttttagctaagacctcctttgatgtcgatcctgctaaaaatgctgccagatgagacttttggttcaaaaacacagaagtttctggatcagctgctttgaggaattctggatgggattggaaccagagttttacttgttctggatccgctttggatgagtgaaattatgcccaccattttacgaatgcgtgcctttgtagtgatggatattggtttgtcttttcagtcttgctgtaacgatattgccatgagaatatccatgacagtgcaaagcttgaaaagtatttaagatatgctggaattcgtgattcctgcgaattgtattgtttcttaaattgggcaaatccttgttggaccgtttctgggaatatctctgggattggtccaaagaagtcccaccattgcaaaaaccaattgggaaaa

SEQ ID NO: 8329 - DNA, 1056 bp, Glycine max; identical to SEQ ID NO: 8328
  Gm_smallRNAprecursor_1162

SEQ ID NO: 8330 - DNA, 1057 bp, Glycine max
  Gm_smallRNAprecursor_1163
taacaacgagtttaatatttcttagacatccaaagcagaataagatcaaacagacagataggaagtaagaatgcagtatgataaatgaaaatattatcttgaaaaatagatatcaagggtacaccggagaccggcttacaaaccccaggttttcataaacaaagaaaccgaagcggcgaagggagaagagagaaggatgaaaaatagaaatttattgattctagaaagaagcgcttacaaaaatcttgtttcagagcacctctcttcagaaacctgaaaaatggctaaatgaaagggtacctcacaacatacttgaggactccttatatagccaaaaatctaagaccggtagttttgaccgggactatttgactctttgttacaagacaagtagttttgaccgggactttaatggctacaagacaggtagtattgtccagcattaattacacattaattacaaacagactgttttgtgaccgaaattaaatttaatctaaacagataccaaaacaatcatcttcgttttggtaaaagggatcttcttcttcttcttcagcagaacttgtttcttccttctttgaggatgaagcttcttcttcctgctgtaacatttgtagaaattccttcagatttttagctaagacctcctttgatgtcgatcctgctaaaaatgctgccagatgagacttttggttcaaaaacacagaagtttctggatcagctgctttgaggaattctggatgggattggaaccagagttttacttgttctggatccgctttggatgagtgaaattatgcccaccattttacgaatgcgtgcctttgtagtgatggatattggtttgtcttttcagtcttgctgtaacgatattgccatgagaatatccatgacagtgcaaagcttgaaaagtatttaagatatgctggaattcgtgattcctgcgaattgtattgtttcttaaattgggcaaatccttgttggaccgtttctgggaatatctctgggattggtccaaagaagtcccaccattgcaaaaaccaattgggaaaat

SEQ ID NO: 8331 - DNA, 1059 bp, Glycine max
  Gm_smallRNAprecursor_1164
taacaacgagtttaatatttcttagacatccaaagcagaataagatcaaacagacagataggaagtaagaatgcagtatgataaatgaaaatattatcttgaaaaatagatatcaagggtacaccggagaccggcttacaaaccccaggttttcataaacaaagaaaccgaagcggcgaagggagaagagagaaggatgaaaaatagaaatttattgattctagaaagaagcgcttacaaaaatcttgtttcagagcacctctcttcagaaacctgaaaaatggctaaatgaaagggtacctcacaacatacttgaggactccttatatagccaaaaatctaagaccggtagttttgaccgggactatttgactctttgttacaagacaagtagttttgaccgggactttaatggctacaagacaggtagtattgtccagcattaattacacattaattacaaacagactgttttgtgaccgaaattaaatttaatctaaacagataccaaaacaatcatcttcgttttggtaaaagggatcttcttcttcttcttcagcagaacttgtttcttccttctttgaggatgaagcttcttcttcctgctgtaacatttgtagaaattccttcagatttttagctaagacctcctttgatgtcgatcctgctaaaaatgctgccagatgagacttttggttcaaaaacacagaagtttctggatcagctgctttgaggaattctggatgggattggaaccagagttttacttgttctggatccgctttggatgagtgaaattatgcccaccattttacgaatgcgtgcctttgtagtgatggatattggtttgtcttttcagtcttgctgtaacgatattgccatgagaatatccatgacagtgcaaagcttgaaaagtatttaagatatgctggaattcgtgattcctgcgaattgtattgtttcttaaattgggcaaatccttgttggaccgtttctgggaatatctctgggattggtccaaagaagtcccaccattgcaaaaaccaattgggaaaattg

SEQ ID NO: 8332 - DNA, 1059 bp, Glycine max; identical to SEQ ID NO: 8331
  Gm_smallRNAprecursor_1165

SEQ ID NO: 8333 - DNA, 1082 bp, Glycine max
  Gm_smallRNAprecursor_1166
taacaacgagtttaatatttcttagacatccaaagcagaataagatcaaacagacagataggaagtaagaatgcagtatgataaatgaaaatattatcttgaaaaatagatatcaagggtacaccggagaccggcttacaaaccccaggttttcataaacaaagaaaccgaagcggcgaagggagaagagagaaggatgaaaaatagaaatttattgattctagaaagaagcgcttacaaaaatcttgtttcagagcacctctcttcagaaacctgaaaaatggctaaatgaaagggtacctcacaacatacttgaggactccttatatagccaaaaatctaagaccggtagttttgaccgggactatttgactctttgttacaagacaagtagttttgaccgggactttaatggctacaagacaggtagtattgtccagcattaattacacattaattacaaacagactgttttgtgaccgaaattaaatttaatctaaacagataccaaaacaatcatcttcgttttggtaaaagggatcttcttcttcttcttcagcagaacttgtttcttccttctttgaggatgaagcttcttcttcctgctgtaacatttgtagaaattccttcagatttttagctaagacctcctttgatgtcgatcctgctaaaaatgctgccagatgagacttttggttcaaaaacacagaagtttctggatcagctgctttgaggaattctggatgggattggaaccagagttttacttgttctggatccgctttggatgagtgaaattatgcccaccattttacgaatgcgtgcctttgtagtgatggatattggtttgtcttttcagtcttgctgtaacgatattgccatgagaatatccatgacagtgcaaagcttgaaaagtatttaagatatgctggaattcgtgattcctgcgaattgtattgtttcttaaattgggcaaatccttgttggaccgtttctgggaatatctctgggattggtccaaagaagtcccaccattgcaaaaaccaattgggaaaattgtaaattgtgttggtcttgaaata

SEQ ID NO: 8334 - DNA, 1055 bp, Glycine max
  Gm_smallRNAprecursor_1167
aacaacgagtttaatatttcttagacatccaaagcagaataagatcaaacagacagataggaagtaagaatgcagtatgataaatgaaaatattatcttgaaaaatagatatcaagggtacaccggagaccggcttacaaaccccaggttttcataaacaaagaaaccgaagcggcgaagggagaagagagaaggatgaaaaatagaaatttattgattctagaaagaagcgcttacaaaaatcttgtttcagagcacctctcttcagaaacctgaaaaatggctaaatgaaagggtacctcacaacatacttgaggactccttatatagccaaaaatctaagaccggtagttttgaccgggactatttgactctttgttacaagacaagtagttttgaccgggactttaatggctacaagacaggtagtattgtccagcattaattacacattaattacaaacagactgttttgtgaccgaaattaaatttaatctaaacagataccaaaacaatcatcttcgttttggtaaaagggatcttcttcttcttcttcagcagaacttgtttcttccttctttgaggatgaagcttcttcttcctgctgtaacatttgtagaaattccttcagatttttagctaagacctcctttgatgtcgatcctgctaaaaatgctgccagatgagacttttggttcaaaaacacagaagtttctggatcagctgctttgaggaattctggatgggattggaaccagagttttacttgttctggatccgctttggatgagtgaaattatgcccaccattttacgaatgcgtgcctttgtagtgatggatattggtttgtcttttcagtcttgctgtaacgatattgccatgagaatatccatgacagtgcaaagcttgaaaagtatttaagatatgctggaattcgtgattcctgcgaattgtattgtttcttaaattgggcaaatccttgttggaccgtttctgggaatatctctgggattggtccaaagaagtcccaccattgcaaaaaccaattgggaaaa

SEQ ID NO: 8335 - DNA, 1058 bp, Glycine max
  Gm_smallRNAprecursor_1168
aacaacgagtttaatatttcttagacatccaaagcagaataagatcaaacagacagataggaagtaagaatgcagtatgataaatgaaaatattatcttgaaaaatagatatcaagggtacaccggagaccggcttacaaaccccaggttttcataaacaaagaaaccgaagcggcgaagggagaagagagaaggatgaaaaatagaaatttattgattctagaaagaagcgcttacaaaaatcttgtttcagagcacctctcttcagaaacctgaaaaatggctaaatgaaagggtacctcacaacatacttgaggactccttatatagccaaaaatctaagaccggtagttttgaccgggactatttgactctttgttacaagacaagtagttttgaccgggactttaatggctacaagacaggtagtattgtccagcattaattacacattaattacaaacagactgttttgtgaccgaaattaaatttaatctaaacagataccaaaacaatcatcttcgttttggtaaaagggatcttcttcttcttcttcagcagaacttgtttcttccttctttgaggatgaagcttcttcttcctgctgtaacatttgtagaaattccttcagatttttagctaagacctcctttgatgtcgatcctgctaaaaatgctgccagatgagacttttggttcaaaaacacagaagtttctggatcagctgctttgaggaattctggatgggattggaaccagagttttacttgttctggatccgctttggatgagtgaaattatgcccaccattttacgaatgcgtgcctttgtagtgatggatattggtttgtcttttcagtcttgctgtaacgatattgccatgagaatatccatgacagtgcaaagcttgaaaagtatttaagatatgctggaattcgtgattcctgcgaattgtattgtttcttaaattgggcaaatccttgttggaccgtttctgggaatatctctgggattggtccaaagaagtcccaccattgcaaaaaccaattgggaaaattg

SEQ ID NO: 8336 - DNA, 1058 bp, Glycine max; identical to SEQ ID NO: 8335
  Gm_smallRNAprecursor_1169

SEQ ID NO: 8337 - DNA, 1081 bp, Glycine max
  Gm_smallRNAprecursor_1170
aacaacgagtttaatatttcttagacatccaaagcagaataagatcaaacagacagataggaagtaagaatgcagtatgataaatgaaaatattatcttgaaaaatagatatcaagggtacaccggagaccggcttacaaaccccaggttttcataaacaaagaaaccgaagcggcgaagggagaagagagaaggatgaaaaatagaaatttattgattctagaaagaagcgcttacaaaaatcttgtttcagagcacctctcttcagaaacctgaaaaatggctaaatgaaagggtacctcacaacatacttgaggactccttatatagccaaaaatctaagaccggtagttttgaccgggactatttgactctttgttacaagacaagtagttttgaccgggactttaatggctacaagacaggtagtattgtccagcattaattacacattaattacaaacagactgttttgtgaccgaaattaaatttaatctaaacagataccaaaacaatcatcttcgttttggtaaaagggatcttcttcttcttcttcagcagaacttgtttcttccttctttgaggatgaagcttcttcttcctgctgtaacatttgtagaaattccttcagatttttagctaagacctcctttgatgtcgatcctgctaaaaatgctgccagatgagacttttggttcaaaaacacagaagtttctggatcagctgctttgaggaattctggatgggattggaaccagagttttacttgttctggatccgctttggatgagtgaaattatgcccaccattttacgaatgcgtgcctttgtagtgatggatattggtttgtcttttcagtcttgctgtaacgatattgccatgagaatatccatgacagtgcaaagcttgaaaagtatttaagatatgctggaattcgtgattcctgcgaattgtattgtttcttaaattgggcaaatccttgttggaccgtttctgggaatatctctgggattggtccaaagaagtcccaccattgcaaaaaccaattgggaaaattgtaaattgtgttggtcttgaaata

SEQ ID NO: 8338 - DNA, 1055 bp, Glycine max
  Gm_smallRNAprecursor_1171
aaagaaaccgaagcggcgaagggagaagagagaaggatgaaaaatagaaatttattgattctagaaagaagcgcttacaaaaatcttgtttcagagcacctctcttcagaaacctgaaaaatggctaaatgaaagggtacctcacaacatacttgaggactccttatatagccaaaaatctaagaccggtagttttgaccgggactatttgactctttgttacaagacaagtagttttgaccgggactttaatggctacaagacaggtagtattgtccagcattaattacacattaattacaaacagactgttttgtgaccgaaattaaatttaatctaaacagataccaaaacaatcatcttcgttttggtaaaagggatcttcttcttcttcttcagcagaacttgtttcttccttctttgaggatgaagcttcttcttcctgctgtaacatttgtagaaattccttcagatttttagctaagacctcctttgatgtcgatcctgctaaaaatgctgccagatgagacttttggttcaaaaacacagaagtttctggatcagctgctttgaggaattctggatgggattggaaccagagttttacttgttctggatccgctttggatgagtgaaattatgcccaccattttacgaatgcgtgcctttgtagtgatggatattggtttgtcttttcagtcttgctgtaacgatattgccatgagaatatccatgacagtgcaaagcttgaaaagtatttaagatatgctggaattcgtgattcctgcgaattgtattgtttcttaaattgggcaaatccttgttggaccgtttctgggaatatctctgggattggtccaaagaagtcccaccattgcaaaaaccaattgggaaaattgtaaattgtgttggtcttgaaatatatcagtcatgaatgcttgaagcgggtattttggtgccaaaacaccttagtccaagcatcaacgtaatcccaataggtataacctaccggatcaaatggaactgaaaatctctttcctttgttcaagtccaaa

SEQ ID NO: 8339 - DNA, 1173 bp, Glycine max
  Gm_smallRNAprecursor_1172
ttgattctagaaagaagcgcttacaaaaatcttgtttcagagcacctctcttcagaaacctgaaaaatggctaaatgaaagggtacctcacaacatacttgaggactccttatatagccaaaaatctaagaccggtagttttgaccgggactatttgactctttgttacaagacaagtagttttgaccgggactttaatggctacaagacaggtagtattgtccagcattaattacacattaattacaaacagactgttttgtgaccgaaattaaatttaatctaaacagataccaaaacaatcatcttcgttttggtaaaagggatcttcttcttcttcttcagcagaacttgtttcttccttctttgaggatgaagcttcttcttcctgctgtaacatttgtagaaattccttcagatttttagctaagacctcctttgatgtcgatcctgctaaaaatgctgccagatgagacttttggttcaaaaacacagaagtttctggatcagctgctttgaggaattctggatgggattggaaccagagttttacttgttctggatccgctttggatgagtgaaattatgcccaccattttacgaatgcgtgcctttgtagtgatggatattggtttgtcttttcagtcttgctgtaacgatattgccatgagaatatccatgacagtgcaaagcttgaaaagtatttaagatatgctggaattcgtgattcctgcgaattgtattgtttcttaaattgggcaaatccttgttggaccgtttctgggaatatctctgggattggtccaaagaagtcccaccattgcaaaaaccaattgggaaaattgtaaattgtgttggtcttgaaatatatcagtcatgaatgcttgaagcgggtattttggtgccaaaacaccttagtccaagcatcaacgtaatcccaataggtataacctaccggatcaaatggaactgaaaatctctttcctttgttcaagtccaaaccaaagtgtcttggttgaagaacttttagtatttggattgtcgagtgggtgtttaaggtttggtcttttggatctttgaaatgtttgatagatactgagtttgaatctaccaaaatcaattcataaaagttcttgtctttaggatggtggttggtttgtagtgaaatcctgg

SEQ ID NO: 8340 - DNA, 1164 bp, Glycine max
  Gm_smallRNAprecursor_1173
gaaagaagcgcttacaaaaatcttgtttcagagcacctctcttcagaaacctgaaaaatggctaaatgaaagggtacctcacaacatacttgaggactccttatatagccaaaaatctaagaccggtagttttgaccgggactatttgactctttgttacaagacaagtagttttgaccgggactttaatggctacaagacaggtagtattgtccagcattaattacacattaattacaaacagactgttttgtgaccgaaattaaatttaatctaaacagataccaaaacaatcatcttcgttttggtaaaagggatcttcttcttcttcttcagcagaacttgtttcttccttctttgaggatgaagcttcttcttcctgctgtaacatttgtagaaattccttcagatttttagctaagacctcctttgatgtcgatcctgctaaaaatgctgccagatgagacttttggttcaaaaacacagaagtttctggatcagctgctttgaggaattctggatgggattggaaccagagttttacttgttctggatccgctttggatgagtgaaattatgcccaccattttacgaatgcgtgcctttgtagtgatggatattggtttgtcttttcagtcttgctgtaacgatattgccatgagaatatccatgacagtgcaaagcttgaaaagtatttaagatatgctggaattcgtgattcctgcgaattgtattgtttcttaaattgggcaaatccttgttggaccgtttctgggaatatctctgggattggtccaaagaagtcccaccattgcaaaaaccaattgggaaaattgtaaattgtgttggtcttgaaatatatcagtcatgaatgcttgaagcgggtattttggtgccaaaacaccttagtccaagcatcaacgtaatcccaataggtataacctaccggatcaaatggaactgaaaatctctttcctttgttcaagtccaaaccaaagtgtcttggttgaagaacttttagtatttggattgtcgagtgggtgtttaaggtttggtcttttggatctttgaaatgtttgatagatactgagtttgaatctaccaaaatcaattcataaaagttcttgtctttaggatggtggttggtttgtagtgaaatcctgg

SEQ ID NO: 8341 - DNA, 1163 bp, Glycine max
  Gm_smallRNAprecursor_1174
aaagaagcgcttacaaaaatcttgtttcagagcacctctcttcagaaacctgaaaaatggctaaatgaaagggtacctcacaacatacttgaggactccttatatagccaaaaatctaagaccggtagttttgaccgggactatttgactctttgttacaagacaagtagttttgaccgggactttaatggctacaagacaggtagtattgtccagcattaattacacattaattacaaacagactgttttgtgaccgaaattaaatttaatctaaacagataccaaaacaatcatcttcgttttggtaaaagggatcttcttcttcttcttcagcagaacttgtttcttccttctttgaggatgaagcttcttcttcctgctgtaacatttgtagaaattccttcagatttttagctaagacctcctttgatgtcgatcctgctaaaaatgctgccagatgagacttttggttcaaaaacacagaagtttctggatcagctgctttgaggaattctggatgggattggaaccagagttttacttgttctggatccgctttggatgagtgaaattatgcccaccattttacgaatgcgtgcctttgtagtgatggatattggtttgtcttttcagtcttgctgtaacgatattgccatgagaatatccatgacagtgcaaagcttgaaaagtatttaagatatgctggaattcgtgattcctgcgaattgtattgtttcttaaattgggcaaatccttgttggaccgtttctgggaatatctctgggattggtccaaagaagtcccaccattgcaaaaaccaattgggaaaattgtaaattgtgttggtcttgaaatatatcagtcatgaatgcttgaagcgggtattttggtgccaaaacaccttagtccaagcatcaacgtaatcccaataggtataacctaccggatcaaatggaactgaaaatctctttcctttgttcaagtccaaaccaaagtgtcttggttgaagaacttttagtatttggattgtcgagtgggtgtttaaggtttggtcttttggatctttgaaatgtttgatagatactgagtttgaatctaccaaaatcaattcataaaagttcttgtctttaggatggtggttggtttgtagtgaaatcctgg

SEQ ID NO: 8342 - DNA, 1130 bp, Glycine max
  Gm_smallRNAprecursor_1175
acctctcttcagaaacctgaaaaatggctaaatgaaagggtacctcacaacatacttgaggactccttatatagccaaaaatctaagaccggtagttttgaccgggactatttgactctttgttacaagacaagtagttttgaccgggactttaatggctacaagacaggtagtattgtccagcattaattacacattaattacaaacagactgttttgtgaccgaaattaaatttaatctaaacagataccaaaacaatcatcttcgttttggtaaaagggatcttcttcttcttcttcagcagaacttgtttcttccttctttgaggatgaagcttcttcttcctgctgtaacatttgtagaaattccttcagatttttagctaagacctcctttgatgtcgatcctgctaaaaatgctgccagatgagacttttggttcaaaaacacagaagtttctggatcagctgctttgaggaattctggatgggattggaaccagagttttacttgttctggatccgctttggatgagtgaaattatgcccaccattttacgaatgcgtgcctttgtagtgatggatattggtttgtcttttcagtcttgctgtaacgatattgccatgagaatatccatgacagtgcaaagcttgaaaagtatttaagatatgctggaattcgtgattcctgcgaattgtattgtttcttaaattgggcaaatccttgttggaccgtttctgggaatatctctgggattggtccaaagaagtcccaccattgcaaaaaccaattgggaaaattgtaaattgtgttggtcttgaaatatatcagtcatgaatgcttgaagcgggtattttggtgccaaaacaccttagtccaagcatcaacgtaatcccaataggtataacctaccggatcaaatggaactgaaaatctctttcctttgttcaagtccaaaccaaagtgtcttggttgaagaacttttagtatttggattgtcgagtgggtgtttaaggtttggtcttttggatctttgaaatgtttgatagatactgagtttgaatctaccaaaatcaattcataaaagttcttgtctttaggatggtggttggtttgtagtgaaatcctgg

SEQ ID NO: 8343 - DNA, 1131 bp, Glycine max
  Gm_smallRNAprecursor_1176
acaagtagttttgaccgggactttaatggctacaagacaggtagtattgtccagcattaattacacattaattacaaacagactgttttgtgaccgaaattaaatttaatctaaacagataccaaaacaatcatcttcgttttggtaaaagggatcttcttcttcttcttcagcagaacttgtttcttccttctttgaggatgaagcttcttcttcctgctgtaacatttgtagaaattccttcagatttttagctaagacctcctttgatgtcgatcctgctaaaaatgctgccagatgagacttttggttcaaaaacacagaagtttctggatcagctgctttgaggaattctggatgggattggaaccagagttttacttgttctggatccgctttggatgagtgaaattatgcccaccattttacgaatgcgtgcctttgtagtgatggatattggtttgtcttttcagtcttgctgtaacgatattgccatgagaatatccatgacagtgcaaagcttgaaaagtatttaagatatgctggaattcgtgattcctgcgaattgtattgtttcttaaattgggcaaatccttgttggaccgtttctgggaatatctctgggattggtccaaagaagtcccaccattgcaaaaaccaattgggaaaattgtaaattgtgttggtcttgaaatatatcagtcatgaatgcttgaagcgggtattttggtgccaaaacaccttagtccaagcatcaacgtaatcccaataggtataacctaccggatcaaatggaactgaaaatctctttcctttgttcaagtccaaaccaaagtgtcttggttgaagaacttttagtatttggattgtcgagtgggtgtttaaggtttggtcttttggatctttgaaatgtttgatagatactgagtttgaatctaccaaaatcaattcataaaagttcttgtctttaggatggtggttggtttgtagtgaaatcctggtgggaaagccttggccgtcgccttgaaaggatttttgtcccaaaattcaggttccatctgcaaaacagttaacaatttatttttataaatataattgttagtttgtttggtaggtggtgtttgagctttg

SEQ ID NO: 8344 - DNA, 1080 bp, Glycine max
  Gm_smallRNAprecursor_1177
ttcagcagaacttgtttcttccttctttgaggatgaagcttcttcttcctgctgtaacatttgtagaaattccttcagatttttagctaagacctcctttgatgtcgatcctgctaaaaatgctgccagatgagacttttggttcaaaaacacagaagtttctggatcagctgctttgaggaattctggatgggattggaaccagagttttacttgttctggatccgctttggatgagtgaaattatgcccaccattttacgaatgcgtgcctttgtagtgatggatattggtttgtcttttcagtcttgctgtaacgatattgccatgagaatatccatgacagtgcaaagcttgaaaagtatttaagatatgctggaattcgtgattcctgcgaattgtattgtttcttaaattgggcaaatccttgttggaccgtttctgggaatatctctgggattggtccaaagaagtcccaccattgcaaaaaccaattgggaaaattgtaaattgtgttggtcttgaaatatatcagtcatgaatgcttgaagcgggtattttggtgccaaaacaccttagtccaagcatcaacgtaatcccaataggtataacctaccggatcaaatggaactgaaaatctctttcctttgttcaagtccaaaccaaagtgtcttggttgaagaacttttagtatttggattgtcgagtgggtgtttaaggtttggtcttttggatctttgaaatgtttgatagatactgagtttgaatctaccaaaatcaattcataaaagttcttgtctttaggatggtggttggtttgtagtgaaatcctggtgggaaagccttggccgtcgccttgaaaggatttttgtcccaaaattcaggttccatctgcaaaacagttaacaatttatttttataaatataattgttagtttgtttggtaggtggtgtttgagctttggctaaaggtagttttcctttagtattggtggctgttttggtcattgacgcattttggatcattgtttgtaaatttgattcagattcatcatcagattctgaggcaatgtctgcccaa

SEQ ID NO: 8345 - DNA, 1104 bp, Glycine max
  Gm_smallRNAprecursor_1178
ttcagcagaacttgtttcttccttctttgaggatgaagcttcttcttcctgctgtaacatttgtagaaattccttcagatttttagctaagacctcctttgatgtcgatcctgctaaaaatgctgccagatgagacttttggttcaaaaacacagaagtttctggatcagctgctttgaggaattctggatgggattggaaccagagttttacttgttctggatccgctttggatgagtgaaattatgcccaccattttacgaatgcgtgcctttgtagtgatggatattggtttgtcttttcagtcttgctgtaacgatattgccatgagaatatccatgacagtgcaaagcttgaaaagtatttaagatatgctggaattcgtgattcctgcgaattgtattgtttcttaaattgggcaaatccttgttggaccgtttctgggaatatctctgggattggtccaaagaagtcccaccattgcaaaaaccaattgggaaaattgtaaattgtgttggtcttgaaatatatcagtcatgaatgcttgaagcgggtattttggtgccaaaacaccttagtccaagcatcaacgtaatcccaataggtataacctaccggatcaaatggaactgaaaatctctttcctttgttcaagtccaaaccaaagtgtcttggttgaagaacttttagtatttggattgtcgagtgggtgtttaaggtttggtcttttggatctttgaaatgtttgatagatactgagtttgaatctaccaaaatcaattcataaaagttcttgtctttaggatggtggttggtttgtagtgaaatcctggtgggaaagccttggccgtcgccttgaaaggatttttgtcccaaaattcaggttccatctgcaaaacagttaacaatttatttttataaatataattgttagtttgtttggtaggtggtgtttgagctttggctaaaggtagttttcctttagtattggtggctgttttggtcattgacgcattttggatcattgtttgtaaatttgattcagattcatcatcagattctgaggcaatgtctgcccaagattttttgattatttttggaaat

SEQ ID NO: 8346 - DNA, 1107 bp, Glycine max
  Gm_smallRNAprecursor_1179
gtagaaattccttcagatttttagctaagacctcctttgatgtcgatcctgctaaaaatgctgccagatgagacttttggttcaaaaacacagaagtttctggatcagctgctttgaggaattctggatgggattggaaccagagttttacttgttctggatccgctttggatgagtgaaattatgcccaccattttacgaatgcgtgcctttgtagtgatggatattggtttgtcttttcagtcttgctgtaacgatattgccatgagaatatccatgacagtgcaaagcttgaaaagtatttaagatatgctggaattcgtgattcctgcgaattgtattgtttcttaaattgggcaaatccttgttggaccgtttctgggaatatctctgggattggtccaaagaagtcccaccattgcaaaaaccaattgggaaaattgtaaattgtgttggtcttgaaatatatcagtcatgaatgcttgaagcgggtattttggtgccaaaacaccttagtccaagcatcaacgtaatcccaataggtataacctaccggatcaaatggaactgaaaatctctttcctttgttcaagtccaaaccaaagtgtcttggttgaagaacttttagtatttggattgtcgagtgggtgtttaaggtttggtcttttggatctttgaaatgtttgatagatactgagtttgaatctaccaaaatcaattcataaaagttcttgtctttaggatggtggttggtttgtagtgaaatcctggtgggaaagccttggccgtcgccttgaaaggatttttgtcccaaaattcaggttccatctgcaaaacagttaacaatttatttttataaatataattgttagtttgtttggtaggtggtgtttgagctttggctaaaggtagttttcctttagtattggtggctgttttggtcattgacgcattttggatcattgtttgtaaatttgattcagattcatcatcagattctgaggcaatgtctgcccaagattttttgattatttttggaaatttggtcagacccatgtcttgaagggcctgaagggtttcaattggccatgcatagtcggctgatgt

SEQ ID NO: 8347 - DNA, 1107 bp, Glycine max; identical to SEQ ID NO: 8346
  Gm_smallRNAprecursor_1180

SEQ ID NO: 8348 - DNA, 1108 bp, Glycine max
  Gm_smallRNAprecursor_1181
gtagaaattccttcagatttttagctaagacctcctttgatgtcgatcctgctaaaaatgctgccagatgagacttttggttcaaaaacacagaagtttctggatcagctgctttgaggaattctggatgggattggaaccagagttttacttgttctggatccgctttggatgagtgaaattatgcccaccattttacgaatgcgtgcctttgtagtgatggatattggtttgtcttttcagtcttgctgtaacgatattgccatgagaatatccatgacagtgcaaagcttgaaaagtatttaagatatgctggaattcgtgattcctgcgaattgtattgtttcttaaattgggcaaatccttgttggaccgtttctgggaatatctctgggattggtccaaagaagtcccaccattgcaaaaaccaattgggaaaattgtaaattgtgttggtcttgaaatatatcagtcatgaatgcttgaagcgggtattttggtgccaaaacaccttagtccaagcatcaacgtaatcccaataggtataacctaccggatcaaatggaactgaaaatctctttcctttgttcaagtccaaaccaaagtgtcttggttgaagaacttttagtatttggattgtcgagtgggtgtttaaggtttggtcttttggatctttgaaatgtttgatagatactgagtttgaatctaccaaaatcaattcataaaagttcttgtctttaggatggtggttggtttgtagtgaaatcctggtgggaaagccttggccgtcgccttgaaaggatttttgtcccaaaattcaggttccatctgcaaaacagttaacaatttatttttataaatataattgttagtttgtttggtaggtggtgtttgagctttggctaaaggtagttttcctttagtattggtggctgttttggtcattgacgcattttggatcattgtttgtaaatttgattcagattcatcatcagattctgaggcaatgtctgcccaagattttttgattatttttggaaatttggtcagacccatgtcttgaagggcctgaagggtttcaattggccatgcatagtcggctgatgtt

SEQ ID NO: 8349 - DNA, 1101 bp, Glycine max
  Gm_smallRNAprecursor_1182
gaaattccttcagatttttagctaagacctcctttgatgtcgatcctgctaaaaatgctgccagatgagacttttggttcaaaaacacagaagtttctggatcagctgctttgaggaattctggatgggattggaaccagagttttacttgttctggatccgctttggatgagtgaaattatgcccaccattttacgaatgcgtgcctttgtagtgatggatattggtttgtcttttcagtcttgctgtaacgatattgccatgagaatatccatgacagtgcaaagcttgaaaagtatttaagatatgctggaattcgtgattcctgcgaattgtattgtttcttaaattgggcaaatccttgttggaccgtttctgggaatatctctgggattggtccaaagaagtcccaccattgcaaaaaccaattgggaaaattgtaaattgtgttggtcttgaaatatatcagtcatgaatgcttgaagcgggtattttggtgccaaaacaccttagtccaagcatcaacgtaatcccaataggtataacctaccggatcaaatggaactgaaaatctctttcctttgttcaagtccaaaccaaagtgtcttggttgaagaacttttagtatttggattgtcgagtgggtgtttaaggtttggtcttttggatctttgaaatgtttgatagatactgagtttgaatctaccaaaatcaattcataaaagttcttgtctttaggatggtggttggtttgtagtgaaatcctggtgggaaagccttggccgtcgccttgaaaggatttttgtcccaaaattcaggttccatctgcaaaacagttaacaatttatttttataaatataattgttagtttgtttggtaggtggtgtttgagctttggctaaaggtagttttcctttagtattggtggctgttttggtcattgacgcattttggatcattgtttgtaaatttgattcagattcatcatcagattctgaggcaatgtctgcccaagattttttgattatttttggaaatttggtcagacccatgtcttgaagggcctgaagggtttcaattggccatgcatagtcggctga

SEQ ID NO: 8350 - DNA, 1140 bp, Glycine max
  Gm_smallRNAprecursor_1183
tttttagctaagacctcctttgatgtcgatcctgctaaaaatgctgccagatgagacttttggttcaaaaacacagaagtttctggatcagctgctttgaggaattctggatgggattggaaccagagttttacttgttctggatccgctttggatgagtgaaattatgcccaccattttacgaatgcgtgcctttgtagtgatggatattggtttgtcttttcagtcttgctgtaacgatattgccatgagaatatccatgacagtgcaaagcttgaaaagtatttaagatatgctggaattcgtgattcctgcgaattgtattgtttcttaaattgggcaaatccttgttggaccgtttctgggaatatctctgggattggtccaaagaagtcccaccattgcaaaaaccaattgggaaaattgtaaattgtgttggtcttgaaatatatcagtcatgaatgcttgaagcgggtattttggtgccaaaacaccttagtccaagcatcaacgtaatcccaataggtataacctaccggatcaaatggaactgaaaatctctttcctttgttcaagtccaaaccaaagtgtcttggttgaagaacttttagtatttggattgtcgagtgggtgtttaaggtttggtcttttggatctttgaaatgtttgatagatactgagtttgaatctaccaaaatcaattcataaaagttcttgtctttaggatggtggttggtttgtagtgaaatcctggtgggaaagccttggccgtcgccttgaaaggatttttgtcccaaaattcaggttccatctgcaaaacagttaacaatttatttttataaatataattgttagtttgtttggtaggtggtgtttgagctttggctaaaggtagttttcctttagtattggtggctgttttggtcattgacgcattttggatcattgtttgtaaatttgattcagattcatcatcagattctgaggcaatgtctgcccaagattttttgattatttttggaaatttggtcagacccatgtcttgaagggcctgaagggtttcaattggccatgcatagtcggctgatgtttgtttggcggttgccggtttgggagattcctgagtggatggctcaggtt

SEQ ID NO: 8351 - DNA, 1223 bp, Glycine max
  Gm_smallRNAprecursor_1184
tgctttgaggaattctggatgggattggaaccagagttttacttgttctggatccgctttggatgagtgaaattatgcccaccattttacgaatgcgtgcctttgtagtgatggatattggtttgtcttttcagtcttgctgtaacgatattgccatgagaatatccatgacagtgcaaagcttgaaaagtatttaagatatgctggaattcgtgattcctgcgaattgtattgtttcttaaattgggcaaatccttgttggaccgtttctgggaatatctctgggattggtccaaagaagtcccaccattgcaaaaaccaattgggaaaattgtaaattgtgttggtcttgaaatatatcagtcatgaatgcttgaagcgggtattttggtgccaaaacaccttagtccaagcatcaacgtaatcccaataggtataacctaccggatcaaatggaactgaaaatctctttcctttgttcaagtccaaaccaaagtgtcttggttgaagaacttttagtatttggattgtcgagtgggtgtttaaggtttggtcttttggatctttgaaatgtttgatagatactgagtttgaatctaccaaaatcaattcataaaagttcttgtctttaggatggtggttggtttgtagtgaaatcctggtgggaaagccttggccgtcgccttgaaaggatttttgtcccaaaattcaggttccatctgcaaaacagttaacaatttatttttataaatataattgttagtttgtttggtaggtggtgtttgagctttggctaaaggtagttttcctttagtattggtggctgttttggtcattgacgcattttggatcattgtttgtaaatttgattcagattcatcatcagattctgaggcaatgtctgcccaagattttttgattatttttggaaatttggtcagacccatgtcttgaagggcctgaagggtttcaattggccatgcatagtcggctgatgtttgtttggcggttgccggtttgggagattcctgagtggatggctcaggtttgattgaggcaatctgggttgatgacccttctaaattggttttctgggtagatgacccagcctgagttggtgacccagaagaggttgatgatttcttgatggttggctctggaagagccagtctggctcctttgcctgtactccttcctccccttagggagattcccgatgcctt

SEQ ID NO: 8352 - DNA, 1221 bp, Glycine max
  Gm_smallRNAprecursor_1185
ctttgaggaattctggatgggattggaaccagagttttacttgttctggatccgctttggatgagtgaaattatgcccaccattttacgaatgcgtgcctttgtagtgatggatattggtttgtcttttcagtcttgctgtaacgatattgccatgagaatatccatgacagtgcaaagcttgaaaagtatttaagatatgctggaattcgtgattcctgcgaattgtattgtttcttaaattgggcaaatccttgttggaccgtttctgggaatatctctgggattggtccaaagaagtcccaccattgcaaaaaccaattgggaaaattgtaaattgtgttggtcttgaaatatatcagtcatgaatgcttgaagcgggtattttggtgccaaaacaccttagtccaagcatcaacgtaatcccaataggtataacctaccggatcaaatggaactgaaaatctctttcctttgttcaagtccaaaccaaagtgtcttggttgaagaacttttagtatttggattgtcgagtgggtgtttaaggtttggtcttttggatctttgaaatgtttgatagatactgagtttgaatctaccaaaatcaattcataaaagttcttgtctttaggatggtggttggtttgtagtgaaatcctggtgggaaagccttggccgtcgccttgaaaggatttttgtcccaaaattcaggttccatctgcaaaacagttaacaatttatttttataaatataattgttagtttgtttggtaggtggtgtttgagctttggctaaaggtagttttcctttagtattggtggctgttttggtcattgacgcattttggatcattgtttgtaaatttgattcagattcatcatcagattctgaggcaatgtctgcccaagattttttgattatttttggaaatttggtcagacccatgtcttgaagggcctgaagggtttcaattggccatgcatagtcggctgatgtttgtttggcggttgccggtttgggagattcctgagtggatggctcaggtttgattgaggcaatctgggttgatgacccttctaaattggttttctgggtagatgacccagcctgagttggtgacccagaagaggttgatgatttcttgatggttggctctggaagagccagtctggctcctttgcctgtactccttcctccccttagggagattcccgatgcctt

SEQ ID NO: 8353 - DNA, 1058 bp, Glycine max
  Gm_smallRNAprecursor_1186
tacttgttctggatccgctttggatgagtgaaattatgcccaccattttacgaatgcgtgcctttgtagtgatggatattggtttgtcttttcagtcttgctgtaacgatattgccatgagaatatccatgacagtgcaaagcttgaaaagtatttaagatatgctggaattcgtgattcctgcgaattgtattgtttcttaaattgggcaaatccttgttggaccgtttctgggaatatctctgggattggtccaaagaagtcccaccattgcaaaaaccaattgggaaaattgtaaattgtgttggtcttgaaatatatcagtcatgaatgcttgaagcgggtattttggtgccaaaacaccttagtccaagcatcaacgtaatcccaataggtataacctaccggatcaaatggaactgaaaatctctttcctttgttcaagtccaaaccaaagtgtcttggttgaagaacttttagtatttggattgtcgagtgggtgtttaaggtttggtcttttggatctttgaaatgtttgatagatactgagtttgaatctaccaaaatcaattcataaaagttcttgtctttaggatggtggttggtttgtagtgaaatcctggtgggaaagccttggccgtcgccttgaaaggatttttgtcccaaaattcaggttccatctgcaaaacagttaacaatttatttttataaatataattgttagtttgtttggtaggtggtgtttgagctttggctaaaggtagttttcctttagtattggtggctgttttggtcattgacgcattttggatcattgtttgtaaatttgattcagattcatcatcagattctgaggcaatgtctgcccaagattttttgattatttttggaaatttggtcagacccatgtcttgaagggcctgaagggtttcaattggccatgcatagtcggctgatgtttgtttggcggttgccggtttgggagattcctgagtggatggctcaggtttgattgaggcaatctgggttgatgacccttctaaattggttttctgggt

SEQ ID NO: 8354 - DNA, 1175 bp, Glycine max
  Gm_smallRNAprecursor_1187
tacttgttctggatccgctttggatgagtgaaattatgcccaccattttacgaatgcgtgcctttgtagtgatggatattggtttgtcttttcagtcttgctgtaacgatattgccatgagaatatccatgacagtgcaaagcttgaaaagtatttaagatatgctggaattcgtgattcctgcgaattgtattgtttcttaaattgggcaaatccttgttggaccgtttctgggaatatctctgggattggtccaaagaagtcccaccattgcaaaaaccaattgggaaaattgtaaattgtgttggtcttgaaatatatcagtcatgaatgcttgaagcgggtattttggtgccaaaacaccttagtccaagcatcaacgtaatcccaataggtataacctaccggatcaaatggaactgaaaatctctttcctttgttcaagtccaaaccaaagtgtcttggttgaagaacttttagtatttggattgtcgagtgggtgtttaaggtttggtcttttggatctttgaaatgtttgatagatactgagtttgaatctaccaaaatcaattcataaaagttcttgtctttaggatggtggttggtttgtagtgaaatcctggtgggaaagccttggccgtcgccttgaaaggatttttgtcccaaaattcaggttccatctgcaaaacagttaacaatttatttttataaatataattgttagtttgtttggtaggtggtgtttgagctttggctaaaggtagttttcctttagtattggtggctgttttggtcattgacgcattttggatcattgtttgtaaatttgattcagattcatcatcagattctgaggcaatgtctgcccaagattttttgattatttttggaaatttggtcagacccatgtcttgaagggcctgaagggtttcaattggccatgcatagtcggctgatgtttgtttggcggttgccggtttgggagattcctgagtggatggctcaggtttgattgaggcaatctgggttgatgacccttctaaattggttttctgggtagatgacccagcctgagttggtgacccagaagaggttgatgatttcttgatggttggctctggaagagccagtctggctcctttgcctgtactccttcctccccttagggagattcc

SEQ ID NO: 8355 - DNA, 1182 bp, Glycine max
  Gm_smallRNAprecursor_1188
tacttgttctggatccgctttggatgagtgaaattatgcccaccattttacgaatgcgtgcctttgtagtgatggatattggtttgtcttttcagtcttgctgtaacgatattgccatgagaatatccatgacagtgcaaagcttgaaaagtatttaagatatgctggaattcgtgattcctgcgaattgtattgtttcttaaattgggcaaatccttgttggaccgtttctgggaatatctctgggattggtccaaagaagtcccaccattgcaaaaaccaattgggaaaattgtaaattgtgttggtcttgaaatatatcagtcatgaatgcttgaagcgggtattttggtgccaaaacaccttagtccaagcatcaacgtaatcccaataggtataacctaccggatcaaatggaactgaaaatctctttcctttgttcaagtccaaaccaaagtgtcttggttgaagaacttttagtatttggattgtcgagtgggtgtttaaggtttggtcttttggatctttgaaatgtttgatagatactgagtttgaatctaccaaaatcaattcataaaagttcttgtctttaggatggtggttggtttgtagtgaaatcctggtgggaaagccttggccgtcgccttgaaaggatttttgtcccaaaattcaggttccatctgcaaaacagttaacaatttatttttataaatataattgttagtttgtttggtaggtggtgtttgagctttggctaaaggtagttttcctttagtattggtggctgttttggtcattgacgcattttggatcattgtttgtaaatttgattcagattcatcatcagattctgaggcaatgtctgcccaagattttttgattatttttggaaatttggtcagacccatgtcttgaagggcctgaagggtttcaattggccatgcatagtcggctgatgtttgtttggcggttgccggtttgggagattcctgagtggatggctcaggtttgattgaggcaatctgggttgatgacccttctaaattggttttctgggtagatgacccagcctgagttggtgacccagaagaggttgatgatttcttgatggttggctctggaagagccagtctggctcctttgcctgtactccttcctccccttagggagattcccgatgcc

SEQ ID NO: 8356 - DNA, 1158 bp, Glycine max
  Gm_smallRNAprecursor_1189
ctggatccgctttggatgagtgaaattatgcccaccattttacgaatgcgtgcctttgtagtgatggatattggtttgtcttttcagtcttgctgtaacgatattgccatgagaatatccatgacagtgcaaagcttgaaaagtatttaagatatgctggaattcgtgattcctgcgaattgtattgtttcttaaattgggcaaatccttgttggaccgtttctgggaatatctctgggattggtccaaagaagtcccaccattgcaaaaaccaattgggaaaattgtaaattgtgttggtcttgaaatatatcagtcatgaatgcttgaagcgggtattttggtgccaaaacaccttagtccaagcatcaacgtaatcccaataggtataacctaccggatcaaatggaactgaaaatctctttcctttgttcaagtccaaaccaaagtgtcttggttgaagaacttttagtatttggattgtcgagtgggtgtttaaggtttggtcttttggatctttgaaatgtttgatagatactgagtttgaatctaccaaaatcaattcataaaagttcttgtctttaggatggtggttggtttgtagtgaaatcctggtgggaaagccttggccgtcgccttgaaaggatttttgtcccaaaattcaggttccatctgcaaaacagttaacaatttatttttataaatataattgttagtttgtttggtaggtggtgtttgagctttggctaaaggtagttttcctttagtattggtggctgttttggtcattgacgcattttggatcattgtttgtaaatttgattcagattcatcatcagattctgaggcaatgtctgcccaagattttttgattatttttggaaatttggtcagacccatgtcttgaagggcctgaagggtttcaattggccatgcatagtcggctgatgtttgtttggcggttgccggtttgggagattcctgagtggatggctcaggtttgattgaggcaatctgggttgatgacccttctaaattggttttctgggtagatgacccagcctgagttggtgacccagaagaggttgatgatttcttgatggttggctctggaagagccagtctggctcctttgcctgtactccttcctccccttag

SEQ ID NO: 8357 - DNA, 1097 bp, Glycine max
  Gm_smallRNAprecursor_1190
gtgcctttgtagtgatggatattggtttgtcttttcagtcttgctgtaacgatattgccatgagaatatccatgacagtgcaaagcttgaaaagtatttaagatatgctggaattcgtgattcctgcgaattgtattgtttcttaaattgggcaaatccttgttggaccgtttctgggaatatctctgggattggtccaaagaagtcccaccattgcaaaaaccaattgggaaaattgtaaattgtgttggtcttgaaatatatcagtcatgaatgcttgaagcgggtattttggtgccaaaacaccttagtccaagcatcaacgtaatcccaataggtataacctaccggatcaaatggaactgaaaatctctttcctttgttcaagtccaaaccaaagtgtcttggttgaagaacttttagtatttggattgtcgagtgggtgtttaaggtttggtcttttggatctttgaaatgtttgatagatactgagtttgaatctaccaaaatcaattcataaaagttcttgtctttaggatggtggttggtttgtagtgaaatcctggtgggaaagccttggccgtcgccttgaaaggatttttgtcccaaaattcaggttccatctgcaaaacagttaacaatttatttttataaatataattgttagtttgtttggtaggtggtgtttgagctttggctaaaggtagttttcctttagtattggtggctgttttggtcattgacgcattttggatcattgtttgtaaatttgattcagattcatcatcagattctgaggcaatgtctgcccaagattttttgattatttttggaaatttggtcagacccatgtcttgaagggcctgaagggtttcaattggccatgcatagtcggctgatgtttgtttggcggttgccggtttgggagattcctgagtggatggctcaggtttgattgaggcaatctgggttgatgacccttctaaattggttttctgggtagatgacccagcctgagttggtgacccagaagaggttgatgatttcttgatggttggctctggaagagccagtctggctcctttgcctgtactcct

SEQ ID NO: 8358 - DNA, 1090 bp, Glycine max
  Gm_smallRNAprecursor_1191
tgcgaattgtattgtttcttaaattgggcaaatccttgttggaccgtttctgggaatatctctgggattggtccaaagaagtcccaccattgcaaaaaccaattgggaaaattgtaaattgtgttggtcttgaaatatatcagtcatgaatgcttgaagcgggtattttggtgccaaaacaccttagtccaagcatcaacgtaatcccaataggtataacctaccggatcaaatggaactgaaaatctctttcctttgttcaagtccaaaccaaagtgtcttggttgaagaacttttagtatttggattgtcgagtgggtgtttaaggtttggtcttttggatctttgaaatgtttgatagatactgagtttgaatctaccaaaatcaattcataaaagttcttgtctttaggatggtggttggtttgtagtgaaatcctggtgggaaagccttggccgtcgccttgaaaggatttttgtcccaaaattcaggttccatctgcaaaacagttaacaatttatttttataaatataattgttagtttgtttggtaggtggtgtttgagctttggctaaaggtagttttcctttagtattggtggctgttttggtcattgacgcattttggatcattgtttgtaaatttgattcagattcatcatcagattctgaggcaatgtctgcccaagattttttgattatttttggaaatttggtcagacccatgtcttgaagggcctgaagggtttcaattggccatgcatagtcggctgatgtttgtttggcggttgccggtttgggagattcctgagtggatggctcaggtttgattgaggcaatctgggttgatgacccttctaaattggttttctgggtagatgacccagcctgagttggtgacccagaagaggttgatgatttcttgatggttggctctggaagagccagtctggctcctttgcctgtactccttcctccccttagggagattcccgatgccttaggaggcattaccacttttctgtaagaattcacgggtaaggtagtcagataatgagtttgaggtgcccttgatgtattctatgtcaa

SEQ ID NO: 8359 - DNA, 1113 bp, Glycine max
  Gm_smallRNAprecursor_1192
ggaaatttggtcagacccatgtcttgaagggcctgaagggtttcaattggccatgcatagtcggctgatgtttgtttggcggttgccggtttgggagattcctgagtggatggctcaggtttgattgaggcaatctgggttgatgacccttctaaattggttttctgggtagatgacccagcctgagttggtgacccagaagaggttgatgatttcttgatggttggctctggaagagccagtctggctcctttgcctgtactccttcctccccttagggagattcccgatgccttaggaggcattaccacttttctgtaagaattcacgggtaaggtagtcagataatgagtttgaggtgcccttgatgtattctatgtcaaaatcaaagacacttagaattgcttgccatcttgcaaaaatttgttttgaggcaaggtttttaacatctttttgtaaaatatctttggctgatttacaatcaaccctgattagaaatttttggtttaataaatccgattgaaatttggaaatgcacaaaacaattgctaaaacttcttttttaacagttgaatactttaattgtgcaggattccaatgttttgatgtatatgcaatgacatgatcttggccatggactctttgtttgaggatgccaccataacctatgtctgaagcatcagtttcgacaattttaaatgcctgtggaataggaagatacagacatttaatggattggactttgactttgatttctttaacagtttgtgtatggaggtcagaccaaggaggcggatttttcttcagcctatcatgcaatggcttgacaatattgtttaaataggggacaaattctcctacgtaatttagacaacctagaaatctttgtaactgggttttgtctaagatttggttggggaatttgctagcaaactctattgacctttcgattggaatgattgtaccttgatatatattgtgaccaaggaatcgaattcgagtttggaaaagattgatttttgatttggagactgccaaaccattttgtttgatgatatgtatgaaggtttgaagatgtttgaaatgttggtcaatgttttgggaaaagattaa

SEQ ID NO: 8360 - DNA, 1113 bp, Glycine max; identical to SEQ ID NO: 8359
  Gm_smallRNAprecursor_1193

SEQ ID NO: 8361 - DNA, 1114 bp, Glycine max
  Gm_smallRNAprecursor_1194
ggaaatttggtcagacccatgtcttgaagggcctgaagggtttcaattggccatgcatagtcggctgatgtttgtttggcggttgccggtttgggagattcctgagtggatggctcaggtttgattgaggcaatctgggttgatgacccttctaaattggttttctgggtagatgacccagcctgagttggtgacccagaagaggttgatgatttcttgatggttggctctggaagagccagtctggctcctttgcctgtactccttcctccccttagggagattcccgatgccttaggaggcattaccacttttctgtaagaattcacgggtaaggtagtcagataatgagtttgaggtgcccttgatgtattctatgtcaaaatcaaagacacttagaattgcttgccatcttgcaaaaatttgttttgaggcaaggtttttaacatctttttgtaaaatatctttggctgatttacaatcaaccctgattagaaatttttggtttaataaatccgattgaaatttggaaatgcacaaaacaattgctaaaacttcttttttaacagttgaatactttaattgtgcaggattccaatgttttgatgtatatgcaatgacatgatcttggccatggactctttgtttgaggatgccaccataacctatgtctgaagcatcagtttcgacaattttaaatgcctgtggaataggaagatacagacatttaatggattggactttgactttgatttctttaacagtttgtgtatggaggtcagaccaaggaggcggatttttcttcagcctatcatgcaatggcttgacaatattgtttaaataggggacaaattctcctacgtaatttagacaacctagaaatctttgtaactgggttttgtctaagatttggttggggaatttgctagcaaactctattgacctttcgattggaatgattgtaccttgatatatattgtgaccaaggaatcgaattcgagtttggaaaagattgatttttgatttggagactgccaaaccattttgtttgatgatatgtatgaaggtttgaagatgtttgaaatgttggtcaatgttttgggaaaagattaaa

SEQ ID NO: 8362 - DNA, 1207 bp, Glycine max
  Gm_smallRNAprecursor_1195
ggaaatttggtcagacccatgtcttgaagggcctgaagggtttcaattggccatgcatagtcggctgatgtttgtttggcggttgccggtttgggagattcctgagtggatggctcaggtttgattgaggcaatctgggttgatgacccttctaaattggttttctgggtagatgacccagcctgagttggtgacccagaagaggttgatgatttcttgatggttggctctggaagagccagtctggctcctttgcctgtactccttcctccccttagggagattcccgatgccttaggaggcattaccacttttctgtaagaattcacgggtaaggtagtcagataatgagtttgaggtgcccttgatgtattctatgtcaaaatcaaagacacttagaattgcttgccatcttgcaaaaatttgttttgaggcaaggtttttaacatctttttgtaaaatatctttggctgatttacaatcaaccctgattagaaatttttggtttaataaatccgattgaaatttggaaatgcacaaaacaattgctaaaacttcttttttaacagttgaatactttaattgtgcaggattccaatgttttgatgtatatgcaatgacatgatcttggccatggactctttgtttgaggatgccaccataacctatgtctgaagcatcagtttcgacaattttaaatgcctgtggaataggaagatacagacatttaatggattggactttgactttgatttctttaacagtttgtgtatggaggtcagaccaaggaggcggatttttcttcagcctatcatgcaatggcttgacaatattgtttaaataggggacaaattctcctacgtaatttagacaacctagaaatctttgtaactgggttttgtctaagatttggttggggaatttgctagcaaactctattgacctttcgattggaatgattgtaccttgatatatattgtgaccaaggaatcgaattcgagtttggaaaagattgatttttgatttggagactgccaaaccattttgtttgatgatatgtatgaaggtttgaagatgtttgaaatgttggtcaatgttttgggaaaagattaaaacatcatctatgtagacaatgacaaattttgaatagggattaaaaatatcgttcataattttttgaaattctgaaggggcattcttcagtccg

SEQ ID NO: 8363 - DNA, 1035 bp, Glycine max
  Gm_smallRNAprecursor_1196
gcggttgccggtttgggagattcctgagtggatggctcaggtttgattgaggcaatctgggttgatgacccttctaaattggttttctgggtagatgacccagcctgagttggtgacccagaagaggttgatgatttcttgatggttggctctggaagagccagtctggctcctttgcctgtactccttcctccccttagggagattcccgatgccttaggaggcattaccacttttctgtaagaattcacgggtaaggtagtcagataatgagtttgaggtgcccttgatgtattctatgtcaaaatcaaagacacttagaattgcttgccatcttgcaaaaatttgttttgaggcaaggtttttaacatctttttgtaaaatatctttggctgatttacaatcaaccctgattagaaatttttggtttaataaatccgattgaaatttggaaatgcacaaaacaattgctaaaacttcttttttaacagttgaatactttaattgtgcaggattccaatgttttgatgtatatgcaatgacatgatcttggccatggactctttgtttgaggatgccaccataacctatgtctgaagcatcagtttcgacaattttaaatgcctgtggaataggaagatacagacatttaatggattggactttgactttgatttctttaacagtttgtgtatggaggtcagaccaaggaggcggatttttcttcagcctatcatgcaatggcttgacaatattgtttaaataggggacaaattctcctacgtaatttagacaacctagaaatctttgtaactgggttttgtctaagatttggttggggaatttgctagcaaactctattgacctttcgattggaatgattgtaccttgatatatattgtgaccaaggaatcgaattcgagtttggaaaagattgatttttgatttggagactgccaaaccattttgtttgatgatatgtatgaaggtttgaagatgtttgaaatgttggtcaatgttttgggaaaagattaa

SEQ ID NO: 8364 - DNA, 1247 bp, Glycine max
  Gm_smallRNAprecursor_1197
tgatgatttcttgatggttggctctggaagagccagtctggctcctttgcctgtactccttcctccccttagggagattcccgatgccttaggaggcattaccacttttctgtaagaattcacgggtaaggtagtcagataatgagtttgaggtgcccttgatgtattctatgtcaaaatcaaagacacttagaattgcttgccatcttgcaaaaatttgttttgaggcaaggtttttaacatctttttgtaaaatatctttggctgatttacaatcaaccctgattagaaatttttggtttaataaatccgattgaaatttggaaatgcacaaaacaattgctaaaacttcttttttaacagttgaatactttaattgtgcaggattccaatgttttgatgtatatgcaatgacatgatcttggccatggactctttgtttgaggatgccaccataacctatgtctgaagcatcagtttcgacaattttaaatgcctgtggaataggaagatacagacatttaatggattggactttgactttgatttctttaacagtttgtgtatggaggtcagaccaaggaggcggatttttcttcagcctatcatgcaatggcttgacaatattgtttaaataggggacaaattctcctacgtaatttagacaacctagaaatctttgtaactgggttttgtctaagatttggttggggaatttgctagcaaactctattgacctttcgattggaatgattgtaccttgatatatattgtgaccaaggaatcgaattcgagtttggaaaagattgatttttgatttggagactgccaaaccattttgtttgatgatatgtatgaaggtttgaagatgtttgaaatgttggtcaatgttttgggaaaagattaaaacatcatctatgtagacaatgacaaattttgaatagggattaaaaatatcgttcataattttttgaaattctgaaggggcattcttcagtccgaatggcatcacgttccattcatattgcccgaaaggtacagtaaacgttgttttgtacttatctgattcttggatttggatctgccaaaatctatatttcatatcaaattttgaaaatatctttgcagaatttaatctgttaagcaaatcttttttgtttggaataggatatctaatccattgtaatgcttgatttagtggtttgtaatttatgactaaacggggtgttccacgctcaatctcagat

SEQ ID NO: 8365 - DNA, 1246 bp, Glycine max
  Gm_smallRNAprecursor_1198
gatgatttcttgatggttggctctggaagagccagtctggctcctttgcctgtactccttcctccccttagggagattcccgatgccttaggaggcattaccacttttctgtaagaattcacgggtaaggtagtcagataatgagtttgaggtgcccttgatgtattctatgtcaaaatcaaagacacttagaattgcttgccatcttgcaaaaatttgttttgaggcaaggtttttaacatctttttgtaaaatatctttggctgatttacaatcaaccctgattagaaatttttggtttaataaatccgattgaaatttggaaatgcacaaaacaattgctaaaacttcttttttaacagttgaatactttaattgtgcaggattccaatgttttgatgtatatgcaatgacatgatcttggccatggactctttgtttgaggatgccaccataacctatgtctgaagcatcagtttcgacaattttaaatgcctgtggaataggaagatacagacatttaatggattggactttgactttgatttctttaacagtttgtgtatggaggtcagaccaaggaggcggatttttcttcagcctatcatgcaatggcttgacaatattgtttaaataggggacaaattctcctacgtaatttagacaacctagaaatctttgtaactgggttttgtctaagatttggttggggaatttgctagcaaactctattgacctttcgattggaatgattgtaccttgatatatattgtgaccaaggaatcgaattcgagtttggaaaagattgatttttgatttggagactgccaaaccattttgtttgatgatatgtatgaaggtttgaagatgtttgaaatgttggtcaatgttttgggaaaagattaaaacatcatctatgtagacaatgacaaattttgaatagggattaaaaatatcgttcataattttttgaaattctgaaggggcattcttcagtccgaatggcatcacgttccattcatattgcccgaaaggtacagtaaacgttgttttgtacttatctgattcttggatttggatctgccaaaatctatatttcatatcaaattttgaaaatatctttgcagaatttaatctgttaagcaaatcttttttgtttggaataggatatctaatccattgtaatgcttgatttagtggtttgtaatttatgactaaacggggtgttccacgctcaatctcagat

SEQ ID NO: 8366 - DNA, 1153 bp, Glycine max
  Gm_smallRNAprecursor_1199
ggaggcattaccacttttctgtaagaattcacgggtaaggtagtcagataatgagtttgaggtgcccttgatgtattctatgtcaaaatcaaagacacttagaattgcttgccatcttgcaaaaatttgttttgaggcaaggtttttaacatctttttgtaaaatatctttggctgatttacaatcaaccctgattagaaatttttggtttaataaatccgattgaaatttggaaatgcacaaaacaattgctaaaacttcttttttaacagttgaatactttaattgtgcaggattccaatgttttgatgtatatgcaatgacatgatcttggccatggactctttgtttgaggatgccaccataacctatgtctgaagcatcagtttcgacaattttaaatgcctgtggaataggaagatacagacatttaatggattggactttgactttgatttctttaacagtttgtgtatggaggtcagaccaaggaggcggatttttcttcagcctatcatgcaatggcttgacaatattgtttaaataggggacaaattctcctacgtaatttagacaacctagaaatctttgtaactgggttttgtctaagatttggttggggaatttgctagcaaactctattgacctttcgattggaatgattgtaccttgatatatattgtgaccaaggaatcgaattcgagtttggaaaagattgatttttgatttggagactgccaaaccattttgtttgatgatatgtatgaaggtttgaagatgtttgaaatgttggtcaatgttttgggaaaagattaaaacatcatctatgtagacaatgacaaattttgaatagggattaaaaatatcgttcataattttttgaaattctgaaggggcattcttcagtccgaatggcatcacgttccattcatattgcccgaaaggtacagtaaacgttgttttgtacttatctgattcttggatttggatctgccaaaatctatatttcatatcaaattttgaaaatatctttgcagaatttaatctgttaagcaaatcttttttgtttggaataggatatctaatccattgtaatgcttgatttagtggtttgtaatttatgactaaacggggtgttccacgctcaatctca

SEQ ID NO: 8367 - DNA, 1168 bp, Glycine max
  Gm_smallRNAprecursor_1200
ggaggcattaccacttttctgtaagaattcacgggtaaggtagtcagataatgagtttgaggtgcccttgatgtattctatgtcaaaatcaaagacacttagaattgcttgccatcttgcaaaaatttgttttgaggcaaggtttttaacatctttttgtaaaatatctttggctgatttacaatcaaccctgattagaaatttttggtttaataaatccgattgaaatttggaaatgcacaaaacaattgctaaaacttcttttttaacagttgaatactttaattgtgcaggattccaatgttttgatgtatatgcaatgacatgatcttggccatggactctttgtttgaggatgccaccataacctatgtctgaagcatcagtttcgacaattttaaatgcctgtggaataggaagatacagacatttaatggattggactttgactttgatttctttaacagtttgtgtatggaggtcagaccaaggaggcggatttttcttcagcctatcatgcaatggcttgacaatattgtttaaataggggacaaattctcctacgtaatttagacaacctagaaatctttgtaactgggttttgtctaagatttggttggggaatttgctagcaaactctattgacctttcgattggaatgattgtaccttgatatatattgtgaccaaggaatcgaattcgagtttggaaaagattgatttttgatttggagactgccaaaccattttgtttgatgatatgtatgaaggtttgaagatgtttgaaatgttggtcaatgttttgggaaaagattaaaacatcatctatgtagacaatgacaaattttgaatagggattaaaaatatcgttcataattttttgaaattctgaaggggcattcttcagtccgaatggcatcacgttccattcatattgcccgaaaggtacagtaaacgttgttttgtacttatctgattcttggatttggatctgccaaaatctatatttcatatcaaattttgaaaatatctttgcagaatttaatctgttaagcaaatcttttttgtttggaataggatatctaatccattgtaatgcttgatttagtggtttgtaatttatgactaaacggggtgttccacgctcaatctcagattgtttgttgaca

SEQ ID NO: 8368 - DNA, 1031 bp, Glycine max
  Gm_smallRNAprecursor_1201
ctttttgtaaaatatctttggctgatttacaatcaaccctgattagaaatttttggtttaataaatccgattgaaatttggaaatgcacaaaacaattgctaaaacttcttttttaacagttgaatactttaattgtgcaggattccaatgttttgatgtatatgcaatgacatgatcttggccatggactctttgtttgaggatgccaccataacctatgtctgaagcatcagtttcgacaattttaaatgcctgtggaataggaagatacagacatttaatggattggactttgactttgatttctttaacagtttgtgtatggaggtcagaccaaggaggcggatttttcttcagcctatcatgcaatggcttgacaatattgtttaaataggggacaaattctcctacgtaatttagacaacctagaaatctttgtaactgggttttgtctaagatttggttggggaatttgctagcaaactctattgacctttcgattggaatgattgtaccttgatatatattgtgaccaaggaatcgaattcgagtttggaaaagattgatttttgatttggagactgccaaaccattttgtttgatgatatgtatgaaggtttgaagatgtttgaaatgttggtcaatgttttgggaaaagattaaaacatcatctatgtagacaatgacaaattttgaatagggattaaaaatatcgttcataattttttgaaattctgaaggggcattcttcagtccgaatggcatcacgttccattcatattgcccgaaaggtacagtaaacgttgttttgtacttatctgattcttggatttggatctgccaaaatctatatttcatatcaaattttgaaaatatctttgcagaatttaatctgttaagcaaatcttttttgtttggaataggatatctaatccattgtaatgcttgatttagtggtttgtaatttatgactaaacggggtgttccacgctcaatctcagattgtttgttgacataaaaagccgcacaa

SEQ ID NO: 8369 - DNA, 1234 bp, Glycine max
  Gm_smallRNAprecursor_1202
aatcaaccctgattagaaatttttggtttaataaatccgattgaaatttggaaatgcacaaaacaattgctaaaacttcttttttaacagttgaatactttaattgtgcaggattccaatgttttgatgtatatgcaatgacatgatcttggccatggactctttgtttgaggatgccaccataacctatgtctgaagcatcagtttcgacaattttaaatgcctgtggaataggaagatacagacatttaatggattggactttgactttgatttctttaacagtttgtgtatggaggtcagaccaaggaggcggatttttcttcagcctatcatgcaatggcttgacaatattgtttaaataggggacaaattctcctacgtaatttagacaacctagaaatctttgtaactgggttttgtctaagatttggttggggaatttgctagcaaactctattgacctttcgattggaatgattgtaccttgatatatattgtgaccaaggaatcgaattcgagtttggaaaagattgatttttgatttggagactgccaaaccattttgtttgatgatatgtatgaaggtttgaagatgtttgaaatgttggtcaatgttttgggaaaagattaaaacatcatctatgtagacaatgacaaattttgaatagggattaaaaatatcgttcataattttttgaaattctgaaggggcattcttcagtccgaatggcatcacgttccattcatattgcccgaaaggtacagtaaacgttgttttgtacttatctgattcttggatttggatctgccaaaatctatatttcatatcaaattttgaaaatatctttgcagaatttaatctgttaagcaaatcttttttgtttggaataggatatctaatccattgtaatgcttgatttagtggtttgtaatttatgactaaacggggtgttccacgctcaatctcagattgtttgttgacataaaaagccgcacaagaccatgggcttttgcttttccggattaggcctttatcaagcaaatccttgatttctttttgacagtattggagaagttcttcattcatttggattggtcttacttttgtgggaatttgtttttccctaaagtctttctcataagggagatcaacaatatgtttctttctgtcccaaaatacatgtggcaattcagaacagacggtcgattcaatatgatttaataaagattg

SEQ ID NO: 8370 - DNA, 1127 bp, Glycine max
  Gm_smallRNAprecursor_1203
ggacaaattctcctacgtaatttagacaacctagaaatctttgtaactgggttttgtctaagatttggttggggaatttgctagcaaactctattgacctttcgattggaatgattgtaccttgatatatattgtgaccaaggaatcgaattcgagtttggaaaagattgatttttgatttggagactgccaaaccattttgtttgatgatatgtatgaaggtttgaagatgtttgaaatgttggtcaatgttttgggaaaagattaaaacatcatctatgtagacaatgacaaattttgaatagggattaaaaatatcgttcataattttttgaaattctgaaggggcattcttcagtccgaatggcatcacgttccattcatattgcccgaaaggtacagtaaacgttgttttgtacttatctgattcttggatttggatctgccaaaatctatatttcatatcaaattttgaaaatatctttgcagaatttaatctgttaagcaaatcttttttgtttggaataggatatctaatccattgtaatgcttgatttagtggtttgtaatttatgactaaacggggtgttccacgctcaatctcagattgtttgttgacataaaaagccgcacaagaccatgggcttttgcttttccggattaggcctttatcaagcaaatccttgatttctttttgacagtattggagaagttcttcattcatttggattggtcttacttttgtgggaatttgtttttccctaaagtctttctcataagggagatcaacaatatgtttctttctgtcccaaaatacatgtggcaattcagaacagacggtcgattcaatatgatttaataaagattgaattttttcttttacttggggttttcccagttgtatctaaatattattaaaagatacttcttcttttaagaagttaatttgattaatcttattttctataagatttatatttctggaaattggtttagtagaaaaattaaatataatttttcttcctaaataatttgtgattattccttcattagatatttggatgggaaacagggctctaatgaagggcgttcctaagattacttcattcttaaggttttttaccaga

SEQ ID NO: 8371 - DNA, 1186 bp, Glycine max
  Gm_smallRNAprecursor_1204
ctaggtatgctagaagtagtgtctaatccttggaggtttacagtacggaactggttatgtgactcagatctggttagtcctactggaattgaacgggttctaaccgaaaaagaccttttggctgactcatattcagacctagaggcttctatccttgatgaaaaagaatttctcctgttgaagattatctctatctttccggagttatcttgcttaatatgctctatggttggagcgggtcggggaatagacggtgtggccttatccataacccatctttcgggaagagttacttcatcccattttatttttctcgggagagaaacgttagcctttgtcatatcagtgataaacaaagttgtttctcctttttgaggttttaacaggactctagatgcacaagtattcatgaccttgtactggatcctataaattaaggctgttgggattgatccttctttcatgtcaaggccatgaaagtggatgtttaagaacagagagtcaagaatgtttctatccatcagactcactgttttgtttggataacaattaaaatatattggaccttgtcctaggctggtttcgactgttccaattagggagtcttcaaattgattatgcctaatatttcttagacacattaaaactgctgcatctatgcccatgtcaattaagggctggatcagctgctttgaggaattctggatgggattggaaccagagttttacttgttctagatccgctttggatgtcatatgaaggtacatgattagggcaaaattaggtcaataaattatattaactaatatatcactgagacgtggaacaatttgagaaagtccttatgtacataaggtctggaaatgaaatcaatgccacccttgaatgtgggggtgatacattgggctcaaaagtcttctttgtttagccaactgtgttctcaaatgttcaagtattgattgtttaacacaacatattggtttttagtttgggagttatcctaatttatgtcactataagtttacataattatttatttgccactatcttggatggatataaaatccgtaggtaatcaaaagtgtcaattaatggtcttttggaacaagtcagcccgaagaaagcattcatactacaatttgttctcttattgaaaaagcaaagcaatttatctacatagaggta

SEQ ID NO: 8372 - DNA, 1146 bp, Glycine max
  Gm_smallRNAprecursor_1205
ccaaagtgatgaccaaaccgatgacgagggtgttggcagaccaacgacacctccgtcacctccgttgcaatatcagtaacctaggtgtccagtagacttgaactttgatcacctacctcactacattgatcgacaccattttgttcatcagcaacacaatgtacaaccaccagttggtatactcgaggttggcatgaccttcgatgaaaaagcacaatgtattcggacaatcaaagaatacaacatcaaaaatcattttgattgcagaacaatttactctgaccagagaaggctaaacttcgtctgcaagttacatgaaaatggttgtacatggagcttggacgcatgcaattcaaagaggcataaaaaatggattatcaagagtatcagaggtcatcacacttgtctcgtgccgatgctcagacaagatcatcgccaactcgacaaacacgttatagcacagatcatccaaccaattgtcaaaacaaacccaaccgtctccatcaagacgttgattgcagagatcaaaacattcatgaattataccccttcctacaagaagacatggttagcaaagcaaagagcattggagatgattcatggaaactgggaagaatcatatgccaaactgccaaaactttttggagctttgcaatcttgtgttcccaggactgtggtcgctactcaaacagaatccttgtatgaggggggagaaatagtatcgggcaaaagattgtttaaacatgtcttttggtcatttggtccatgcattaatggttttgcatattgtaaactcatagtacaagtagatggtacatggttttacgggaagtatactgacacactgttgatagctactgcacaagacggagctaaccatatcttcccgaatgcctatgccattgtagaaggggagacaacttcagcttggggtttttttctaaagaatttgaaaagacatgttactccgcaaattaacatttctcttatttcagaccgaaacccctcaattataagtgcctacaacaacccaagtaacttataggtccaggacacatcccatttcttttgcctgtgccacattggacaaaactttcttcgcggtaactcaaactgcaaacatttaaagaaaccactcatgttggc

SEQ ID NO: 8373 - DNA, 1031 bp, Glycine max
  Gm_smallRNAprecursor_1206
gccacaaaccaagttgggtgctgctaggtgcacccagcaatttaagtgaagtgacaaaaatgtctttcaattaaatttaaaataccctacctatgcagtgttactgttcaccttccgtacgctgctttcgctctccctccttgcgtgttcgtcttcttcattcgcgaccacgcccctgcgccttcgtcttcttgctggttcttctttggcggcgctgctattggctgcttcccttaacagcattgaggacctgcggcttcattttgttcttccatagtcaaggtaagcttcctggtctccattaatggctgctattggagtttcgtcaggtgtggtttcatacatatcatatgatccagtataaactatttttatttaaaacacaaataatacctatttttaaaacaaaactaacaaataaactaactatttaaaaacataatttttcaaacaataactattttaaatttttttaattaatttaaaaatagtcatacggatcagttgattggtatgcattacacggatcatataacgcatacggatcatatgatccgtatgaaaccacaccagacgaaactccaacagcagccattaatgaccaagaagcttacctcaaccatggaagaacaaaacgaagccgcaggtcctcaatgccgtcaagggaagtagccaatggcggcgccgccgaagaagaaccagcaagaagacgaaggcccaggggcgtggtcgcgaatgaagaagacgaacacgcaaggagggagagtgaaagcagcgtccagaaggtgaacagtaaccctgcacatgtagggtattttaaatttaagtaaagggtatttttgccacttcacttaaattgctgggtgcatcagcaataatgctgggtgcacttagcagcaccccaaaatatattaagagttctataagaaacagagctccagcctctaatttgttaaaaattgaagcatctagttatgtagccacaggcaaagacacccagacatcaggaggcggaaaatgacaaacgggag

SEQ ID NO: 8374 - DNA, 1047 bp, Glycine max
  Gm_smallRNAprecursor_1207
gctcaaatttttttaaaagcctattaaattaaatagaccaggcttaggcttattaaaaagccttacaagcctgatagaccggcctatatatatatatatatatatatatatatatatatatatatatatatatatatatatatatatatatatattattttttgggtaccaatatataatattattttttggattggatacaattaattttttttttaaaactatcagactttgattacatattagtgttccataacttctattcctataatcaagaactttaattacaatttaggtgtgagtcatgtgcctttttatattcttcattattttgattgactttcctttttctttaactttcctattacgttcctactccataaaatattaaatatttattgtgaaaaaggctattaggccaggccaggcttttaaaaaggctagaccgagtcaaaataaaagtctttgataggctataggctagactcaggcctcaaagattcatcgtaggctaggctcaggcttttcaaagtctggcctgacctgacctattcccacccctacttgaaaaccataaagtatgagaacttaccttattgtgcttttacggattcatttggcaattaatatatatatatatatatatatatatatatatatatatatatatatatatatattaaattattacataattaaacaagaggttatttttctggtgatctatgctctatgactgtccttaaccaaaaaatatgtgcgactccttttttgttgtcatattcgcatacagtagcataaatggaagcgggaaacaatgatttgtttaaatctatgaggtgctttttctaaggttcttttgaatggtttttagtgtgtaaacaattcaaattaaacataaatattggtaaattattatataaacttttattataattttgtaaataaaaaatttattatttaatatctaggtagtagagttgatattatatgtgaaaaaaatcatttaaatttaatttggtcaagatattaaattaaataatgtgt

SEQ ID NO: 8375 - DNA, 1035 bp, Glycine max
  Gm_smallRNAprecursor_1208
ccaatgtagccgtctttgcattttctgggtcaacaaacatctttgtctttcacctataccagaccatgtagtccgagttaaaactcaataggccttcttgtcggggataagcgtcgaccctaaatgcatgtcgattattccactgttgaatcattggggcgaataattgcccccaatttttgtcatgtttcccctttaatgttatgccatgaatgtttaggggttgtgaaggagactctggaactggttgctgcatcccgaattgtctcaagactctgtctggttggtgccactcaataacttggaaacaaattagtggcaccaccgcgtaccacgcgatacttccgactaaacaaacgggaggcaacaatgatataacggttgatgggtaaggctcccacacaaactgcatataacaacatagttgtgaacattgtagtaaaataagacataattttttattttacaaatacaatagcatgcttcttacctcatgacgtttcataatatccaacttgcgatgaaaaactttcacatcatcattgccgatatgttggtttccacgtcgcagccacctacaaagaataaaatttaatataccctaaaaccatttattctattgaaatgaaagacgctgttaaaaatgactcacatgtgccctagtggtgtattttctatttgggaaggagtcctctttggagccaaggttggacatcgttcccatgcccacaattgtagtaagatgcacatacctccgattgatttagttttataatcggtggcactgcacatctctctatatagaaaaccaagtacggcagctccccatgcatatctgccacattcttcaaagtcacgtaaaaattgaaggtaccttaccgaaactctgttactggttttgtcaacgaacaagacacctccaataaatctcagtatccatgcacgggcaaacctccgtacttgttcttcgtcgtcatcattatttatttgatcaaaatggtgagccagccaacttaatttaaccacactaccttt

SEQ ID NO: 8376 - DNA, 1087 bp, Glycine max
  Gm_smallRNAprecursor_1209
aggggaaaaaatataaaaaggaagagagaaaagttagaaggaaagaaattttgaaggaaaatttttcatgttaacatgtgacaaggcaaaaccttttttattattattaaaagtaatataaaagaagataatagataatagatttcaaatttgagctttttgatggcaacgagagcgttggtgggccttgtagacgaggtttaagctgacattgtccacaatcaagttcagatttggtttgagcgatgagccttgttgaccatccaacatctctgatggtggaggagaaggaggcgttgcagatggatggtgcgtctcgcggcagaggatggcagcgcgattgagaattgcttcatccagtggatgatctcgttgacgatggagaagtactctacatattgttcgttgggttgaagagcgacaacatggactgctacgttgagaattcctttgaaatcctttttcgcctgcagtagttgtctctctgaaatcttcgacctcgtcaacgatgaagatttaaagtcatcttcgtcgagaattccttgctttgttgctttgaagcggtcgaggtcttcttcatcagaagactttaaatcgtcatcgttgatgaggtcgaagatttcagagagacaactactacaggcggagaagatcataagcatgtctttgcaatcctttttcgttgctttgagactcttcatgatctgttgcttgtcttaaggacgcggtcgtctctgacagcaacaacgaggagcgtgaagatgctgataaggaggaggggaacgtttcaaacctgcgtatcgaaaaagaagagaccaagaggggatctggatttttttttagaaaaaaaaaactagtgaataggtctacagtagtcccacacttatatcctaaataaaacaaatatattatacagctgaaatagatgcttcattaagcaggtcattaaggtcacattgacaaccgtttgtattttagatttttggttaaaggcaaatggataatgcaataaaattcttaaatagtatcgtatatgtttatcgaaatctctagaaaacaaaaataaagtcaggaggggagagggtcc

SEQ ID NO: 8377 - DNA, 1146 bp, Glycine max
  Gm_smallRNAprecursor_1210
ccaaagtgatgaccaaaccgatgaaaagggtgttggaagaccaacgacacctccatcacctccattgcaatatcaacaacctaggtgtccagtagacttgaactttgaccacctaccacactacattgattgacaccattttgttcatcagcaacacaatgtacaaccaccagtcggtatactcgaggttggcatgaccttcgatgacaaagcacagtgtattcgagcaatcaaagaatacaacatcagaaatcattttgattgcagaacaatttactctgaccagagaaggctaaactttatctgcaagttacatgaaaatggttgtacatggagcttgggcacatgcaattcaaagaggcataacaaatggattatcaagagtatcaggggtcatcacacttgtctcgtgccgatgctcagacaagatcatcgccaactcgacaaacacgtcatagcacagatcatccaaccaattgtcaaaacaaacccaaccgtctccatcaagacgttgattgcagagatcaaaacgttcatgaattataccccatcctataagaagacatggttagcaaagtaaagagcgttgaagatgattcatggaaattgggaagaatcatatgccaaactgccaaaactttttggagctttgcaatcttgtgttcccgagactgtggtcgctgctcaaacagaatccttgtacgaggggggagaaatagtaccggacaaaagattgtttaaaggtgtcttttgttcatttggtccatgcattaatggttttgcatatagcaaacccatagtacaagtagatggtacatggctttacgggaagtatactggcacactgatggagcaaaccatatcttcatgattgcctatgccattgtagaaggggagacaacttcagcttgggggttttttctaaagaatttgagaagacatgttactccacaaattaacatttctcttattcaagaccgacacccctcaattataagtgcctacaacaacccaagtaacttatgggtccaggccacatcccatttcttttgcttgcgccacattgcacaaaactttcttcgcggtaactcaaattgcaaacatttaataggataccccttgcctcaaagcatgaccacacaagca

SEQ ID NO: 8378 - DNA, 1041 bp, Glycine max
  Gm_smallRNAprecursor_1211
tcttcctagggcaaccaggcaggaaggattttcttcaatgtatagcccgcatttgtctgagtcacccgtccctggatcgttccctgagggagcaacacaactctcctttgtgctgacacgagcacctgagggaccaacctctggctccggaggtagtgcaagtccctgtgattgcatctgagactgaaactgggactgcatctggctgaaggatgccatcagctgtcgagtcactttttctgtgatcgactcctttagttggtccttgatttgttgggtcagctgttgtaggtcttcaggaggcatggaggaagaactgcgggacgttcttggagtcgatccaaagtattgctttatggtgaaatcggctccaatagcacgaacacggtcagggtgctctggtcgcccaatggcagcaatcaggacatcctgacgtccatgggggacgaacaatccctgtgatgtctgctcgtccaaagaatcctgtacagaacacatatttgtccaaggaattcacagaatacacaaagataattacaattattaattaaaaatgacttacaatcttgtcagctatttcctttgctgcctcagacatcatctgtccagttttcttcgtgcaggccatcttccacttcacgtggcatctaatgggagtggagggtcaatgacgccctcagtgcttccggactgggcagcttcttccagtcttttctttgtcttctcacccatgagcttttattctaaatattcataacccccacgagacaatacgtggggggcaatgttttgcttctggatggcctgtgcctttttccgcacatcttgcaaaagtttaacattaatgaaaatgattattacaatgaattataagaagtgattttgttgtggaaaacaactaaaatgacaaagtacatacctcccataaggagtctttgcgggtctgacaaaactgggtccatttctcattgctaatgccgtatttttcacagacaatgtcgtccacaccgtccttgtcggctgcaagtgcccatttcctag

SEQ ID NO: 8379 - DNA, 1171 bp, Glycine max
  Gm_smallRNAprecursor_1212
tgaagtcacatcaaggggaaaaggtaggccccttttgctccactcaaaatgagacatgtgacattgcttttagaaaaaggaaaaagaaaatcttttttaaaaataaaagccaaattctctctctccttcttcagcagatttcagaaaagcttttcctccctcttccacgttgcttttcttcttcttttttctccaccattgttgtcctttgaagctccaaaattcctccacatttctactccaaatctcaaggagaagccattttcggagtcatgaagcacacctctacgttgtggggcttcaaatttcaggtatgggtggactttttctcacatgaaattcatgggtgttgggtttttgggagttatgatgggtagttctactaggttaatgccttatggtagttatttgtgaaggaatttgttgaaagcatgctaaacttgacatgtttgatgtgagtaaagctacccattctgttttagggttttatgatgatgctttgtgatatttgtatgctgaaattgttggtagaaaacgggtagagatgatggggagaattaacttagggttaaatgtgagaatggtagtgatgtgagtggaaaagtgtgagattttgagggttttgaaaagccaaatttggggttagtggaaattggagtttaaagtgggttgatcctagtttaaaatgtcaattaggacttgtaggaaagcttgggcagagcaaatgagaaaaatgagtgacaaatatgaaagaggagagccatttctagggtaaattgggtgttgagaggtcaaattttgaatggctggggttttcaccttaaaaccagtttgagcaagtctaaatcaatgttatagacttgattgagatgagagattaccccaaaattaaccatctctcattttcacctctcaaaccttgagaattcactaaattgatgggatttggatacctagattttgatttaccttgatctgaagcttgtctttggtttaaatatgatttatacatgatttaggacttgtaggatccaatttgagcaaaattggatgtgggcaagttggatttcgaaatctgctatattatgcagaaaaatgctgtcaaaaattgtgcataagtttttaacatagtgtagaaaaatgggtgtgcattgctagtcatgggaagagt

SEQ ID NO: 8380 - DNA, 1079 bp, Glycine max
  Gm_smallRNAprecursor_1213
tttttgcgacaatttttctctacgtgcccgaacttcttgcaatggttgcattgtggcatattacagaaccaacaatttttctctgcgtggccttgccttttgcatatattgcatggagaatttttatctgttttgttcttaaggaaattcctagaaccttctcttcttctggaagtttctccataatttttctttcctccattttctttgttttggggctgaaatttaaactttgacgggaaggcatagtaattagaattttctcaacaattttcttgtcaagaatatcttccccaaaagttctcatttgattaactatttctttaactttagaatagtaatctttaactgtctcagactctttcattttcaatagttcaaaatctcttcttagagattgaagtttaatggcacgtaccttaacacttccttgaaactcctcctgcaatgtgttccacgcttctttggcaatcttagctcccataattcttgggaaaattggatcagtcaccgcttgttgcaaggtgaacaacgcctttgaatttttctgtttatttttcttcaactctttttcttgagatgcattaagagctgaagtatctgtgggaacggtgaagccttcttctactatgtcccataaatcttgagatgaaaaatatgtttccattttaacaccccagaaatcataattttcaccattgaagatagggacagaaatagttgacgattgagtagtgttatccatagcttagaaaaaatattattggagtgggttaatagtacaaaggagatttttgaagtagttgggaggatttaggaatggtaggtaggtaatataactacgcccaatgtatgatcgaacgtagctctgataccactgttggaagttggttagatgatagttgatagttgatagttttagagaattattttagaaagaaggctatgtcattgatttcttggataaattacaacataccaattgcctatttataggctcaagtcaccaacctctcaatggtggtgaatgtttctacattactttaggtctttctagagttttcatgatagattagtat

SEQ ID NO: 8381 - DNA, 1035 bp, Glycine max
  Gm_smallRNAprecursor_1214
caatgtagccgtctttgcattttgtgggtcaacaaacatctttgtctttcgcctataccagaccatgtagtccgagttaaagctcaataggccttcttgtcggggataagcgtcgaccctaaatgcatgacgattattccactgatgaatcattggggcgaacaatttcccccaattttcgtcatgtttcccttttaatgttatgccatgaatgtttaagggttgtgaaggagactctggaattggttgttgcatcccaaattgtctcaacactctgtccggttggtgccactcaataacttggaaacaaattagtggcaccaccgcgtaccacgcgagacttccgactaaacaaacgggaggcaacagtgatataacggttgatgggtacgactcccacacaaactgcatataacaacatagttgtgaacattttagtaaaataacacatataattttttattttacaaatacaatagcatgttcgtacctcatgacgtttcataatatccaacttgcgacgaaaaactctcacatcatcattgccgatatgttggtttccacgtcgcagccacctacaaagattaaaatttaatatatgctaaaaccatttattctattgaaatgaaagacgctgttaaaaatgactaacctgtgccccagtggtgtattttctacttgggaaggagtcctctttggagccaaggttggacatcgttcccatgcccacatttgtagtaagatgcacatacctccgattgatttagttttataatcggtggcattgcacatctctctgtatagaaaaccaagtacggcggctccccatgcatatctgccacattcttcaaagtcacgtaaaaattgaaggtaccttagcgaaactttgttactgcttttgtcaacgaacaagacacctccaatgaatctcagtatccatgcacgggcaaaccttcgtacttgttcttcgtcgtcgttatttatttgtgcaaaatggtgagccaaccaacttaatttaaccacactacctctaat

SEQ ID NO: 8382 - DNA, 1074 bp, Glycine max
  Gm_smallRNAprecursor_1215
aataaatatttaagttctttgattagaatcagatagcatcccggcttttctttcgtttttttttacaagctaggatccggtttgttttgcaaccagtttgctgacatttacaaggtcaagaaaaccgatacctccatacatgaaaccttcacatatcttcatttattttcagaaaaatcctcatccacaatatcttcaacttatcttttataaatcaaaaagtgatatataagatccactagcatcgaaagctcataaccacatccagaaggctgaagctactttttcaacaccaacagggtgttcatccaatggtccagtaatcaagacagatctaaaaattcttataaaacccagaaataaactgaccatcctattttactgtggttgaaccactatgaaactttcatgcctcatgcagttcgggtcaaaatcaaaagtttagcaacaagagaacatacaatcaaatttgttagtctcggagacaaaaggcagtgcaagcataactgttgtggggatctacgccactaaagcaataagccataataataggcacaactttccttcagaggcaaagatacccgcaacagttttgctggcccgacacagaacagtaggagaaaggaagcttagaatatgggttgcggctaaaggaggaatgcaaaccctagtgttgcaaattgaaaattgtgagaggatggttttatagcacactcaacaggccagttttttgtttatacggcttagaagcatgccacctgtattattttcagactaataaattcttgttctcgtgtagtaataaaattgaagtcttataacagctggagtcattttgctactcgtttagtagtaaaattgagttcttatgagtggagtcagcttagttgaggttaaatactcccgctatttaaaaaaattattaccccccattcctcaattaaatataatatttttttttcaaaaaaatatttccttttataagattatttttaagttgtctattacattaatttattatttttttttatcaaaatactcttaattactttatactaaatgctataaattaat

SEQ ID NO: 8383 - DNA, 1064 bp, Glycine max
  Gm_smallRNAprecursor_1216
atatttaagttctttgattagaatcagatagcatcccggcttttctttcgtttttttttacaagctaggatccggtttgttttgcaaccagtttgctgacatttacaaggtcaagaaaaccgatacctccatacatgaaaccttcacatatcttcatttattttcagaaaaatcctcatccacaatatcttcaacttatcttttataaatcaaaaagtgatatataagatccactagcatcgaaagctcataaccacatccagaaggctgaagctactttttcaacaccaacagggtgttcatccaatggtccagtaatcaagacagatctaaaaattcttataaaacccagaaataaactgaccatcctattttactgtggttgaaccactatgaaactttcatgcctcatgcagttcgggtcaaaatcaaaagtttagcaacaagagaacatacaatcaaatttgttagtctcggagacaaaaggcagtgcaagcataactgttgtggggatctacgccactaaagcaataagccataataataggcacaactttccttcagaggcaaagatacccgcaacagttttgctggcccgacacagaacagtaggagaaaggaagcttagaatatgggttgcggctaaaggaggaatgcaaaccctagtgttgcaaattgaaaattgtgagaggatggttttatagcacactcaacaggccagttttttgtttatacggcttagaagcatgccacctgtattattttcagactaataaattcttgttctcgtgtagtaataaaattgaagtcttataacagctggagtcattttgctactcgtttagtagtaaaattgagttcttatgagtggagtcagcttagttgaggttaaatactcccgctatttaaaaaaattattaccccccattcctcaattaaatataatatttttttttcaaaaaaatatttccttttataagattatttttaagttgtctattacattaatttattatttttttttatcaaaatactcttaattactttatactaaatgctataaa

SEQ ID NO: 8384 - DNA, 1058 bp, Glycine max
  Gm_smallRNAprecursor_1217
tttaagttctttgattagaatcagatagcatcccggcttttctttcgtttttttttacaagctaggatccggtttgttttgcaaccagtttgctgacatttacaaggtcaagaaaaccgatacctccatacatgaaaccttcacatatcttcatttattttcagaaaaatcctcatccacaatatcttcaacttatcttttataaatcaaaaagtgatatataagatccactagcatcgaaagctcataaccacatccagaaggctgaagctactttttcaacaccaacagggtgttcatccaatggtccagtaatcaagacagatctaaaaattcttataaaacccagaaataaactgaccatcctattttactgtggttgaaccactatgaaactttcatgcctcatgcagttcgggtcaaaatcaaaagtttagcaacaagagaacatacaatcaaatttgttagtctcggagacaaaaggcagtgcaagcataactgttgtggggatctacgccactaaagcaataagccataataataggcacaactttccttcagaggcaaagatacccgcaacagttttgctggcccgacacagaacagtaggagaaaggaagcttagaatatgggttgcggctaaaggaggaatgcaaaccctagtgttgcaaattgaaaattgtgagaggatggttttatagcacactcaacaggccagttttttgtttatacggcttagaagcatgccacctgtattattttcagactaataaattcttgttctcgtgtagtaataaaattgaagtcttataacagctggagtcattttgctactcgtttagtagtaaaattgagttcttatgagtggagtcagcttagttgaggttaaatactcccgctatttaaaaaaattattaccccccattcctcaattaaatataatatttttttttcaaaaaaatatttccttttataagattatttttaagttgtctattacattaatttattatttttttttatcaaaatactcttaattactttatactaaatgctat

SEQ ID NO: 8385 - DNA, 1089 bp, Glycine max
  Gm_smallRNAprecursor_1218
cacatgcactaagtgaatatttgatgtgtgtgttgggaaataaatttaattgaattggtagaagcccaacctaattaaattttagagggagcatttgcttactacacccgattggcacatcctatagtcacactttgtgcatgtccttcatgctttacatgtctcatgacacctaagcacacttagtgaagaatcttgaaattgatattggattagtgggctgaaccatagcaaaaattcactctccaaagtttggctccacaaattcaagtgaaatttgaattgaaattcaaatttccctccaattttgtgacacttaggctataaatagaggtcatgtgtgtgtattttttttttaactttgatcatttaaaaattaaactttagatttcatagctcttttagagcacaaaattttgtcctcttctcttcctctcccttcattcatctctttcttcctccaaactcttatccatggcctcctatggtggtgagcttcttttagactcatcttctccttgaagtggcgtctcctctctctctttcttctccattccgctaccattcatcttccaagaagcaaaggaatccattgataaagaagatcctaggccttcaagctccaatggaacttacatcacatgtatatatgtatacgtgttccttcttttcttaaagaaaaaaaaaatatattgagatatttttatgaacttagaaatagaaactatttcaatgacgtgtattctgcaaaatatattatttaaacaagtttgaagcaacattttaaaaaaatatttcaggtgttacaatatttatcaaacctaacatcatatttagaagtttagaaaaaaatgtaaacacatacttagacataagataaattattacattaaatttaatatgcacatcaatataagagaaaaaatgatacaatataacaattttagtacaataaaaaataatagaatgataaaaatctgagcacacaaaaggcccatgtgtatttgctagtaactttataatgtttgttttctacttacagctttactaggatagaaacaaaaggataaatgagaatataatgaaaag

SEQ ID NO: 8386 - DNA, 1053 bp, Glycine max
  Gm_smallRNAprecursor_1219
ctgagggagcaacacaactgtcctttgtgctgacacgaggacctgagggaccaacctctggctctggaggtagtgcaagtccctgtgattgcatctgagactgaaactgagactgcatctggctgaaggatgtcatcatcattcgagtcactttttctgtgattgactcctccagttggtctctgatttgttgggtaagctattctaggtcttcaagaggcatggaggaagaactgcgggatgttcgtgaagccgatccaaagtattgctttatggtgacaccggctccaacaacacgaacacgactagggtgctctggtcgcccaatgacagtagtcaggatatcctgacgtccatgggggacgaacgatccctgtgacgcctgctcgtccaaagaatcctgtaccgaacacatatttgtccaaggaattcacaaaatacacaaagataattacaattattaattaaaaattatttacaatcctgtcagctatttcatttgctgcctcagacgtcatctgtccagttttcttcgtgcgggccatctttcatttcacgtggcgtctgatgggagatggagggtcaatgatgctcccagtgcttccagactgggcagcttcttccagtcttctctttgtcttctcagccatgagcttttcatctaaatattcataacccccacgagacagtacgtgaggggcagtgttttgcttctgggaggcctgtgcctttttcctcacatcctgcaaaagtttaacattaatgaaaatgattattacaataaattataagtgattttgttgtggaaaacaactaaaatgacaaagtacatacctcccatgaggggtctctgcgggtctgacaaaattgggtccatttttccttgctaatgccatatttttcacagacaatgtcgtccacaccgtccttgtcggctgcaagtgcccatttcctagtcaagtcaaatttaaactgcctccagcgctcgccgacaatctgaagcattttcttctttgtcctaccgtcagaagcttcagggatttcaaattccgc

SEQ ID NO: 8387 - DNA, 1195 bp, Glycine max
  Gm_smallRNAprecursor_1220
ttttccctaggcagagcttctctctctaaaacctggttttgagactatctgaaagggtgcgtcacaaagggaacgagggctcctttaaatagacccaatgttttactgtttcaacagtatcgataatgtttaccggaactgttacaaaactttttcaaattacattattatcgggaaccgaataattacttacaataattcatgattactacaactaatcatcgtctaacgatataccaaaacagtcatcctcattctggtagaatggatcatcttcttggtcatcattattcgcggatgattcgacttccttcttggggggttcttcttcttcttcctgttgaagtagctggagaacttccttaagattctgagcaagactttctttagattttgagcttgctaagaatgctgcaagttgagacttttgatttagaaacaatgatgtctctggatcagcaggcttgagaaactcagggttgctctgaaacctgttcttgacttgttctggagcagcctttgaggtatcaaattgtgaccaccactttacaaaggcatgtctctgcaatggtggatattgtttgttgttttcggtttttccatatctgtattgccatgaaaaaatccatgacaaggcaaaacagacgatgattctgaatcaaacctacaaaaacaaatccaaaagaccaaacagaccaaaactgtctgtaaccaaaaaccaagccaaccgttgactcaacaagaatcaacaccacaacccagcaatagctatatttcaaaaaacaaatttttcaatgttttacaaatggaaccagaatactgggacaaaaatcctttcaaggcaaccgccaaagtattccccccaagattccattataggccaacggccacaaataaaaccagaaaattctacgaattcatcctattagatacaaactcaatatctattaaacacttcaaagaccccaaagatccaaacctaaatacccattccacaatctaaatcctaaaggttatgcagccacgacattatggctcaaacttgaaccaacccaaaaaaatttctgcaccttttgatcttgtaggatataattattgggactacattgacgcctggaccaatgtgttctggcatcctttccgctgatctctggatatatatatatatatatatatatattgctctgtagcattt

SEQ ID NO: 8388 - DNA, 1207 bp, Glycine max
  Gm_smallRNAprecursor_1221
caatgttttactgtttcaacagtatcgataatgtttaccggaactgttacaaaactttttcaaattacattattatcgggaaccgaataattacttacaataattcatgattactacaactaatcatcgtctaacgatataccaaaacagtcatcctcattctggtagaatggatcatcttcttggtcatcattattcgcggatgattcgacttccttcttggggggttcttcttcttcttcctgttgaagtagctggagaacttccttaagattctgagcaagactttctttagattttgagcttgctaagaatgctgcaagttgagacttttgatttagaaacaatgatgtctctggatcagcaggcttgagaaactcagggttgctctgaaacctgttcttgacttgttctggagcagcctttgaggtatcaaattgtgaccaccactttacaaaggcatgtctctgcaatggtggatattgtttgttgttttcggtttttccatatctgtattgccatgaaaaaatccatgacaaggcaaaacagacgatgattctgaatcaaacctacaaaaacaaatccaaaagaccaaacagaccaaaactgtctgtaaccaaaaaccaagccaaccgttgactcaacaagaatcaacaccacaacccagcaatagctatatttcaaaaaacaaatttttcaatgttttacaaatggaaccagaatactgggacaaaaatcctttcaaggcaaccgccaaagtattccccccaagattccattataggccaacggccacaaataaaaccagaaaattctacgaattcatcctattagatacaaactcaatatctattaaacacttcaaagaccccaaagatccaaacctaaatacccattccacaatctaaatcctaaaggttatgcagccacgacattatggctcaaacttgaaccaacccaaaaaaatttctgcaccttttgatcttgtaggatataattattgggactacattgacgcctggaccaatgtgttctggcatcctttccgctgatctctggatatatatatatatatatatatatattgctctgtagcatttaagaaacatcatctcattcagcatgtccaacatttaaccaatatacaatgtacatcaagtatagcccaaaatacatcatgaagcatagccaacaaaacatgttatcc

SEQ ID NO: 8389 - DNA, 1108 bp, Glycine max
  Gm_smallRNAprecursor_1222
ataattcatgattactacaactaatcatcgtctaacgatataccaaaacagtcatcctcattctggtagaatggatcatcttcttggtcatcattattcgcggatgattcgacttccttcttggggggttcttcttcttcttcctgttgaagtagctggagaacttccttaagattctgagcaagactttctttagattttgagcttgctaagaatgctgcaagttgagacttttgatttagaaacaatgatgtctctggatcagcaggcttgagaaactcagggttgctctgaaacctgttcttgacttgttctggagcagcctttgaggtatcaaattgtgaccaccactttacaaaggcatgtctctgcaatggtggatattgtttgttgttttcggtttttccatatctgtattgccatgaaaaaatccatgacaaggcaaaacagacgatgattctgaatcaaacctacaaaaacaaatccaaaagaccaaacagaccaaaactgtctgtaaccaaaaaccaagccaaccgttgactcaacaagaatcaacaccacaacccagcaatagctatatttcaaaaaacaaatttttcaatgttttacaaatggaaccagaatactgggacaaaaatcctttcaaggcaaccgccaaagtattccccccaagattccattataggccaacggccacaaataaaaccagaaaattctacgaattcatcctattagatacaaactcaatatctattaaacacttcaaagaccccaaagatccaaacctaaatacccattccacaatctaaatcctaaaggttatgcagccacgacattatggctcaaacttgaaccaacccaaaaaaatttctgcaccttttgatcttgtaggatataattattgggactacattgacgcctggaccaatgtgttctggcatcctttccgctgatctctggatatatatatatatatatatatatattgctctgtagcatttaagaaacatcatctcattcagcatgtccaacatttaaccaatatacaatgtacatcaagtatagcccaaaatacatcatgaagcatagccaacaaaacatgttatcc

SEQ ID NO: 8390 - DNA, 1117 bp, Glycine max
  Gm_smallRNAprecursor_1223
ttataaacgaaaacacataaactgaaaatgataattgaaaagtatcccttcttaaaatgtggattaaaactaagaaataactgaaaagaaaataggaactttattaagtcccctgttcccatgtctgaatcatgtagattgcagatcatagagatagtatgcttataagagaatacctgtggttgggcgagaaaatcccacacttatttttagtagggcgaggctacaagttcgttgattcatcatgaacacaaacaaaccaccaatggagttaggtctaatgaaaggagttagttccacaacatgaaaaatcaacatctgaaaatcctaaaaaaaaaaaagacacccacattcattgttggatcatacctcaagttaaattgtttctgaagaggatatctgtggaaaaaaatagatgaacagtcaaagtgacaaatgaggtctgattggacatactgacaaccattcaaatgctttcaaatgacaaaaggttttctagtattcgccacatctttgacactgacgggacgtacccttactcccaaaaatttctataccataatgtggcttgtttatggcatccttccgaattctgaaggagatgaagtacgtacagtcagcgtcaacgatgcggcgaccactagaaaaagttatatggtagtagtgctgtgtgcagcttgctggaggaggaaggaaagaatgggtaattaaagagtatgtatgattggtgatttttgtgttgtgttgtcacttgttgggtaatcactgttgtgtgaaaaagtttgaataagaaagtttgtggggagcgatggcttagtaattgatcactgatccgcggattttgtggcgtaacaaatgaagcccacgccgctctttataccaaaccaagacaaacatatatagttgagaatcgagatccttcaatgtcagaagcactattaattttttttaacttaaaatacatttttttctgatatacattatcgtgcagatcgtcttctttttagactcagattctctaaaataaaatagaacaaaatgtgataaagtaaccaaattattcattaatatagcacttaaattataaacctaacgacaccaaatctattccttatta

SEQ ID NO: 8391 - DNA, 1104 bp, Glycine max
  Gm_smallRNAprecursor_1224
acgaaaacacataaactgaaaatgataattgaaaagtatcccttcttaaaatgtggattaaaactaagaaataactgaaaagaaaataggaactttattaagtcccctgttcccatgtctgaatcatgtagattgcagatcatagagatagtatgcttataagagaatacctgtggttgggcgagaaaatcccacacttatttttagtagggcgaggctacaagttcgttgattcatcatgaacacaaacaaaccaccaatggagttaggtctaatgaaaggagttagttccacaacatgaaaaatcaacatctgaaaatcctaaaaaaaaaaaagacacccacattcattgttggatcatacctcaagttaaattgtttctgaagaggatatctgtggaaaaaaatagatgaacagtcaaagtgacaaatgaggtctgattggacatactgacaaccattcaaatgctttcaaatgacaaaaggttttctagtattcgccacatctttgacactgacgggacgtacccttactcccaaaaatttctataccataatgtggcttgtttatggcatccttccgaattctgaaggagatgaagtacgtacagtcagcgtcaacgatgcggcgaccactagaaaaagttatatggtagtagtgctgtgtgcagcttgctggaggaggaaggaaagaatgggtaattaaagagtatgtatgattggtgatttttgtgttgtgttgtcacttgttgggtaatcactgttgtgtgaaaaagtttgaataagaaagtttgtggggagcgatggcttagtaattgatcactgatccgcggattttgtggcgtaacaaatgaagcccacgccgctctttataccaaaccaagacaaacatatatagttgagaatcgagatccttcaatgtcagaagcactattaattttttttaacttaaaatacatttttttctgatatacattatcgtgcagatcgtcttctttttagactcagattctctaaaataaaatagaacaaaatgtgataaagtaaccaaattattcattaatatagcacttaaattataaacctaacgacaccaaatctattc

SEQ ID NO: 8392 - DNA, 1086 bp, Glycine max
  Gm_smallRNAprecursor_1225
ggcaccgaagtagaagctgctccttctattgctgagatgggcaaccctgtcgagcaaccgaacttatcacaagaacaacctgccgtcgaggtatcattctcttaatgtgattttaatcatagcttatacgaaactatttgttaaccttttcccatgacaattcgaatcaggtacaacaaaatgtttctgcagaagaaataccctcatgtgctcgaacatctcccgctcctgaggcagatgcagtgaatgttgaggaatggggtgaaggtcaaggcactggatccagtcgtcctcatggttgggcagaggtcgatgaccatcatgagccgaaccagtcagataataccactcctcatgaatcgagtcagaaaagttcatctgaagaaaactttttcgatgaagacgccataaaagaggctgaagctggaggttcggacatttacccggtgtcttcaacatctaagctttccgctagcatagggatcgcagaagatacattcattcaaatgcaagacgaagaccctgctgcagcccttcgactcctgctgaacataagtcaagccaacacctcaagtgaaaagattcctggtgcttcgtcctcatctgatgctgaaataaactcttcagtacgccaagattctctgctcttgaagttatccatggaatacgcacggaaagatgtgcttaaatccattgaagagaacccctctgctgcctttgggcacctgaactttttgaagaaattgcacaacccccttacctctgatgagattctaggcaaagttatccaaatcgaggccatcattgaccaatttgcaagtactgtgcagaaaaaacgcgaaaatggcgcaagactagatgcccagaaacaggcacatatccttctgctcgagaaagcccgagctgctcaacatgaagtcgaacgtctcaccaaagaggcgaaagaaggatcttctgagatcaaagactgtgatgataatatctcctcctgggaggcaactattacggatctgctgtctcaggtcgatgatctaaggaagaaaattgtgacagagcaggccaaacgcaaggaactccaggagaagg

SEQ ID NO: 8393 - DNA, 1083 bp, Glycine max
  Gm_smallRNAprecursor_1226
caaagggactgcttcgatccattttgtaaagtaatcgataccaactataatataacgctggttcttagaagaagcaggcttgatttcaccaattaggtccaaagcccatcctctgaacggccaaggtttgattatggagtgtaactcactagcaggtacatgctgtatccctgcatgcttttggcattcctgacagcccttagcaaattctatgcagtcttttaacatcgaaggccaatacaaaccttgtcgaaataaaagccatttcattttatggcctgcttgatgtgatccacaggccccactgtgaacatgggaaactgccaagtatgcttctgattcatttagacattttagcaacactccttctgcagtctttttaaacaaatcatttcccataatcacgtaatttaaagccctatatttgatctttcgagccacattacctattggattttccaaatattcaacaatggactttctccaatcattatctaacatattgtcaatggccaaaatttgaatttttccctggagatcatccatgctttcatcttcattattttgtggtgtacttgcccccacaagttttggcattggcaatgtagtgcttaatggctctggtaataccagtttatcttttatttcgatcaactgagttaacttttccttcgacattttgtaccctgaagctatttgggctaaatcatttgcttcttggttttcttgtcgaggtatatgctcaatgttaatataatcgaaatgattcagaagagaacttgccataacaaaatattttgctaagtgttcattaacacatttgtattcttgtgttaattgtctcaacactagttctgaatcaccccttatgttaacatttcttgcccccaagctaattaaaatttgaaggcctgtaattagagcctcatactcagcctcattattagaacaaagccctttgattttatatttgaatttagttggaactttattgggagatattattaaaactccaattccagttccacgtttgtgtttcgaaccatcgaaatacaaaatccaaggctctgtatcgacatagtc

SEQ ID NO: 8394 - DNA, 1176 bp, Glycine max
  Gm_smallRNAprecursor_1227
tgccacaatttgacccttaacagatttcaaaggcttatacgttaaagaatattctgttaatgccaaagcccattttccaattctactgtgtaaaataggttttgacaacatgtgcttaataatatcataatgagaatacacataaacatcaacaggctttatatattgcttaagttttgcacaagagaaatacaaacaaagacaaagtttttctatggcagtatatctagtttctgcatcatttagtacacgactaagataataaattgcatgttctatgccatcatcatcttcctgagccaacatgctaccaatggtcttgtcagacgcagcaatatacaacttcatagtcttgtttcgactaggaggcattaacacaggaggcttgatcaaatattctttaatttcatcgaaagccttttgatgcacttcatcccatttgaatggttcatctttcttgagtcgaagtaatggcgaaaaaatttgagctttgccacttagattcgaaatgaatcgcctcaagaagttgatttttcctagcaaagactgaagctgttttttggtcgaaggaggcttcgtctcaagaatagcctttgtcttgttttgatttatctcaatgccttttttatgcaccacaaaaccaaggaagtctcctgcacgcacacaaaaagcacactttaatggattcatttttaatccatgtttcctcattcgttcgaaagattgcctaaggtaatccaaatggctatcttctgaggaagatttgatgattatatcatcaatataaacttgcataaatgtgtcaataaaatcatgaaacatggaattcatggccctttgataagtggccccagcatttttcaacccaaagggcataaccacccattcgtaagtgcctaaagcaccagggcatcgaaatgctgtttttgacacatcactttcagcaataaatatttggttataaccagaataaccatctaacatgcttaaaaattcgaagccagctgctgaatctaccaacatttctgctactggcatagcatattcatctttaggtgtagcattatttaaatccctaaaatctatgcatactctaagagttccattctttttaatgacagggactatatttgctaaccattcgacatacctggcagatctgatgaatttacacct

SEQ ID NO: 8395 - DNA, 1157 bp, Glycine max
  Gm_smallRNAprecursor_1228
caattctactgtgtaaaataggttttgacaacatgtgcttaataatatcataatgagaatacacataaacatcaacaggctttatatattgcttaagttttgcacaagagaaatacaaacaaagacaaagtttttctatggcagtatatctagtttctgcatcatttagtacacgactaagataataaattgcatgttctatgccatcatcatcttcctgagccaacatgctaccaatggtcttgtcagacgcagcaatatacaacttcatagtcttgtttcgactaggaggcattaacacaggaggcttgatcaaatattctttaatttcatcgaaagccttttgatgcacttcatcccatttgaatggttcatctttcttgagtcgaagtaatggcgaaaaaatttgagctttgccacttagattcgaaatgaatcgcctcaagaagttgatttttcctagcaaagactgaagctgttttttggtcgaaggaggcttcgtctcaagaatagcctttgtcttgttttgatttatctcaatgccttttttatgcaccacaaaaccaaggaagtctcctgcacgcacacaaaaagcacactttaatggattcatttttaatccatgtttcctcattcgttcgaaagattgcctaaggtaatccaaatggctatcttctgaggaagatttgatgattatatcatcaatataaacttgcataaatgtgtcaataaaatcatgaaacatggaattcatggccctttgataagtggccccagcatttttcaacccaaagggcataaccacccattcgtaagtgcctaaagcaccagggcatcgaaatgctgtttttgacacatcactttcagcaataaatatttggttataaccagaataaccatctaacatgcttaaaaattcgaagccagctgctgaatctaccaacatttctgctactggcatagcatattcatctttaggtgtagcattatttaaatccctaaaatctatgcatactctaagagttccattctttttaatgacagggactatatttgctaaccattcgacatacctggcagatctgatgaatttacacctcagcagcctttcgatctcttccttaattttggacatgatttctggtgcgaatcttctt

SEQ ID NO: 8396 - DNA, 1130 bp, Glycine max
  Gm_smallRNAprecursor_1229
tcactttggttctgactttgcaatggttcaaaggaaaactcattctcctagtaagaaacttttaccatatgacaaatacaaataccatactatttttttatgtattagtgttataattcagaattctaagttatgctcttggttggtaattggtattgcagcatattggtggcgaatgtttgggtcacaaactccaaatttgcagaagttagctattaaaattttgagtttgaattgcagtgcttcaggatgtgaaagaaattggagtgtgtttgagcaagtaattgtgacaaaactctagctatactttttaattttatttaattttgatgatcaagttttatttggagtatatttgagattgaaattaacatttatttgttatgttgtagattattccaaaaaaagaaataggcttgagcacaagaggttgcatgatttggtgtttgtcaaatacaaccaacaattgaagcaaagatataatgcaagagatgaaattgatccaatttctcttaatgatattgatgtgtgcaatgaatggctcgtgggagaaatggatcaagatgatgataatgatgttggaaatgatttggtatttgaagatgatgatgctctaaattgggcaactgtgtatcaggcttcgggggttggagagtgtatgatgtatactaggcgaaaaaagcaaaaacaacaagtgttgctgttacccaaacttctaaaaaacaggcaatggttgttggatcttcatcaaggaagcaaagagcagtccaagaaaatgttgaggatctagattttgaggagaatattgatcttgaatctgaagaagaagaaatcatggtcaattttgaggtgtctgatggggaagagggagagagacatactccattaccatatgataacaacgaagatgattatgttgggattagagaagatgattagagcattaaccttcactttgcactttgcattatgtttttatcattttcttattttgaactctttaatgagtttatttggtgttggtacttgattattgtatgaactcatgaaacttttttagtttatttgaatgcaatcctttgtttttttcaatttcaatgagtttatatatatgtttttttttttccacc

SEQ ID NO: 8397 - DNA, 1188 bp, Glycine max
  Gm_smallRNAprecursor_1230
tttagtgataatgaggatcaacagttctttgatcacatcaatcaccaaagcgatgaccaaaccgatgtcgagggtgttggcagaccaacggcacctccgtcacctccgttgcaatatcaccaacctaggtgtctagtagacttgaactttgaccacctaccacactatattgatcgacaccattttgttgatcagcaacacaatgtacaaccaccaattggtatactcgaggttggcatgaccttcaatgacaaagcacaatgtattcgagcagtcaaagaatacaacatcataaatcattttgattacaaaacaatttactctgaccaaagaaggctaaacttcgtctgcaagttacatgaaaatggttgtacatggagctagggcgtatgcaattcaagaggcataacaaatggattatcaagagtatcagaggtcatcacacttgtctcgtgccaatactcagacaagatcatcgccagctcgacaaacacgtcatagcatagatcatccaaccaattgtcaaaacaaacccaaccgtctccatcaagatgttgattgcagagatcaaaacattcatgaattgtaccccatcctacaagaagacatggttagcaaagcaaagatctttggagatgattcatggaaactgggaagaatcatatgccaaactgccaaaactttcggagctttgcaatcttgtgttcccgggattgtggtcgctgctcaaacagaatccatgtatgaggggggagaaatagtactgggaaaaaaattgtttaaacgtatcttttggtcatttggtccatgcattaatggttttgcatattgcaaacacatagtacaagtagatggtacatgactttatgagaagtatactagcacactgttgatagctaccgcacaagatgaagctaaccatatctttccgattgcatacgccattgtagaaggggagacaacttcagcttggggtttttctaaagaatttgagaagacatgttactccgcaaattaatatttctcttattttagaccgacacccctcaattataagtgcctacaacaacccaagtaacttatgggtccaggacacatcccatttcttttgcctgcaccacgttgcacaaaactttctttgcggtaactcaaactgcaaacatttaaagaaaccactcatgttggttg

SEQ ID NO: 8398 - DNA, 1200 bp, Glycine max
  Gm_smallRNAprecursor_1231
ttttgttgatcagcaacacaatgtacaaccaccaattggtatactcgaggttggcatgaccttcaatgacaaagcacaatgtattcgagcagtcaaagaatacaacatcataaatcattttgattacaaaacaatttactctgaccaaagaaggctaaacttcgtctgcaagttacatgaaaatggttgtacatggagctagggcgtatgcaattcaagaggcataacaaatggattatcaagagtatcagaggtcatcacacttgtctcgtgccaatactcagacaagatcatcgccagctcgacaaacacgtcatagcatagatcatccaaccaattgtcaaaacaaacccaaccgtctccatcaagatgttgattgcagagatcaaaacattcatgaattgtaccccatcctacaagaagacatggttagcaaagcaaagatctttggagatgattcatggaaactgggaagaatcatatgccaaactgccaaaactttcggagctttgcaatcttgtgttcccgggattgtggtcgctgctcaaacagaatccatgtatgaggggggagaaatagtactgggaaaaaaattgtttaaacgtatcttttggtcatttggtccatgcattaatggttttgcatattgcaaacacatagtacaagtagatggtacatgactttatgagaagtatactagcacactgttgatagctaccgcacaagatgaagctaaccatatctttccgattgcatacgccattgtagaaggggagacaacttcagcttggggtttttctaaagaatttgagaagacatgttactccgcaaattaatatttctcttattttagaccgacacccctcaattataagtgcctacaacaacccaagtaacttatgggtccaggacacatcccatttcttttgcctgcaccacgttgcacaaaactttctttgcggtaactcaaactgcaaacatttaaagaaaccactcatgttggttggtgagaatctattttatttattcgttataattttctttcaatcaaattttataacgtaatagattgattgaatatttacaggttatgcatacacggagaagatgtactgacaacatcttggggatattcgtgcgaataagccaagtgcagctgaatggcttgatcaattacccaaacaaaaatgggtacaatgc

SEQ ID NO: 8399 - DNA, 1051 bp, Glycine max
  Gm_smallRNAprecursor_1232
ggtgagaataggacaggccagaccaggctttgaaaggcctgagcctagcctacgatgaatctttgagacctgagtctggcctatagtctatcaaaagcttttattttggctcggcctgacctttttaaaagccttcttcacaataaatatttaatattttatggggtaggaactaaagttagaaaaaaaaaggaaagtcaatcaaaataataaggaatataaaatggcacatgactcacacctaaattgtaattaaagtccttgattataggaatagaagttatggagatgtgtaatcaaagtctgatagtttcaaaaaaaattaattatatccaaaaaataatatatatatatatatatatatatatatatatatatatatatatatatatatatatatatatatatatatatatatatcctatctgtccgtttgatcctactccgctgacctctggtatcaaagcctgatggggaagtaggaatagtggtccgtaagggcatatgttaactgaacttatggatctgaaccatgtacagtaattttaatttaaacagtatgtgtttgaacagtattttctggaagcacagcagtctgatattttagttgaatgatattgtagcagtaagtcccgtggttgagaaagggcagtaaggctaaggtgtattgttcaaataaaatattgagacataatatactggtggctataggagtaatgttcaaactatattgtctgtattaaagaaaaaaatctttttcatttattcagatccaagaagttctgtaacatatagccttatggaaagatttctatgaaaccaaatgaaggcaaagatattagagaatgttttaatcatgtctagattattgcgatctttctcccgtatctcttttcgctcaaattcctcctcttcatcttcttcaagaaacaccaatctattaaatgatcaggataaccagacccaagaggtcgccccaaaacacaatctcttcgatgaggaagtccgattcgaagatatcaatcaaaacatggatgactggaacattcca

SEQ ID NO: 8400 - DNA, 1097 bp, Glycine max
  Gm_smallRNAprecursor_1233
ggtgagaataggacaggccagaccaggctttgaaaggcctgagcctagcctacgatgaatctttgagacctgagtctggcctatagtctatcaaaagcttttattttggctcggcctgacctttttaaaagccttcttcacaataaatatttaatattttatggggtaggaactaaagttagaaaaaaaaaggaaagtcaatcaaaataataaggaatataaaatggcacatgactcacacctaaattgtaattaaagtccttgattataggaatagaagttatggagatgtgtaatcaaagtctgatagtttcaaaaaaaattaattatatccaaaaaataatatatatatatatatatatatatatatatatatatatatatatatatatatatatatatatatatatatatatatatcctatctgtccgtttgatcctactccgctgacctctggtatcaaagcctgatggggaagtaggaatagtggtccgtaagggcatatgttaactgaacttatggatctgaaccatgtacagtaattttaatttaaacagtatgtgtttgaacagtattttctggaagcacagcagtctgatattttagttgaatgatattgtagcagtaagtcccgtggttgagaaagggcagtaaggctaaggtgtattgttcaaataaaatattgagacataatatactggtggctataggagtaatgttcaaactatattgtctgtattaaagaaaaaaatctttttcatttattcagatccaagaagttctgtaacatatagccttatggaaagatttctatgaaaccaaatgaaggcaaagatattagagaatgttttaatcatgtctagattattgcgatctttctcccgtatctcttttcgctcaaattcctcctcttcatcttcttcaagaaacaccaatctattaaatgatcaggataaccagacccaagaggtcgccccaaaacacaatctcttcgatgaggaagtccgattcgaagatatcaatcaaaacatggatgactggaacattccagaaatccctcaggatcaactatacgttcctgaaacaattaaggaca

SEQ ID NO: 8401 - DNA, 1043 bp, Glycine max
  Gm_smallRNAprecursor_1234
atgaatctttgagacctgagtctggcctatagtctatcaaaagcttttattttggctcggcctgacctttttaaaagccttcttcacaataaatatttaatattttatggggtaggaactaaagttagaaaaaaaaaggaaagtcaatcaaaataataaggaatataaaatggcacatgactcacacctaaattgtaattaaagtccttgattataggaatagaagttatggagatgtgtaatcaaagtctgatagtttcaaaaaaaattaattatatccaaaaaataatatatatatatatatatatatatatatatatatatatatatatatatatatatatatatatatatatatatatatatcctatctgtccgtttgatcctactccgctgacctctggtatcaaagcctgatggggaagtaggaatagtggtccgtaagggcatatgttaactgaacttatggatctgaaccatgtacagtaattttaatttaaacagtatgtgtttgaacagtattttctggaagcacagcagtctgatattttagttgaatgatattgtagcagtaagtcccgtggttgagaaagggcagtaaggctaaggtgtattgttcaaataaaatattgagacataatatactggtggctataggagtaatgttcaaactatattgtctgtattaaagaaaaaaatctttttcatttattcagatccaagaagttctgtaacatatagccttatggaaagatttctatgaaaccaaatgaaggcaaagatattagagaatgttttaatcatgtctagattattgcgatctttctcccgtatctcttttcgctcaaattcctcctcttcatcttcttcaagaaacaccaatctattaaatgatcaggataaccagacccaagaggtcgccccaaaacacaatctcttcgatgaggaagtccgattcgaagatatcaatcaaaacatggatgactggaacattccagaaatccctcaggatcaactatacgttcctgaaacaattaaggaca

SEQ ID NO: 8402 - DNA, 1157 bp, Glycine max
  Gm_smallRNAprecursor_1235
gaatagtggtccgtaagggcatatgttaactgaacttatggatctgaaccatgtacagtaattttaatttaaacagtatgtgtttgaacagtattttctggaagcacagcagtctgatattttagttgaatgatattgtagcagtaagtcccgtggttgagaaagggcagtaaggctaaggtgtattgttcaaataaaatattgagacataatatactggtggctataggagtaatgttcaaactatattgtctgtattaaagaaaaaaatctttttcatttattcagatccaagaagttctgtaacatatagccttatggaaagatttctatgaaaccaaatgaaggcaaagatattagagaatgttttaatcatgtctagattattgcgatctttctcccgtatctcttttcgctcaaattcctcctcttcatcttcttcaagaaacaccaatctattaaatgatcaggataaccagacccaagaggtcgccccaaaacacaatctcttcgatgaggaagtccgattcgaagatatcaatcaaaacatggatgactggaacattccagaaatccctcaggatcaactatacgttcctgaaacaattaaggacaaacacaactttgattacataatcaaaacagtagaaaaaaatattcctctaggacaagatataggggaagaatttcatttactctcaaaaaattcaatttatgaacatagtcgtaagtataaatatttacacatcggttgtgtacaagtagccatcaagcccttaattgatatgggcatagatgcagcacttttaatgtgtctaagagatattaggcataatcaatttgaagactccctaattggaacagtcgaaaccagcctaggacaaggtccaatatattttaattgttatccaaacaaaacagtgagtctgatggacagaaacattcttgactctctgttcttaaacatccactttcatggccttgacatgaaagaaggatcaatcccagcagccttaatttataggattcagtacaaggtcatgaatacttgtgcatctagagtcctgttaaaacctcaaaaaggagaaacaactttgtttatcactgatatgacaaaggctaacgtttctctcccgagaaaaataaaatgggatgaa

SEQ ID NO: 8403 - DNA, 1039 bp, Glycine max
  Gm_smallRNAprecursor_1236
ggaatggattcatggagttggggctgtgccatctaccctccaccagaaactcattatctggagggaagatgggattgttgaaaatatagaggcagatcaaagcttctataagtcagaggttgataatgttactgcacaaacctttgacaaaaagttggctaacatagcaccttgtggtgacaaggaggctgttttcgaatcaagtgacaatgttatccactctgtcaaactccatcctacctatgggtttatatgggagagggaggaaattgatgctgttccctctgaagatggagtcattccaccaactgggtggaatatatatgaagattaatatgactgaggccactgcatgggccagaattacggcttatatggccgaaaatagactaaatacggcctttgaggctgaatctcaacaaaatatggcagttgaagccaagatcgaagatcatgaaaacaaagaaacaaaggatcgaagactggattgcatttatgacgatgagccgctgggttttgagaaaaatcccataagtgaggtgccaaagatgcaggctcaagatcctttggaggagatcgacattggaaatggctcgataaaaaggccaacctatatcagtgccaatatcacctcaagtctaaaagaaaagctggtgcctcttcttagagaatttaaagactgttttgcttgggattaccacgaaatgcctgggttaagcagagaaatggtcgaaatgaaattaccgattaaggagggaaaaagaccagtaaaacaactaccaagaagattcgcaccagaaatcatgtccaaaattaaggaagagatcgaaaggctgctgaggtgtaaattcatcagatctgccaggtatgtcgaatggttagcaaatatagtccctgtcattaaaaagaatggaactcttagagtatgcatagattttagggatttaaataatgctacacctaaagatgaatatgctatgccagtagcggaaatgttggtagattcggcagctggcttcgaatttttaagcatgttaga

SEQ ID NO: 8404 - DNA, 1157 bp, Glycine max
  Gm_smallRNAprecursor_1237
taggaatagtgtccataagggcatatgttaactgaacttatggatctgaaccatgtacaataattttaatttaaacaatatgtgtttgaacaatattttctggaagcacagcagtttgatattttagttgaatgatactgtagcagtaagtcccgtggttgagaaagggcagtaaggctaaggtgtattgttcaaataaaatattgagacataatatactggtggctataggagtaatgttcaaactatattgtctgttaaaaaaaattctttttcattttttcagatccaagaagttctgtaacatatatagcgttatggaaatatttctatggaaccaaatgaaggcaaagatattagagaatgatataatcatgtctagactattgcgatctttttcccatatctcttttcgctcaaattcctcctcatcatcttcttcaagaaactccaatctattaaatgatcaagataaccagacccaagaggtcaccccaaaacacaatctcttcgatgaggaagtccgattcgaagatatcaatcaaaacatggatgactagaacattccagaaatccctcaggatcaactatacgttcctgaaacaataaagaacaaacacaactttgattacataatcaaaacagtagaaaacaatattcctctaggacaagatataggggaagaatttcatttactttcaaaaaattcaatttatgaacatagccgtaagtataaatatctacacatcgattgtgtacaagtagccatcaagcccttaatcgatatgggcatagatgcagcagttttaatgtgtctaagagatattaggcataatcaatttgaagactccctaattggaacagttgaaaccagcctaggacaaggtccaatatatattttaattgttatccaaacaaaacagtgagtctgatggacagaaacattcttgactctctgttcttaaacatccactttcatggccttgacatgaaagaaggatcaatcccagcagccttaatttataggatccagtacaaggtcatgaatacttgtgcatctagagtcctgttaaaacctcaaaaaggagaaacaactttgtttatcactgatatgacaaaggctaacgtttctctcccgagaaaaataaaatgggatg

SEQ ID NO: 8405 - DNA, 1080 bp, Glycine max
  Gm_smallRNAprecursor_1238
atgatttcgttttagaaacaatggccctatttgacacaggggctaattcaaactgcattttagaaggattaattcctacaaaattctttgagaaaacctcagaaaaattaagcacggcaaacggctcaaaattaaaaattaattttaagctatcaaatgcaatcattgaaaaccaaggtcttaagattaacacaaactttcttctggtaaaaaaccttgagaatgaagtaatcttaggaacacccttcattagagccctgtttcccatccaaatatctaatgaaggaataaccacaaattatttaggaagaaaaattatatttaatttttctactaaaccaattaccagaaatataaatcttatagaaaataagattaatcaaattaacttcttaaaagaagaagtatcttttaataatattcagatacaactgggaaaaccccaagtaaaagaaaaaaatcaatctttattaaatcatatagaatcgaccgtctgttctgaattgccacatgcattttgggacagaaagaaacatattgttgatctcccttatgagaaagactttagggaaaaacaaattcccaccaaagccagaccaatccaaatgaatgaagaacttcttcaatactgtcaaaaggaaatcaagtatttgcttgataaaggcctaatccggaaaagcaaaagcccatggtcttgtgcggctttttatgtcaacaaacaatctgagattgagcgtggaacaccccgcttagtcataaactacaaaccactaaatcaagcgttacaatggattagatatcctattccaaacaaaaaagatttgcttaatagattaaattctgcaaagatattttcaaaatttgatatgaaatctggattttggcaaatccaaatccaagaatcagataggtacaaaacagcatttactgtacctttcgggcaatatgaatggaatgtgatgccattcggactgaagaatgccccttcagaatttcaaaaaattatgaatgatatttttaatccctattcaaaatttgtcattgtctacatagatgatgttttaatcttttcccaaaaca

SEQ ID NO: 8406 - DNA, 1198 bp, Glycine max
  Gm_smallRNAprecursor_1239
acagaaagaaacatattgttgatctcccttatgagaaagactttagggaaaaacaaattcccaccaaagccagaccaatccaaatgaatgaagaacttcttcaatactgtcaaaaggaaatcaagtatttgcttgataaaggcctaatccggaaaagcaaaagcccatggtcttgtgcggctttttatgtcaacaaacaatctgagattgagcgtggaacaccccgcttagtcataaactacaaaccactaaatcaagcgttacaatggattagatatcctattccaaacaaaaaagatttgcttaatagattaaattctgcaaagatattttcaaaatttgatatgaaatctggattttggcaaatccaaatccaagaatcagataggtacaaaacagcatttactgtacctttcgggcaatatgaatggaatgtgatgccattcggactgaagaatgccccttcagaatttcaaaaaattatgaatgatatttttaatccctattcaaaatttgtcattgtctacatagatgatgttttaatcttttcccaaaacattgaccaacatttcaaacatctccagaccttcatccatatcatcaaacagaatggtttggcagtctccaaatcaaaaatcaatcttttccaaactcgaattcgattccttggtcacaatatatatcaaggtacaatcattccaatcgaaaggtcaatagagtttactagcaaatttcccaaccaaatcttagacaaaacccagttacaaagatttctaggttgtctaaattacgtaggagaatttgtcccctatttaaacaatattgtcaagccattgcatgataggctgaagaaaaatccgcctccttggtctgacctccatacacaaacagttaaagaaatcaaagtcaaagtccaatccataaaatgtctgtatcttcatattccacaggcatttaaaattgtcgaaactaatgcttcagacataggttatggtggcatcctcaaacaaagagtccatggccaagatcatgtcattgcatatacatcaaaacattggaatcctgcacaattaaaatactcaactgttaaaaaggaagttttagcaattgttttatgcatttccaaatttcaatcggatttattaaaccaaaattttttaatcagggttgattgtaaatcagccaaagatattttaca

SEQ ID NO: 8407 - DNA, 1232 bp, Glycine max
  Gm_smallRNAprecursor_1240
acagaaagaaacatattgttgatctcccttatgagaaagactttagggaaaaacaaattcccaccaaagccagaccaatccaaatgaatgaagaacttcttcaatactgtcaaaaggaaatcaagtatttgcttgataaaggcctaatccggaaaagcaaaagcccatggtcttgtgcggctttttatgtcaacaaacaatctgagattgagcgtggaacaccccgcttagtcataaactacaaaccactaaatcaagcgttacaatggattagatatcctattccaaacaaaaaagatttgcttaatagattaaattctgcaaagatattttcaaaatttgatatgaaatctggattttggcaaatccaaatccaagaatcagataggtacaaaacagcatttactgtacctttcgggcaatatgaatggaatgtgatgccattcggactgaagaatgccccttcagaatttcaaaaaattatgaatgatatttttaatccctattcaaaatttgtcattgtctacatagatgatgttttaatcttttcccaaaacattgaccaacatttcaaacatctccagaccttcatccatatcatcaaacagaatggtttggcagtctccaaatcaaaaatcaatcttttccaaactcgaattcgattccttggtcacaatatatatcaaggtacaatcattccaatcgaaaggtcaatagagtttactagcaaatttcccaaccaaatcttagacaaaacccagttacaaagatttctaggttgtctaaattacgtaggagaatttgtcccctatttaaacaatattgtcaagccattgcatgataggctgaagaaaaatccgcctccttggtctgacctccatacacaaacagttaaagaaatcaaagtcaaagtccaatccataaaatgtctgtatcttcatattccacaggcatttaaaattgtcgaaactaatgcttcagacataggttatggtggcatcctcaaacaaagagtccatggccaagatcatgtcattgcatatacatcaaaacattggaatcctgcacaattaaaatactcaactgttaaaaaggaagttttagcaattgttttatgcatttccaaatttcaatcggatttattaaaccaaaattttttaatcagggttgattgtaaatcagccaaagatattttacaaaaagatgttaaaaaccttgcctcaaaacaaatt

SEQ ID NO: 8408 - DNA, 1107 bp, Glycine max
  Gm_smallRNAprecursor_1241
caatctgagattgagcgtggaacaccccgcttagtcataaactacaaaccactaaatcaagcgttacaatggattagatatcctattccaaacaaaaaagatttgcttaatagattaaattctgcaaagatattttcaaaatttgatatgaaatctggattttggcaaatccaaatccaagaatcagataggtacaaaacagcatttactgtacctttcgggcaatatgaatggaatgtgatgccattcggactgaagaatgccccttcagaatttcaaaaaattatgaatgatatttttaatccctattcaaaatttgtcattgtctacatagatgatgttttaatcttttcccaaaacattgaccaacatttcaaacatctccagaccttcatccatatcatcaaacagaatggtttggcagtctccaaatcaaaaatcaatcttttccaaactcgaattcgattccttggtcacaatatatatcaaggtacaatcattccaatcgaaaggtcaatagagtttactagcaaatttcccaaccaaatcttagacaaaacccagttacaaagatttctaggttgtctaaattacgtaggagaatttgtcccctatttaaacaatattgtcaagccattgcatgataggctgaagaaaaatccgcctccttggtctgacctccatacacaaacagttaaagaaatcaaagtcaaagtccaatccataaaatgtctgtatcttcatattccacaggcatttaaaattgtcgaaactaatgcttcagacataggttatggtggcatcctcaaacaaagagtccatggccaagatcatgtcattgcatatacatcaaaacattggaatcctgcacaattaaaatactcaactgttaaaaaggaagttttagcaattgttttatgcatttccaaatttcaatcggatttattaaaccaaaattttttaatcagggttgattgtaaatcagccaaagatattttacaaaaagatgttaaaaaccttgcctcaaaacaaatttttgcaagatgacaagcaattctaagtgtctttgattttgacatagaatacatcaagggcgcctcaaattca

SEQ ID NO: 8409 - DNA, 1218 bp, Glycine max
  Gm_smallRNAprecursor_1242
ttaatagattaaattctgcaaagatattttcaaaatttgatatgaaatctggattttggcaaatccaaatccaagaatcagataggtacaaaacagcatttactgtacctttcgggcaatatgaatggaatgtgatgccattcggactgaagaatgccccttcagaatttcaaaaaattatgaatgatatttttaatccctattcaaaatttgtcattgtctacatagatgatgttttaatcttttcccaaaacattgaccaacatttcaaacatctccagaccttcatccatatcatcaaacagaatggtttggcagtctccaaatcaaaaatcaatcttttccaaactcgaattcgattccttggtcacaatatatatcaaggtacaatcattccaatcgaaaggtcaatagagtttactagcaaatttcccaaccaaatcttagacaaaacccagttacaaagatttctaggttgtctaaattacgtaggagaatttgtcccctatttaaacaatattgtcaagccattgcatgataggctgaagaaaaatccgcctccttggtctgacctccatacacaaacagttaaagaaatcaaagtcaaagtccaatccataaaatgtctgtatcttcatattccacaggcatttaaaattgtcgaaactaatgcttcagacataggttatggtggcatcctcaaacaaagagtccatggccaagatcatgtcattgcatatacatcaaaacattggaatcctgcacaattaaaatactcaactgttaaaaaggaagttttagcaattgttttatgcatttccaaatttcaatcggatttattaaaccaaaattttttaatcagggttgattgtaaatcagccaaagatattttacaaaaagatgttaaaaaccttgcctcaaaacaaatttttgcaagatgacaagcaattctaagtgtctttgattttgacatagaatacatcaagggcgcctcaaattcattacctgactaccttacccgtgaattcttacagaaaagtggtaatgcctcctacggcatcgggaatctccctaaggggaggaaggagtacaggcaaaggagccagactggctcttccagagccaaccatcaagaaatcatcaacctcttctgggtcaccaacccaggctgggtcatctacccagaaaaccaatttagaagggtcatcaacccagatt

SEQ ID NO: 8410 - DNA, 1071 bp, Glycine max
  Gm_smallRNAprecursor_1243
tacctttcgggcaatatgaatggaatgtgatgccattcggactgaagaatgccccttcagaatttcaaaaaattatgaatgatatttttaatccctattcaaaatttgtcattgtctacatagatgatgttttaatcttttcccaaaacattgaccaacatttcaaacatctccagaccttcatccatatcatcaaacagaatggtttggcagtctccaaatcaaaaatcaatcttttccaaactcgaattcgattccttggtcacaatatatatcaaggtacaatcattccaatcgaaaggtcaatagagtttactagcaaatttcccaaccaaatcttagacaaaacccagttacaaagatttctaggttgtctaaattacgtaggagaatttgtcccctatttaaacaatattgtcaagccattgcatgataggctgaagaaaaatccgcctccttggtctgacctccatacacaaacagttaaagaaatcaaagtcaaagtccaatccataaaatgtctgtatcttcatattccacaggcatttaaaattgtcgaaactaatgcttcagacataggttatggtggcatcctcaaacaaagagtccatggccaagatcatgtcattgcatatacatcaaaacattggaatcctgcacaattaaaatactcaactgttaaaaaggaagttttagcaattgttttatgcatttccaaatttcaatcggatttattaaaccaaaattttttaatcagggttgattgtaaatcagccaaagatattttacaaaaagatgttaaaaaccttgcctcaaaacaaatttttgcaagatgacaagcaattctaagtgtctttgattttgacatagaatacatcaagggcgcctcaaattcattacctgactaccttacccgtgaattcttacagaaaagtggtaatgcctcctacggcatcgggaatctccctaaggggaggaaggagtacaggcaaaggagccagactggctcttccagagccaaccatcaagaaatcatcaacctcttctgggtcaccaacccaggctgggtca

SEQ ID NO: 8411 - DNA, 1115 bp, Glycine max
  Gm_smallRNAprecursor_1244
tcaatagagtttactagcaaatttcccaaccaaatcttagacaaaacccagttacaaagatttctaggttgtctaaattacgtaggagaatttgtcccctatttaaacaatattgtcaagccattgcatgataggctgaagaaaaatccgcctccttggtctgacctccatacacaaacagttaaagaaatcaaagtcaaagtccaatccataaaatgtctgtatcttcatattccacaggcatttaaaattgtcgaaactaatgcttcagacataggttatggtggcatcctcaaacaaagagtccatggccaagatcatgtcattgcatatacatcaaaacattggaatcctgcacaattaaaatactcaactgttaaaaaggaagttttagcaattgttttatgcatttccaaatttcaatcggatttattaaaccaaaattttttaatcagggttgattgtaaatcagccaaagatattttacaaaaagatgttaaaaaccttgcctcaaaacaaatttttgcaagatgacaagcaattctaagtgtctttgattttgacatagaatacatcaagggcgcctcaaattcattacctgactaccttacccgtgaattcttacagaaaagtggtaatgcctcctacggcatcgggaatctccctaaggggaggaaggagtacaggcaaaggagccagactggctcttccagagccaaccatcaagaaatcatcaacctcttctgggtcaccaacccaggctgggtcatctacccagaaaaccaatttagaagggtcatcaacccagattgcctcattcaaacctgagccatccactcaggaatctcccaaaccggcaaccgccaaacaaacatcggccgactatgcatggccaattgaaacccttcaggcccttcaagacatgggtctgaccaaatttccaaaaataatcaaaaaatcttgggcagacattacctcagaatctgatgatgaatctgaatcaaatttacaaacaatgatccaaaatgcgtcaatgaccaaaaccgccaccaatactaaaggaaaactacctttagccaaagctcaaacaccacctaccaaacaaactaacaatt

SEQ ID NO: 8412 - DNA, 1189 bp, Glycine max
  Gm_smallRNAprecursor_1245
aaacacccactcgacaatccaaatactaaaagttcttcaaccaagacactttggttcggacttgaacaaaggaaagagattttcagttccatttgatccggtaggttatacctattgggattacgttgatgcttggactaaggtgttttggcaccaaaatacccgcttcaagcattcatggctgatatatttcaagaccaatacaaccaattggtttttgcaatggtgggacttctttggaccaatcccagagatattcccagaaacggtccaacaaggatttgcccaatttaagaaataatacaattcgcaggaatcacgaattctagcagatcttaaatacttttcaagctttgcactgtcatggatattctcatgacaatatcgttacagcaagactgaaaagacaaaccaatatccatcactacaaagacacgcatttgtaaaatggtggacacaatttgactcatccaaagcggatccagaacaagtaaaactctggttccaatcccatccagaattcctcaaagcagctgatccagaaacttctgtgtttttgaaccaaaagtctcatttggcagcatttttagcaggatcgacatcaaaggaggtcttagctaaaaatctgaaggaagttctgcaaatgttacaacaggaagaagaagcttcatcctcaaagaaggaagaaacaagttctgctgaagaagaagaagaagatcccttttaccaaaacgaagatgattgttttggtatctgtttagattaaatttaatttcggtcacaaagtcgtttgtctgtaattaatgtgtaattaatgctggacaatactacctgtcctgtagccattaaagtcccgatcaaaactacttgtcttgtaacaaacagtcaaatagtcccggtcaaaactaccggcaactaccggtcttagatttttggctatataaggagtcctcaagtatgttgtgaggcaccctttcatttggccaattttcaggtttctgaagagaggtgctctgaaacaagatttttgtaagcgctactttcaaaattcaataaatttctatttttcatccttctctcttctcccttcaccgatcctgtgcggctctgccgccgcttcggtttctttgtttatgaaaacttggggtttgtaagccggtctccggtgtgcccttgatatctgtttttc

SEQ ID NO: 8413 - DNA, 1046 bp, Glycine max
  Gm_smallRNAprecursor_1246
ggctgatatatttcaagaccaatacaaccaattggtttttgcaatggtgggacttctttggaccaatcccagagatattcccagaaacggtccaacaaggatttgcccaatttaagaaataatacaattcgcaggaatcacgaattctagcagatcttaaatacttttcaagctttgcactgtcatggatattctcatgacaatatcgttacagcaagactgaaaagacaaaccaatatccatcactacaaagacacgcatttgtaaaatggtggacacaatttgactcatccaaagcggatccagaacaagtaaaactctggttccaatcccatccagaattcctcaaagcagctgatccagaaacttctgtgtttttgaaccaaaagtctcatttggcagcatttttagcaggatcgacatcaaaggaggtcttagctaaaaatctgaaggaagttctgcaaatgttacaacaggaagaagaagcttcatcctcaaagaaggaagaaacaagttctgctgaagaagaagaagaagatcccttttaccaaaacgaagatgattgttttggtatctgtttagattaaatttaatttcggtcacaaagtcgtttgtctgtaattaatgtgtaattaatgctggacaatactacctgtcctgtagccattaaagtcccgatcaaaactacttgtcttgtaacaaacagtcaaatagtcccggtcaaaactaccggcaactaccggtcttagatttttggctatataaggagtcctcaagtatgttgtgaggcaccctttcatttggccaattttcaggtttctgaagagaggtgctctgaaacaagatttttgtaagcgctactttcaaaattcaataaatttctatttttcatccttctctcttctcccttcaccgatcctgtgcggctctgccgccgcttcggtttctttgtttatgaaaacttggggtttgtaagccggtctccggtgtgcccttgatatctgtttttcaagtttatattttcatttcatttatcatactgtatt

SEQ ID NO: 8414 - DNA, 1213 bp, Glycine max
  Gm_smallRNAprecursor_1247
atatttcaagaccaatacaaccaattggtttttgcaatggtgggacttctttggaccaatcccagagatattcccagaaacggtccaacaaggatttgcccaatttaagaaataatacaattcgcaggaatcacgaattctagcagatcttaaatacttttcaagctttgcactgtcatggatattctcatgacaatatcgttacagcaagactgaaaagacaaaccaatatccatcactacaaagacacgcatttgtaaaatggtggacacaatttgactcatccaaagcggatccagaacaagtaaaactctggttccaatcccatccagaattcctcaaagcagctgatccagaaacttctgtgtttttgaaccaaaagtctcatttggcagcatttttagcaggatcgacatcaaaggaggtcttagctaaaaatctgaaggaagttctgcaaatgttacaacaggaagaagaagcttcatcctcaaagaaggaagaaacaagttctgctgaagaagaagaagaagatcccttttaccaaaacgaagatgattgttttggtatctgtttagattaaatttaatttcggtcacaaagtcgtttgtctgtaattaatgtgtaattaatgctggacaatactacctgtcctgtagccattaaagtcccgatcaaaactacttgtcttgtaacaaacagtcaaatagtcccggtcaaaactaccggcaactaccggtcttagatttttggctatataaggagtcctcaagtatgttgtgaggcaccctttcatttggccaattttcaggtttctgaagagaggtgctctgaaacaagatttttgtaagcgctactttcaaaattcaataaatttctatttttcatccttctctcttctcccttcaccgatcctgtgcggctctgccgccgcttcggtttctttgtttatgaaaacttggggtttgtaagccggtctccggtgtgcccttgatatctgtttttcaagtttatattttcatttcatttatcatactgtattcttacttcctatctatccgtctgtatcctttccgctgacttatatatatatatatcaagttatttttcatcttaatgattgatttttttgaatcaatgattaagattaactatttattataataattatattttaagaaaataaataatgaaaataaaaaaaatattttaaaaa

SEQ ID NO: 8415 - DNA, 1053 bp, Glycine max
  Gm_smallRNAprecursor_1248
cctgagggatcaacacaactctcctttatgctgacacgagcacctaagggaccaacctctggctccggaggcagtgcaagtccctgtgattgcatctgagattgaaattatgactgcatctggctgaatgatgtcatcacctgctgagtcactttttctctgatcactcctccagctgttcctaatttgttgggtcaactgttgtaggtcttcaagaggcatggaggaagaactgcaggacgttcacggagccgatccgaaatattgctttatggtgacaccggctccagcagcacggacacggccagggtgctctggtcgcccaatgctacagtcagaacatcctgacatccatgggggacgaacgatccctatgatgcctactcctccaaaaaatcatgtacagaacacatatatttgtcctaggcattcatagaatacacaaagataattataattcttaattgaaaatgacttacaatcttcttagttatttcctttgctgcctcagacgtcatctgcccagttttctttgtccaggccatcttccaattcacgtggcgtctgatgggagatggagggtcaatgacgccctcagtgcttccggactggctagcttcctccagtctttactttgtcttctcaaccatgatcttttgttctaaatattcataacccccacgagacaacatgtggggggtagtgttttgcttctggatggcatgtgtctttttccgcacatcccgcaaaaatcgaacattaatgaaaatgattactacaatgaattataagaagtgattttttttgtggaaaacaactaaaatgacaaactacatacctcccatgaggggtctctgcgggtctgacaaaactgggcccatttctccttgctaatgtcgtatttttcacagatagtgtcgtccacaccgtccttgtcggctgcaagtgcccatttcttggtcaagtcagatttaaactgcctccaccactcgctgacagtctcaaaaattttcttctttttcctactgtcagaagcttcaaggatttcaaatt

SEQ ID NO: 8416 - DNA, 1162 bp, Glycine max
  Gm_smallRNAprecursor_1249
aaagcaggggaatatgtcttttgctattgcctaaccaatttcagcacctctcaagaacttcagctacaagctttaaaaaaaataaggaaattaagttagtattatatatgacaagttagtattatatatatatatatatatatatatatatatatatatatatatatatatatatatatatatatatataccagagatcagcgaaaaggatacaaacggacagataggaagtaagagtaatgcaatatgacaaataaaaatgtaaaacagttatcaagggcacaccggaatccggcttacaaacccaggtttttgaaaacaaagaaaccgaagcgacggcagagccgcacaggatcggtgaagggagaagggagatgtgaaaaatagaactttgaatttattgaaatcgaaagaaaagcttacaaagagattttccctaggcagagcttctctctctaaaacctggttttgagactatctgaaagggtgcctcacaaagggaacgaggactcctttaaatagacccaatgttttactgtttcaacagtatcggtaatgtttaccggaactgttacaaaaactttttcaaattacattattatcgggaaccgaataattagttacaataattcatgattactacaactaaccatcgtctaacgatataccaaaacagtcatcctcattttggtagaatggatcatcttcttggtcatcattattctcggatgattcggcttccttcttgaggggttcttcttcttcttcctgttgaagtagctggagaacttccttaagattctgagcaagactttctttagattttgagcttgctaagaatgctgcaagttgagacttttgatttagaaacaatgatgtctctggatcagcaggcttgagaagctcagggttgctctgaaaccagttcttgacttgttctggagcagcctttgaggtatcaaattgtgaccaccactttacaaaggcatgtctctgcaatggtggatattgtttgctgttttcggtttttccatatctgtattgccatgaaaaaatccatgacaaggaaaaactggaaaagtactttaaatctgccggaattcttgattccttgctattgaagagcttggtgaattgttggaatccctgttggacttcttct

SEQ ID NO: 8417 - DNA, 1106 bp, Glycine max
  Gm_smallRNAprecursor_1250
agtagctggagaacttccttaagattctgagcaagactttctttagattttgagcttgctaagaatgctgcaagttgagacttttgatttagaaacaatgatgtctctggatcagcaggcttgagaagctcagggttgctctgaaaccagttcttgacttgttctggagcagcctttgaggtatcaaattgtgaccaccactttacaaaggcatgtctctgcaatggtggatattgtttgctgttttcggtttttccatatctgtattgccatgaaaaaatccatgacaaggaaaaactggaaaagtactttaaatctgccggaattcttgattccttgctattgaagagcttggtgaattgttggaatccctgttggacttcttctggaaatatctgcggaattggtccgaagtagttccaccattggaggaaccaatttggaaaattatacacagtgttattcttgaagtaaattagccatgaatgcttaaatttactattttgatgccagaacatattggtccaggcgtcaatgtagtcccaataattatatcctgcaggatcaaaaggtgcagaaatttttttgggttggtttaagtttgagccataatgtcgtggctgcataacctttaggatttggattgtggaatgggtatttagatttggatctttggggtctttgaagtgtttaatagatactgagtttgtatctattaggatgaattcgtagaattttctggttttatttgtggtcgttggcctataatggaatcatggggggaatactttggcggttgccttgaaaggattcttgtcccagtattctggttccatttgtaaaacattgaaaaatttgttttttgagatatagctattgctgggttgtggtgttgattcttgttgagtcaacggttggcttggtttttggttacagacagttttggtctgtttggccttttggatttgtttttgtaggtctgtttcagaatcatcgtctgattctaaggccatttctgcccaggtctttttggccaattttggtactctggtgaggcctatgtcttctaaggccaggagagtttgtattgaccaggcatagtcagc

SEQ ID NO: 8418 - DNA, 1037 bp, Glycine max
  Gm_smallRNAprecursor_1251
ttgtattgaccaggcatagtcagccacagtctgttttgttgttgttggttttggggattcctgagttgatgactcaggttttatctgggtcaatgacccttcaagctttcctttatgggttgatgacccagtctgagtaggtgacccagaagatgatgtagttgtcttcttggttattggctctaccagagccaatataacatcttttcctttagtaccggatcttcctcctctgccggaggagctagacactttaggaggcatcgggaattttccgtaaaaattcacgggtgaggtagtcaggtagagagtttgaagagcccttgatatattctatgttaaaatcaaagacgcttaaaattgcctgccatcttgcaaaaatttgttttgaggcaaggttttttacatccttttgtaaaatgtctttggctaatttgcagtcaacccttactaaaattttttgattcaataaatcagattgaaatttggaaatgcacaaaacaattgctaaaacttcctttttaacagttgaatattttaattgtgcaggattccaatgttttgaagtatatgcaataacatgttcttgaccgtgtattttttgtttaaggataccaccgtaaccgatgtctgatgcatcaatttcgacaattttgaatgcctgtggaatgggaagatacagacattttatggattggactttgactttgatttctttgactgtttgagtatggaggtcagaccaaggaggcggattctttttcagcctatcatgtaatggtttgacaatattgtttagataggggacaaattctcctacataatttaggcaccccagaaatcgttgtaactgggtcttgtctaagatttggttagggaatttgctggcaaactttattgatctttctattggaatgattgtgccttggtatatattgtgcccaaggaatcgtatccgtgtctggaaaagatttatctttgatttggagactgccaaaccattctgtttaatgatatggatgaaagtctggaggtgt

SEQ ID NO: 8419 - DNA, 1038 bp, Glycine max
  Gm_smallRNAprecursor_1252
ttgtattgaccaggcatagtcagccacagtctgttttgttgttgttggttttggggattcctgagttgatgactcaggttttatctgggtcaatgacccttcaagctttcctttatgggttgatgacccagtctgagtaggtgacccagaagatgatgtagttgtcttcttggttattggctctaccagagccaatataacatcttttcctttagtaccggatcttcctcctctgccggaggagctagacactttaggaggcatcgggaattttccgtaaaaattcacgggtgaggtagtcaggtagagagtttgaagagcccttgatatattctatgttaaaatcaaagacgcttaaaattgcctgccatcttgcaaaaatttgttttgaggcaaggttttttacatccttttgtaaaatgtctttggctaatttgcagtcaacccttactaaaattttttgattcaataaatcagattgaaatttggaaatgcacaaaacaattgctaaaacttcctttttaacagttgaatattttaattgtgcaggattccaatgttttgaagtatatgcaataacatgttcttgaccgtgtattttttgtttaaggataccaccgtaaccgatgtctgatgcatcaatttcgacaattttgaatgcctgtggaatgggaagatacagacattttatggattggactttgactttgatttctttgactgtttgagtatggaggtcagaccaaggaggcggattctttttcagcctatcatgtaatggtttgacaatattgtttagataggggacaaattctcctacataatttaggcaccccagaaatcgttgtaactgggtcttgtctaagatttggttagggaatttgctggcaaactttattgatctttctattggaatgattgtgccttggtatatattgtgcccaaggaatcgtatccgtgtctggaaaagatttatctttgatttggagactgccaaaccattctgtttaatgatatggatgaaagtctggaggtgtt

SEQ ID NO: 8420 - DNA, 1116 bp, Glycine max
  Gm_smallRNAprecursor_1253
tttctttgtcattttcagatgcctatcatgaacctatacgtgttgattgagatggcaacgcaagggagcaacgtggatctgcagaagccatcttttctggcaaagacaagattaatatcattctaactctgttacaccttgtttttatcttgagggttattacttagttggaattgagctgcatccaaagtgtaatgagacctttattagggattcatgattatctaaacgtcttatattaaggtatatatctggtacccctttcttgaaagttgggattttttttcttcttttagaagtctctaaatttattcttttcattttcgtaaaatgatatgtcctccctttgtgcgagcacaaatgtaaaattttgtttgataaatcttatatcaataacaacttttgatcaacatcaaaaacgcgcgcgtgcgctctgaattactgtaaatgtctaaaaaaacaaaaactccaattaaaaaaaatattttacgacagttctgatcacgaccgtcttagaatacatgcattctaagacggtcacctggtcagggccgtcgtagactgcgttgcattctaagacggtcctggccatgtgattgtaccatcttagaatgcattgaattgtaagacagtcacgtggccaggaccgtattagaattcaatgtattctaggacggtcctatgcaaccgtcgttgataacataataacttttgacgacattggagatgacaacggttgttatccgacatagtatgtctcaattaacctatgtagaatccgacttctatagtagtgtgtggaaaagctaacctttcaaaactaaggtgcattaatatttgcacttctatttgatatgaaatgaatttaattagttttcatatcccctcttatttgttttttaatcattaataaatgaaatatatacaatttatgttttctttatggtaaattattggtaaaacaaaaaaccaactaaccatatgtttggctatcgcaattaatatacataaaggtcaatttttattatccatttattaaggttttttttcaaaaaaaaattacaaaataaattaataaatgttgttgttaataataatcataataataataataat

SEQ ID NO: 8421 - DNA, 1051 bp, Glycine max
  Gm_smallRNAprecursor_1254
cacactcacagatattcctttaaaataaattcacttaaacttaaattatcaaactcgagagtttacaaagattcatgagagttttatagacttgactcatggactcaactcgtaaattcataagagtctacttataaaaataataacaaaatatctataaataacatattaattaagcatttcaacaatacaataaagcaaaacaataaattataaagttcagaatatttaaataatcaagtttagtaataatacatcactactagataataacttgccgacgttataatagtggtagatcattttcatcgagggtttgatgttattagagatcaagagtttgatattattaaaggtgaaaattttgtatttgagaataacacactaaatgaaggtatgttgaatgttaaacagacaagaaataataaaaaatgacttacatcttgatctaatttttttaacttgctaactcgttgactcaatggtaaactcaagagtctaccgagtttacttagagtttatagactttgctcagagtccactacaaaagagtttactcaagagtcaactcgcagaggataagtagactctcgtactcgtaagagttaacgaattaactcgagagtttgataatcatgtttaaacctttaaaatatatatatataatcatcataattagcatctttacatttttaatgataatttaagatatttggatagttttaaactttttgattagttatgaatttaattcttaatttgaaatgcaatcatacctaaaactcttcacatcctatttttaaggatgtattttgtaataattgaccctaaattattctcatcaacttaacatatattatcaattatcatagatttatcatataacactcatcaatttaaaatattaaaacatgattagagaagcaaaattttctgtcgcaatttaaaaggtgtaataattttctcgagaaagtgatgccggctagatttttgctcgaatgttgattgactaattcactcatggttactaacgtgactaagaatttgttga

SEQ ID NO: 8422 - DNA, 1137 bp, Glycine max
  Gm_smallRNAprecursor_1255
aatggatattgtgacattaattaaacgtgtaatttcatttgcttgctttatttaagatttttaattttaatgaaagagttgttttaactttttactacaaaagactaatatcttctttttaaaaaaaagagtaatatctaatttgattcctgagaaaaaatcactcaacctaatttaatttatgagaaaaaaaggagactaaatattctatcaagattataagtataggttattaataatttcttaaggaataaattagtacacattcactattttaaagactaaagtgtctatgcatgattgtactgttgagatactattttattaattaagcatttttttgtatttttcataaacaacataatattttttttatgtaaatttgaataaatgaacttatacatatgtcaaattattggcatgtcccgccattcttattgacggcatgcttttagcgagatcagtgtcccgtaggtgccaatggcgggactgtccacgttggcacgtcccgccagcaccaatggcggtatcccctcctctctcctactcagcctatcccgccagcaccaatggtggtacctcctctctcctggtcagcctgtcccgctgctacgaatagcgacaccccctatcccgccattgtcactggcggttcaagctttccgccagtgtcaatggcggcacccacgtacaaaagagaccccccttgcaatttgttttaaaagagaccctctttcgtaaattgtttttaaaagcaacccctacagtaaatttgccggcatatcagactagttctaacttactatgtcagtgccgcgagtcttgcggtggaaactaaagacagaaaaccacaaaatctgtcttgtctttaattggaaaagcaagtgaatggtaatgcaagaaacttatgagttttttaatcatctttttgtgatccttgcatcacttttagtggttcccacaataccatattattcataaaaaactcatataaaattttactttaatgcaagaaattgtaaaaaatcacaagaaatccaaacattaaagtttcttatataagaaactattcttagtaatgaagaaacccattttaccacgtcactatactccaatgcagaagaactcacaagaaat

SEQ ID NO: 8423 - DNA, 1137 bp, Glycine max; identical to SEQ ID NO: 8422
  Gm_smallRNAprecursor_1256

SEQ ID NO: 8424 - DNA, 1138 bp, Glycine max
  Gm_smallRNAprecursor_1257
aatggatattgtgacattaattaaacgtgtaatttcatttgcttgctttatttaagatttttaattttaatgaaagagttgttttaactttttactacaaaagactaatatcttctttttaaaaaaaagagtaatatctaatttgattcctgagaaaaaatcactcaacctaatttaatttatgagaaaaaaaggagactaaatattctatcaagattataagtataggttattaataatttcttaaggaataaattagtacacattcactattttaaagactaaagtgtctatgcatgattgtactgttgagatactattttattaattaagcatttttttgtatttttcataaacaacataatattttttttatgtaaatttgaataaatgaacttatacatatgtcaaattattggcatgtcccgccattcttattgacggcatgcttttagcgagatcagtgtcccgtaggtgccaatggcgggactgtccacgttggcacgtcccgccagcaccaatggcggtatcccctcctctctcctactcagcctatcccgccagcaccaatggtggtacctcctctctcctggtcagcctgtcccgctgctacgaatagcgacaccccctatcccgccattgtcactggcggttcaagctttccgccagtgtcaatggcggcacccacgtacaaaagagaccccccttgcaatttgttttaaaagagaccctctttcgtaaattgtttttaaaagcaacccctacagtaaatttgccggcatatcagactagttctaacttactatgtcagtgccgcgagtcttgcggtggaaactaaagacagaaaaccacaaaatctgtcttgtctttaattggaaaagcaagtgaatggtaatgcaagaaacttatgagttttttaatcatctttttgtgatccttgcatcacttttagtggttcccacaataccatattattcataaaaaactcatataaaattttactttaatgcaagaaattgtaaaaaatcacaagaaatccaaacattaaagtttcttatataagaaactattcttagtaatgaagaaacccattttaccacgtcactatactccaatgcagaagaactcacaagaaata

SEQ ID NO: 8425 - DNA, 1133 bp, Glycine max
  Gm_smallRNAprecursor_1258
caaagattaatgtagaaacttattcacttaccatgtgtactagttggaggttcatgaattatgcatgggtggtggtggattttgctaagcttagtcgtacaaggagtctttgtgttcgcacttcgcactatatggtgtacatgtatttgagtctataccaaaagattagtcttttattggcacagagttgcttcgtgccctttcatattttgcttcctgcacctcgatcattgcgttgattattatccgtatttatggataaggaatcaaaatagaataaagttaactcattagggttggcctagtagggggctgagatagaatgcaagagatcataatttcaaatctagtgcaatcattaaaaaaaaaacaaaattgtaaatttggtttctcagtttatcttcaattttgaatttggtcccccaataatttaattcacgaatttggtctccctattttgtaaaatcttgcactgttggtcccccaggccacaattgaacgttgaccgttaacaagtgatgttaactgccacgtgtcacattcttattagatgatgactgtcatgtgtcatgttttgattagatgtcaactccatgaaagatgaaatgcattgttgttttcattgtccaatcagaacatgacacgtgacagtcatcatctaataaaaacgtgacacgtgacagtcaacatcacttgttaacggtcaacgtccaattatggtctaggaaaccaacattgcacgattttacaaaatagggggaccaaattcgtgaattaaattactaagggaccaaatccaaaactaaagataaactgagggaccaaaaatgtaattttgtaaaaaaaaaaataggaatcgttccaaaatagcccatataacatatatatggtttgatctttggttattgtttcctgcacttttaagttgcttcttaaacctctttttcgaccaattacattctataatgattatagattttagctttcaaatggtcgatccaaaagattaaaaaaaaacattatgaaaagtatacaaaaaaacaacttaaaggagcagaaagcaacaccctagatcctatttataacgccctgaatttcataaactgtaaatcaatgtttaattaatttctcat

SEQ ID NO: 8426 - DNA, 1134 bp, Glycine max
  Gm_smallRNAprecursor_1259
caaagattaatgtagaaacttattcacttaccatgtgtactagttggaggttcatgaattatgcatgggtggtggtggattttgctaagcttagtcgtacaaggagtctttgtgttcgcacttcgcactatatggtgtacatgtatttgagtctataccaaaagattagtcttttattggcacagagttgcttcgtgccctttcatattttgcttcctgcacctcgatcattgcgttgattattatccgtatttatggataaggaatcaaaatagaataaagttaactcattagggttggcctagtagggggctgagatagaatgcaagagatcataatttcaaatctagtgcaatcattaaaaaaaaaacaaaattgtaaatttggtttctcagtttatcttcaattttgaatttggtcccccaataatttaattcacgaatttggtctccctattttgtaaaatcttgcactgttggtcccccaggccacaattgaacgttgaccgttaacaagtgatgttaactgccacgtgtcacattcttattagatgatgactgtcatgtgtcatgttttgattagatgtcaactccatgaaagatgaaatgcattgttgttttcattgtccaatcagaacatgacacgtgacagtcatcatctaataaaaacgtgacacgtgacagtcaacatcacttgttaacggtcaacgtccaattatggtctaggaaaccaacattgcacgattttacaaaatagggggaccaaattcgtgaattaaattactaagggaccaaatccaaaactaaagataaactgagggaccaaaaatgtaattttgtaaaaaaaaaaataggaatcgttccaaaatagcccatataacatatatatggtttgatctttggttattgtttcctgcacttttaagttgcttcttaaacctctttttcgaccaattacattctataatgattatagattttagctttcaaatggtcgatccaaaagattaaaaaaaaacattatgaaaagtatacaaaaaaacaacttaaaggagcagaaagcaacaccctagatcctatttataacgccctgaatttcataaactgtaaatcaatgtttaattaatttctcatg

SEQ ID NO: 8427 - DNA, 1035 bp, Glycine max
  Gm_smallRNAprecursor_1260
tacatgtatttgagtctataccaaaagattagtcttttattggcacagagttgcttcgtgccctttcatattttgcttcctgcacctcgatcattgcgttgattattatccgtatttatggataaggaatcaaaatagaataaagttaactcattagggttggcctagtagggggctgagatagaatgcaagagatcataatttcaaatctagtgcaatcattaaaaaaaaaacaaaattgtaaatttggtttctcagtttatcttcaattttgaatttggtcccccaataatttaattcacgaatttggtctccctattttgtaaaatcttgcactgttggtcccccaggccacaattgaacgttgaccgttaacaagtgatgttaactgccacgtgtcacattcttattagatgatgactgtcatgtgtcatgttttgattagatgtcaactccatgaaagatgaaatgcattgttgttttcattgtccaatcagaacatgacacgtgacagtcatcatctaataaaaacgtgacacgtgacagtcaacatcacttgttaacggtcaacgtccaattatggtctaggaaaccaacattgcacgattttacaaaatagggggaccaaattcgtgaattaaattactaagggaccaaatccaaaactaaagataaactgagggaccaaaaatgtaattttgtaaaaaaaaaaataggaatcgttccaaaatagcccatataacatatatatggtttgatctttggttattgtttcctgcacttttaagttgcttcttaaacctctttttcgaccaattacattctataatgattatagattttagctttcaaatggtcgatccaaaagattaaaaaaaaacattatgaaaagtatacaaaaaaacaacttaaaggagcagaaagcaacaccctagatcctatttataacgccctgaatttcataaactgtaaatcaatgtttaattaatttctcatgttatttgattatgtgattcatttggatgagttgaagta

SEQ ID NO: 8428 - DNA, 1069 bp, Glycine max
  Gm_smallRNAprecursor_1261
taatgatatataaaacaattaaaacttcaattttaaatcccattgataaaaaactttttcttattagttttttaaaacaaaaaaccaacatatattagtaaacaaacacagcatatagttctcttatttaaaataaaataaaatctcttacattttactttaaatttcatttattttcatatttgctttgtttgactactcggatctcttgatcaataattattcaagatttaaattgtgactcatgtataaagaaaatctaattggaaggaaatgtatctacttgtgaatgcaaacaaatccccaaagattaaaaatttcaattcctttgcaattacatataaaaaagacttaattattattttggtattttaatttgataaaattgtatttttggtccctcagtttatctctaattttagatttggtcccccgataatttaattcacgaatttggtcctcctaatttgtaaaatcgtgcaatgttggtcccctagaccacaattggacgttgaccgttaacaagtgatgttgactgtcacgtgtcacattcttattggatgatgactgtcacgtgtcatgttctgattgggaaatgaaaacaacaatgcatgtcattgttcctggatttgagagccaatcagaacatgacacttgacaatcatcatccaataagaacgtgacacgtgacagtcaacatcacttgttaacggtcaacgactaattgtgatctaagagaccaacattacacgattttacaaaataagagaaccaaattcgtgaattaaattactggggaaccaaatctaaaattggacataaattaggggactaaatttgcaatttttccttttaatttattttttaatttaatttgatcctcttatgtttttaaaatatcaattaagtttcttaatttatttattaggttaaattttatcctttatttttaaagttttaattaagccttttatattttagaatgaaatcaatttggttccatttaaaaccaaaattgattctattttttgaaaatgctaggaactcatggaacaaaaatgagattgaa

SEQ ID NO: 8429 - DNA, 1184 bp, Glycine max
  Gm_smallRNAprecursor_1262
taatgatatataaaacaattaaaacttcaattttaaatcccattgataaaaaactttttcttattagttttttaaaacaaaaaaccaacatatattagtaaacaaacacagcatatagttctcttatttaaaataaaataaaatctcttacattttactttaaatttcatttattttcatatttgctttgtttgactactcggatctcttgatcaataattattcaagatttaaattgtgactcatgtataaagaaaatctaattggaaggaaatgtatctacttgtgaatgcaaacaaatccccaaagattaaaaatttcaattcctttgcaattacatataaaaaagacttaattattattttggtattttaatttgataaaattgtatttttggtccctcagtttatctctaattttagatttggtcccccgataatttaattcacgaatttggtcctcctaatttgtaaaatcgtgcaatgttggtcccctagaccacaattggacgttgaccgttaacaagtgatgttgactgtcacgtgtcacattcttattggatgatgactgtcacgtgtcatgttctgattgggaaatgaaaacaacaatgcatgtcattgttcctggatttgagagccaatcagaacatgacacttgacaatcatcatccaataagaacgtgacacgtgacagtcaacatcacttgttaacggtcaacgactaattgtgatctaagagaccaacattacacgattttacaaaataagagaaccaaattcgtgaattaaattactggggaaccaaatctaaaattggacataaattaggggactaaatttgcaatttttccttttaatttattttttaatttaatttgatcctcttatgtttttaaaatatcaattaagtttcttaatttatttattaggttaaattttatcctttatttttaaagttttaattaagccttttatattttagaatgaaatcaatttggttccatttaaaaccaaaattgattctattttttgaaaatgctaggaactcatggaacaaaaatgagattgaatccattataaaactagccagacaactttaaaaataatagccatctcaaaatcaatatcgttctgtaaatatactttatcttctaaaataactcccattattttaaagaaatcaaa

SEQ ID NO: 8430 - DNA, 1158 bp, Glycine max
  Gm_smallRNAprecursor_1263
cttcaattttaaatcccattgataaaaaactttttcttattagttttttaaaacaaaaaaccaacatatattagtaaacaaacacagcatatagttctcttatttaaaataaaataaaatctcttacattttactttaaatttcatttattttcatatttgctttgtttgactactcggatctcttgatcaataattattcaagatttaaattgtgactcatgtataaagaaaatctaattggaaggaaatgtatctacttgtgaatgcaaacaaatccccaaagattaaaaatttcaattcctttgcaattacatataaaaaagacttaattattattttggtattttaatttgataaaattgtatttttggtccctcagtttatctctaattttagatttggtcccccgataatttaattcacgaatttggtcctcctaatttgtaaaatcgtgcaatgttggtcccctagaccacaattggacgttgaccgttaacaagtgatgttgactgtcacgtgtcacattcttattggatgatgactgtcacgtgtcatgttctgattgggaaatgaaaacaacaatgcatgtcattgttcctggatttgagagccaatcagaacatgacacttgacaatcatcatccaataagaacgtgacacgtgacagtcaacatcacttgttaacggtcaacgactaattgtgatctaagagaccaacattacacgattttacaaaataagagaaccaaattcgtgaattaaattactggggaaccaaatctaaaattggacataaattaggggactaaatttgcaatttttccttttaatttattttttaatttaatttgatcctcttatgtttttaaaatatcaattaagtttcttaatttatttattaggttaaattttatcctttatttttaaagttttaattaagccttttatattttagaatgaaatcaatttggttccatttaaaaccaaaattgattctattttttgaaaatgctaggaactcatggaacaaaaatgagattgaatccattataaaactagccagacaactttaaaaataatagccatctcaaaatcaatatcgttctgtaaatatactttatcttctaaaataactcccattattttaaagaaatca

SEQ ID NO: 8431 - DNA, 1115 bp, Glycine max
  Gm_smallRNAprecursor_1264
ttttaaaacaaaaaaccaacatatattagtaaacaaacacagcatatagttctcttatttaaaataaaataaaatctcttacattttactttaaatttcatttattttcatatttgctttgtttgactactcggatctcttgatcaataattattcaagatttaaattgtgactcatgtataaagaaaatctaattggaaggaaatgtatctacttgtgaatgcaaacaaatccccaaagattaaaaatttcaattcctttgcaattacatataaaaaagacttaattattattttggtattttaatttgataaaattgtatttttggtccctcagtttatctctaattttagatttggtcccccgataatttaattcacgaatttggtcctcctaatttgtaaaatcgtgcaatgttggtcccctagaccacaattggacgttgaccgttaacaagtgatgttgactgtcacgtgtcacattcttattggatgatgactgtcacgtgtcatgttctgattgggaaatgaaaacaacaatgcatgtcattgttcctggatttgagagccaatcagaacatgacacttgacaatcatcatccaataagaacgtgacacgtgacagtcaacatcacttgttaacggtcaacgactaattgtgatctaagagaccaacattacacgattttacaaaataagagaaccaaattcgtgaattaaattactggggaaccaaatctaaaattggacataaattaggggactaaatttgcaatttttccttttaatttattttttaatttaatttgatcctcttatgtttttaaaatatcaattaagtttcttaatttatttattaggttaaattttatcctttatttttaaagttttaattaagccttttatattttagaatgaaatcaatttggttccatttaaaaccaaaattgattctattttttgaaaatgctaggaactcatggaacaaaaatgagattgaatccattataaaactagccagacaactttaaaaataatagccatctcaaaatcaatatcgttctgtaaatatactttatcttctaaaataactcccattattttaaagaaatcaaa

SEQ ID NO: 8432 - DNA, 1105 bp, Glycine max
  Gm_smallRNAprecursor_1265
gggagaccagacacatcaggtatttgtgtaattaaagattcgcaccggccaaaattcaaaactgttagattcacaaacttctgcaaagaaaataaaggggaaaaaataagaaccaaacgaataatcataaagtgaatttattgatttacaagatgaggaagatgtactctttaaacttgccttggataagccatccaactcaagttatttgggacctttggaaaattttccatttctaataataagtgttttgaggtttttcatcttcttgaaggcctttctattccattatactatttctttggcaaatatggagaaatctagacatatgatttcaatttcactagttccctgttaatacaaaggcagaaatcaaccacaatgtaagacttcaataaacgtttttagagaaatttgcataatataaagaaaaaagcaattatgatgtgaacatatgatagtcaaaaaaagataaatcaagataagaaaccaaatcattcatgagtctcactcaaggtgttgtcttccaaaacttgaattatagcttccctggttctcttggtgattcttgagtgacaatttttgtaaccatgtcctaaagtcgtgcaatgtacctctaccatctctaacctttatgagagattttttcagccaatatgtcaatactatttcacgttgtcaccataatgagcaccaagtatatcttcaacatttatcaacgcacaaatgtcaagcaaagcactatcaatgcatatcctttgaagcaacaagcaatgtcaagaaaagcaatataagtccatattctttgaagcaacaagcaatgtcaagaaaagcactcttctcttcttcttccaatgcatcaaagcttagtttaagtatctctaggatttgaatagtaagaatttgtttatattgtttgatgacagattttggttcttcttgtattttttccaaacaagttggaacctattacttccaaagccaatggaagtaattgctcgagcttgtcaacatcatctagaatcaagagaaccttctttcgctggagtctatgttgtatcattgaaactccttgttgctcacttgctaacttaattttcttctt

SEQ ID NO: 8433 - DNA, 1249 bp, Glycine max
  Gm_smallRNAprecursor_1266
gggagaccagacacatcaggtatttgtgtaattaaagattcgcaccggccaaaattcaaaactgttagattcacaaacttctgcaaagaaaataaaggggaaaaaataagaaccaaacgaataatcataaagtgaatttattgatttacaagatgaggaagatgtactctttaaacttgccttggataagccatccaactcaagttatttgggacctttggaaaattttccatttctaataataagtgttttgaggtttttcatcttcttgaaggcctttctattccattatactatttctttggcaaatatggagaaatctagacatatgatttcaatttcactagttccctgttaatacaaaggcagaaatcaaccacaatgtaagacttcaataaacgtttttagagaaatttgcataatataaagaaaaaagcaattatgatgtgaacatatgatagtcaaaaaaagataaatcaagataagaaaccaaatcattcatgagtctcactcaaggtgttgtcttccaaaacttgaattatagcttccctggttctcttggtgattcttgagtgacaatttttgtaaccatgtcctaaagtcgtgcaatgtacctctaccatctctaacctttatgagagattttttcagccaatatgtcaatactatttcacgttgtcaccataatgagcaccaagtatatcttcaacatttatcaacgcacaaatgtcaagcaaagcactatcaatgcatatcctttgaagcaacaagcaatgtcaagaaaagcaatataagtccatattctttgaagcaacaagcaatgtcaagaaaagcactcttctcttcttcttccaatgcatcaaagcttagtttaagtatctctaggatttgaatagtaagaatttgtttatattgtttgatgacagattttggttcttcttgtattttttccaaacaagttggaacctattacttccaaagccaatggaagtaattgctcgagcttgtcaacatcatctagaatcaagagaaccttctttcgctggagtctatgttgtatcattgaaactccttgttgctcacttgctaacttaattttcttctttccaagtatatatgaaagaaggatgctttggaaatgttgtagctcatgtttgtttgatttttcttacattttgaagaaaacatgaactatcaaaacagttagcaattaaattacagacagagcaagtgttgttttccctattcc

SEQ ID NO: 8434 - DNA, 1190 bp, Glycine max
  Gm_smallRNAprecursor_1267
tcaggtatttgtgtaattaaagattcgcaccggccaaaattcaaaactgttagattcacaaacttctgcaaagaaaataaaggggaaaaaataagaaccaaacgaataatcataaagtgaatttattgatttacaagatgaggaagatgtactctttaaacttgccttggataagccatccaactcaagttatttgggacctttggaaaattttccatttctaataataagtgttttgaggtttttcatcttcttgaaggcctttctattccattatactatttctttggcaaatatggagaaatctagacatatgatttcaatttcactagttccctgttaatacaaaggcagaaatcaaccacaatgtaagacttcaataaacgtttttagagaaatttgcataatataaagaaaaaagcaattatgatgtgaacatatgatagtcaaaaaaagataaatcaagataagaaaccaaatcattcatgagtctcactcaaggtgttgtcttccaaaacttgaattatagcttccctggttctcttggtgattcttgagtgacaatttttgtaaccatgtcctaaagtcgtgcaatgtacctctaccatctctaacctttatgagagattttttcagccaatatgtcaatactatttcacgttgtcaccataatgagcaccaagtatatcttcaacatttatcaacgcacaaatgtcaagcaaagcactatcaatgcatatcctttgaagcaacaagcaatgtcaagaaaagcaatataagtccatattctttgaagcaacaagcaatgtcaagaaaagcactcttctcttcttcttccaatgcatcaaagcttagtttaagtatctctaggatttgaatagtaagaatttgtttatattgtttgatgacagattttggttcttcttgtattttttccaaacaagttggaacctattacttccaaagccaatggaagtaattgctcgagcttgtcaacatcatctagaatcaagagaaccttctttcgctggagtctatgttgtatcattgaaactccttgttgctcacttgctaacttaattttcttctttccaagtatatatgaaagaaggatgctttggaaatgttgtagctcatgtttgtttgatttttcttacattttgaagaaaacatgaactatcaaaacagtt

SEQ ID NO: 8435 - DNA, 1234 bp, Glycine max
  Gm_smallRNAprecursor_1268
tcaggtatttgtgtaattaaagattcgcaccggccaaaattcaaaactgttagattcacaaacttctgcaaagaaaataaaggggaaaaaataagaaccaaacgaataatcataaagtgaatttattgatttacaagatgaggaagatgtactctttaaacttgccttggataagccatccaactcaagttatttgggacctttggaaaattttccatttctaataataagtgttttgaggtttttcatcttcttgaaggcctttctattccattatactatttctttggcaaatatggagaaatctagacatatgatttcaatttcactagttccctgttaatacaaaggcagaaatcaaccacaatgtaagacttcaataaacgtttttagagaaatttgcataatataaagaaaaaagcaattatgatgtgaacatatgatagtcaaaaaaagataaatcaagataagaaaccaaatcattcatgagtctcactcaaggtgttgtcttccaaaacttgaattatagcttccctggttctcttggtgattcttgagtgacaatttttgtaaccatgtcctaaagtcgtgcaatgtacctctaccatctctaacctttatgagagattttttcagccaatatgtcaatactatttcacgttgtcaccataatgagcaccaagtatatcttcaacatttatcaacgcacaaatgtcaagcaaagcactatcaatgcatatcctttgaagcaacaagcaatgtcaagaaaagcaatataagtccatattctttgaagcaacaagcaatgtcaagaaaagcactcttctcttcttcttccaatgcatcaaagcttagtttaagtatctctaggatttgaatagtaagaatttgtttatattgtttgatgacagattttggttcttcttgtattttttccaaacaagttggaacctattacttccaaagccaatggaagtaattgctcgagcttgtcaacatcatctagaatcaagagaaccttctttcgctggagtctatgttgtatcattgaaactccttgttgctcacttgctaacttaattttcttctttccaagtatatatgaaagaaggatgctttggaaatgttgtagctcatgtttgtttgatttttcttacattttgaagaaaacatgaactatcaaaacagttagcaattaaattacagacagagcaagtgttgttttccctattcc

SEQ ID NO: 8436 - DNA, 1061 bp, Glycine max
  Gm_smallRNAprecursor_1269
aggaagatgtactctttaaacttgccttggataagccatccaactcaagttatttgggacctttggaaaattttccatttctaataataagtgttttgaggtttttcatcttcttgaaggcctttctattccattatactatttctttggcaaatatggagaaatctagacatatgatttcaatttcactagttccctgttaatacaaaggcagaaatcaaccacaatgtaagacttcaataaacgtttttagagaaatttgcataatataaagaaaaaagcaattatgatgtgaacatatgatagtcaaaaaaagataaatcaagataagaaaccaaatcattcatgagtctcactcaaggtgttgtcttccaaaacttgaattatagcttccctggttctcttggtgattcttgagtgacaatttttgtaaccatgtcctaaagtcgtgcaatgtacctctaccatctctaacctttatgagagattttttcagccaatatgtcaatactatttcacgttgtcaccataatgagcaccaagtatatcttcaacatttatcaacgcacaaatgtcaagcaaagcactatcaatgcatatcctttgaagcaacaagcaatgtcaagaaaagcaatataagtccatattctttgaagcaacaagcaatgtcaagaaaagcactcttctcttcttcttccaatgcatcaaagcttagtttaagtatctctaggatttgaatagtaagaatttgtttatattgtttgatgacagattttggttcttcttgtattttttccaaacaagttggaacctattacttccaaagccaatggaagtaattgctcgagcttgtcaacatcatctagaatcaagagaaccttctttcgctggagtctatgttgtatcattgaaactccttgttgctcacttgctaacttaattttcttctttccaagtatatatgaaagaaggatgctttggaaatgttgtagctcatgtttgtttgatttttcttacattttgaagaaaacatgaactatcaaaacagttagcaattaaat

SEQ ID NO: 8437 - DNA, 1116 bp, Glycine max
  Gm_smallRNAprecursor_1270
aggaagatgtactctttaaacttgccttggataagccatccaactcaagttatttgggacctttggaaaattttccatttctaataataagtgttttgaggtttttcatcttcttgaaggcctttctattccattatactatttctttggcaaatatggagaaatctagacatatgatttcaatttcactagttccctgttaatacaaaggcagaaatcaaccacaatgtaagacttcaataaacgtttttagagaaatttgcataatataaagaaaaaagcaattatgatgtgaacatatgatagtcaaaaaaagataaatcaagataagaaaccaaatcattcatgagtctcactcaaggtgttgtcttccaaaacttgaattatagcttccctggttctcttggtgattcttgagtgacaatttttgtaaccatgtcctaaagtcgtgcaatgtacctctaccatctctaacctttatgagagattttttcagccaatatgtcaatactatttcacgttgtcaccataatgagcaccaagtatatcttcaacatttatcaacgcacaaatgtcaagcaaagcactatcaatgcatatcctttgaagcaacaagcaatgtcaagaaaagcaatataagtccatattctttgaagcaacaagcaatgtcaagaaaagcactcttctcttcttcttccaatgcatcaaagcttagtttaagtatctctaggatttgaatagtaagaatttgtttatattgtttgatgacagattttggttcttcttgtattttttccaaacaagttggaacctattacttccaaagccaatggaagtaattgctcgagcttgtcaacatcatctagaatcaagagaaccttctttcgctggagtctatgttgtatcattgaaactccttgttgctcacttgctaacttaattttcttctttccaagtatatatgaaagaaggatgctttggaaatgttgtagctcatgtttgtttgatttttcttacattttgaagaaaacatgaactatcaaaacagttagcaattaaattacagacagagcaagtgttgttttccctattccacccataccatggatccctgtc

SEQ ID NO: 8438 - DNA, 1195 bp, Glycine max
  Gm_smallRNAprecursor_1271
actcaagttatttgggacctttggaaaattttccatttctaataataagtgttttgaggtttttcatcttcttgaaggcctttctattccattatactatttctttggcaaatatggagaaatctagacatatgatttcaatttcactagttccctgttaatacaaaggcagaaatcaaccacaatgtaagacttcaataaacgtttttagagaaatttgcataatataaagaaaaaagcaattatgatgtgaacatatgatagtcaaaaaaagataaatcaagataagaaaccaaatcattcatgagtctcactcaaggtgttgtcttccaaaacttgaattatagcttccctggttctcttggtgattcttgagtgacaatttttgtaaccatgtcctaaagtcgtgcaatgtacctctaccatctctaacctttatgagagattttttcagccaatatgtcaatactatttcacgttgtcaccataatgagcaccaagtatatcttcaacatttatcaacgcacaaatgtcaagcaaagcactatcaatgcatatcctttgaagcaacaagcaatgtcaagaaaagcaatataagtccatattctttgaagcaacaagcaatgtcaagaaaagcactcttctcttcttcttccaatgcatcaaagcttagtttaagtatctctaggatttgaatagtaagaatttgtttatattgtttgatgacagattttggttcttcttgtattttttccaaacaagttggaacctattacttccaaagccaatggaagtaattgctcgagcttgtcaacatcatctagaatcaagagaaccttctttcgctggagtctatgttgtatcattgaaactccttgttgctcacttgctaacttaattttcttctttccaagtatatatgaaagaaggatgctttggaaatgttgtagctcatgtttgtttgatttttcttacattttgaagaaaacatgaactatcaaaacagttagcaattaaattacagacagagcaagtgttgttttccctattccacccataccatggatccctgtcatgtggtggacaccatcatcagatccaacgtccaaaagcttcattacttttgacacttgtgactctagtccaaccaaataatccgcaacatgtaaacaagtgggattaatcttgcagcaga

SEQ ID NO: 8439 - DNA, 1214 bp, Glycine max
  Gm_smallRNAprecursor_1272
actcaagttatttgggacctttggaaaattttccatttctaataataagtgttttgaggtttttcatcttcttgaaggcctttctattccattatactatttctttggcaaatatggagaaatctagacatatgatttcaatttcactagttccctgttaatacaaaggcagaaatcaaccacaatgtaagacttcaataaacgtttttagagaaatttgcataatataaagaaaaaagcaattatgatgtgaacatatgatagtcaaaaaaagataaatcaagataagaaaccaaatcattcatgagtctcactcaaggtgttgtcttccaaaacttgaattatagcttccctggttctcttggtgattcttgagtgacaatttttgtaaccatgtcctaaagtcgtgcaatgtacctctaccatctctaacctttatgagagattttttcagccaatatgtcaatactatttcacgttgtcaccataatgagcaccaagtatatcttcaacatttatcaacgcacaaatgtcaagcaaagcactatcaatgcatatcctttgaagcaacaagcaatgtcaagaaaagcaatataagtccatattctttgaagcaacaagcaatgtcaagaaaagcactcttctcttcttcttccaatgcatcaaagcttagtttaagtatctctaggatttgaatagtaagaatttgtttatattgtttgatgacagattttggttcttcttgtattttttccaaacaagttggaacctattacttccaaagccaatggaagtaattgctcgagcttgtcaacatcatctagaatcaagagaaccttctttcgctggagtctatgttgtatcattgaaactccttgttgctcacttgctaacttaattttcttctttccaagtatatatgaaagaaggatgctttggaaatgttgtagctcatgtttgtttgatttttcttacattttgaagaaaacatgaactatcaaaacagttagcaattaaattacagacagagcaagtgttgttttccctattccacccataccatggatccctgtcatgtggtggacaccatcatcagatccaacgtccaaaagcttcattacttttgacacttgtgactctagtccaaccaaataatccgcaacatgtaaacaagtgggattaatcttgcagcagacctgctcaaccatcctccc

SEQ ID NO: 8440 - DNA, 1084 bp, Glycine max
  Gm_smallRNAprecursor_1273
ttatttgggacctttggaaaattttccatttctaataataagtgttttgaggtttttcatcttcttgaaggcctttctattccattatactatttctttggcaaatatggagaaatctagacatatgatttcaatttcactagttccctgttaatacaaaggcagaaatcaaccacaatgtaagacttcaataaacgtttttagagaaatttgcataatataaagaaaaaagcaattatgatgtgaacatatgatagtcaaaaaaagataaatcaagataagaaaccaaatcattcatgagtctcactcaaggtgttgtcttccaaaacttgaattatagcttccctggttctcttggtgattcttgagtgacaatttttgtaaccatgtcctaaagtcgtgcaatgtacctctaccatctctaacctttatgagagattttttcagccaatatgtcaatactatttcacgttgtcaccataatgagcaccaagtatatcttcaacatttatcaacgcacaaatgtcaagcaaagcactatcaatgcatatcctttgaagcaacaagcaatgtcaagaaaagcaatataagtccatattctttgaagcaacaagcaatgtcaagaaaagcactcttctcttcttcttccaatgcatcaaagcttagtttaagtatctctaggatttgaatagtaagaatttgtttatattgtttgatgacagattttggttcttcttgtattttttccaaacaagttggaacctattacttccaaagccaatggaagtaattgctcgagcttgtcaacatcatctagaatcaagagaaccttctttcgctggagtctatgttgtatcattgaaactccttgttgctcacttgctaacttaattttcttctttccaagtatatatgaaagaaggatgctttggaaatgttgtagctcatgtttgtttgatttttcttacattttgaagaaaacatgaactatcaaaacagttagcaattaaattacagacagagcaagtgttgttttccctattccacccataccatggatccctgtcatgtggtggacaccatc

SEQ ID NO: 8441 - DNA, 1207 bp, Glycine max
  Gm_smallRNAprecursor_1274
ttatttgggacctttggaaaattttccatttctaataataagtgttttgaggtttttcatcttcttgaaggcctttctattccattatactatttctttggcaaatatggagaaatctagacatatgatttcaatttcactagttccctgttaatacaaaggcagaaatcaaccacaatgtaagacttcaataaacgtttttagagaaatttgcataatataaagaaaaaagcaattatgatgtgaacatatgatagtcaaaaaaagataaatcaagataagaaaccaaatcattcatgagtctcactcaaggtgttgtcttccaaaacttgaattatagcttccctggttctcttggtgattcttgagtgacaatttttgtaaccatgtcctaaagtcgtgcaatgtacctctaccatctctaacctttatgagagattttttcagccaatatgtcaatactatttcacgttgtcaccataatgagcaccaagtatatcttcaacatttatcaacgcacaaatgtcaagcaaagcactatcaatgcatatcctttgaagcaacaagcaatgtcaagaaaagcaatataagtccatattctttgaagcaacaagcaatgtcaagaaaagcactcttctcttcttcttccaatgcatcaaagcttagtttaagtatctctaggatttgaatagtaagaatttgtttatattgtttgatgacagattttggttcttcttgtattttttccaaacaagttggaacctattacttccaaagccaatggaagtaattgctcgagcttgtcaacatcatctagaatcaagagaaccttctttcgctggagtctatgttgtatcattgaaactccttgttgctcacttgctaacttaattttcttctttccaagtatatatgaaagaaggatgctttggaaatgttgtagctcatgtttgtttgatttttcttacattttgaagaaaacatgaactatcaaaacagttagcaattaaattacagacagagcaagtgttgttttccctattccacccataccatggatccctgtcatgtggtggacaccatcatcagatccaacgtccaaaagcttcattacttttgacacttgtgactctagtccaaccaaataatccgcaacatgtaaacaagtgggattaatcttgcagcagacctgctcaaccatcctccc

SEQ ID NO: 8442 - DNA, 1053 bp, Glycine max
  Gm_smallRNAprecursor_1275
ttctaataataagtgttttgaggtttttcatcttcttgaaggcctttctattccattatactatttctttggcaaatatggagaaatctagacatatgatttcaatttcactagttccctgttaatacaaaggcagaaatcaaccacaatgtaagacttcaataaacgtttttagagaaatttgcataatataaagaaaaaagcaattatgatgtgaacatatgatagtcaaaaaaagataaatcaagataagaaaccaaatcattcatgagtctcactcaaggtgttgtcttccaaaacttgaattatagcttccctggttctcttggtgattcttgagtgacaatttttgtaaccatgtcctaaagtcgtgcaatgtacctctaccatctctaacctttatgagagattttttcagccaatatgtcaatactatttcacgttgtcaccataatgagcaccaagtatatcttcaacatttatcaacgcacaaatgtcaagcaaagcactatcaatgcatatcctttgaagcaacaagcaatgtcaagaaaagcaatataagtccatattctttgaagcaacaagcaatgtcaagaaaagcactcttctcttcttcttccaatgcatcaaagcttagtttaagtatctctaggatttgaatagtaagaatttgtttatattgtttgatgacagattttggttcttcttgtattttttccaaacaagttggaacctattacttccaaagccaatggaagtaattgctcgagcttgtcaacatcatctagaatcaagagaaccttctttcgctggagtctatgttgtatcattgaaactccttgttgctcacttgctaacttaattttcttctttccaagtatatatgaaagaaggatgctttggaaatgttgtagctcatgtttgtttgatttttcttacattttgaagaaaacatgaactatcaaaacagttagcaattaaattacagacagagcaagtgttgttttccctattccacccataccatggatccctgtcatgtggtggacacca

SEQ ID NO: 8443 - DNA, 1055 bp, Glycine max
  Gm_smallRNAprecursor_1276
ttctaataataagtgttttgaggtttttcatcttcttgaaggcctttctattccattatactatttctttggcaaatatggagaaatctagacatatgatttcaatttcactagttccctgttaatacaaaggcagaaatcaaccacaatgtaagacttcaataaacgtttttagagaaatttgcataatataaagaaaaaagcaattatgatgtgaacatatgatagtcaaaaaaagataaatcaagataagaaaccaaatcattcatgagtctcactcaaggtgttgtcttccaaaacttgaattatagcttccctggttctcttggtgattcttgagtgacaatttttgtaaccatgtcctaaagtcgtgcaatgtacctctaccatctctaacctttatgagagattttttcagccaatatgtcaatactatttcacgttgtcaccataatgagcaccaagtatatcttcaacatttatcaacgcacaaatgtcaagcaaagcactatcaatgcatatcctttgaagcaacaagcaatgtcaagaaaagcaatataagtccatattctttgaagcaacaagcaatgtcaagaaaagcactcttctcttcttcttccaatgcatcaaagcttagtttaagtatctctaggatttgaatagtaagaatttgtttatattgtttgatgacagattttggttcttcttgtattttttccaaacaagttggaacctattacttccaaagccaatggaagtaattgctcgagcttgtcaacatcatctagaatcaagagaaccttctttcgctggagtctatgttgtatcattgaaactccttgttgctcacttgctaacttaattttcttctttccaagtatatatgaaagaaggatgctttggaaatgttgtagctcatgtttgtttgatttttcttacattttgaagaaaacatgaactatcaaaacagttagcaattaaattacagacagagcaagtgttgttttccctattccacccataccatggatccctgtcatgtggtggacaccatc

SEQ ID NO: 8444 - DNA, 1040 bp, Glycine max
  Gm_smallRNAprecursor_1277
tttttcatcttcttgaaggcctttctattccattatactatttctttggcaaatatggagaaatctagacatatgatttcaatttcactagttccctgttaatacaaaggcagaaatcaaccacaatgtaagacttcaataaacgtttttagagaaatttgcataatataaagaaaaaagcaattatgatgtgaacatatgatagtcaaaaaaagataaatcaagataagaaaccaaatcattcatgagtctcactcaaggtgttgtcttccaaaacttgaattatagcttccctggttctcttggtgattcttgagtgacaatttttgtaaccatgtcctaaagtcgtgcaatgtacctctaccatctctaacctttatgagagattttttcagccaatatgtcaatactatttcacgttgtcaccataatgagcaccaagtatatcttcaacatttatcaacgcacaaatgtcaagcaaagcactatcaatgcatatcctttgaagcaacaagcaatgtcaagaaaagcaatataagtccatattctttgaagcaacaagcaatgtcaagaaaagcactcttctcttcttcttccaatgcatcaaagcttagtttaagtatctctaggatttgaatagtaagaatttgtttatattgtttgatgacagattttggttcttcttgtattttttccaaacaagttggaacctattacttccaaagccaatggaagtaattgctcgagcttgtcaacatcatctagaatcaagagaaccttctttcgctggagtctatgttgtatcattgaaactccttgttgctcacttgctaacttaattttcttctttccaagtatatatgaaagaaggatgctttggaaatgttgtagctcatgtttgtttgatttttcttacattttgaagaaaacatgaactatcaaaacagttagcaattaaattacagacagagcaagtgttgttttccctattccacccataccatggatccctgtcatgtggtggacaccatcatcagatc

SEQ ID NO: 8445 - DNA, 1041 bp, Glycine max
  Gm_smallRNAprecursor_1278
tttttcatcttcttgaaggcctttctattccattatactatttctttggcaaatatggagaaatctagacatatgatttcaatttcactagttccctgttaatacaaaggcagaaatcaaccacaatgtaagacttcaataaacgtttttagagaaatttgcataatataaagaaaaaagcaattatgatgtgaacatatgatagtcaaaaaaagataaatcaagataagaaaccaaatcattcatgagtctcactcaaggtgttgtcttccaaaacttgaattatagcttccctggttctcttggtgattcttgagtgacaatttttgtaaccatgtcctaaagtcgtgcaatgtacctctaccatctctaacctttatgagagattttttcagccaatatgtcaatactatttcacgttgtcaccataatgagcaccaagtatatcttcaacatttatcaacgcacaaatgtcaagcaaagcactatcaatgcatatcctttgaagcaacaagcaatgtcaagaaaagcaatataagtccatattctttgaagcaacaagcaatgtcaagaaaagcactcttctcttcttcttccaatgcatcaaagcttagtttaagtatctctaggatttgaatagtaagaatttgtttatattgtttgatgacagattttggttcttcttgtattttttccaaacaagttggaacctattacttccaaagccaatggaagtaattgctcgagcttgtcaacatcatctagaatcaagagaaccttctttcgctggagtctatgttgtatcattgaaactccttgttgctcacttgctaacttaattttcttctttccaagtatatatgaaagaaggatgctttggaaatgttgtagctcatgtttgtttgatttttcttacattttgaagaaaacatgaactatcaaaacagttagcaattaaattacagacagagcaagtgttgttttccctattccacccataccatggatccctgtcatgtggtggacaccatcatcagatcc

SEQ ID NO: 8446 - DNA, 1250 bp, Glycine max
  Gm_smallRNAprecursor_1279
tttttcatcttcttgaaggcctttctattccattatactatttctttggcaaatatggagaaatctagacatatgatttcaatttcactagttccctgttaatacaaaggcagaaatcaaccacaatgtaagacttcaataaacgtttttagagaaatttgcataatataaagaaaaaagcaattatgatgtgaacatatgatagtcaaaaaaagataaatcaagataagaaaccaaatcattcatgagtctcactcaaggtgttgtcttccaaaacttgaattatagcttccctggttctcttggtgattcttgagtgacaatttttgtaaccatgtcctaaagtcgtgcaatgtacctctaccatctctaacctttatgagagattttttcagccaatatgtcaatactatttcacgttgtcaccataatgagcaccaagtatatcttcaacatttatcaacgcacaaatgtcaagcaaagcactatcaatgcatatcctttgaagcaacaagcaatgtcaagaaaagcaatataagtccatattctttgaagcaacaagcaatgtcaagaaaagcactcttctcttcttcttccaatgcatcaaagcttagtttaagtatctctaggatttgaatagtaagaatttgtttatattgtttgatgacagattttggttcttcttgtattttttccaaacaagttggaacctattacttccaaagccaatggaagtaattgctcgagcttgtcaacatcatctagaatcaagagaaccttctttcgctggagtctatgttgtatcattgaaactccttgttgctcacttgctaacttaattttcttctttccaagtatatatgaaagaaggatgctttggaaatgttgtagctcatgtttgtttgatttttcttacattttgaagaaaacatgaactatcaaaacagttagcaattaaattacagacagagcaagtgttgttttccctattccacccataccatggatccctgtcatgtggtggacaccatcatcagatccaacgtccaaaagcttcattacttttgacacttgtgactctagtccaaccaaataatccgcaacatgtaaacaagtgggattaatcttgcagcagacctgctcaaccatcctcccaatgaactcatattcatgtgcatatctgtttaaaacaaaaaagttttaatgaagtcaaatattgccttgtatatccatgtcttgatacatatgtt

SEQ ID NO: 8447 - DNA, 1251 bp, Glycine max
  Gm_smallRNAprecursor_1280
tttttcatcttcttgaaggcctttctattccattatactatttctttggcaaatatggagaaatctagacatatgatttcaatttcactagttccctgttaatacaaaggcagaaatcaaccacaatgtaagacttcaataaacgtttttagagaaatttgcataatataaagaaaaaagcaattatgatgtgaacatatgatagtcaaaaaaagataaatcaagataagaaaccaaatcattcatgagtctcactcaaggtgttgtcttccaaaacttgaattatagcttccctggttctcttggtgattcttgagtgacaatttttgtaaccatgtcctaaagtcgtgcaatgtacctctaccatctctaacctttatgagagattttttcagccaatatgtcaatactatttcacgttgtcaccataatgagcaccaagtatatcttcaacatttatcaacgcacaaatgtcaagcaaagcactatcaatgcatatcctttgaagcaacaagcaatgtcaagaaaagcaatataagtccatattctttgaagcaacaagcaatgtcaagaaaagcactcttctcttcttcttccaatgcatcaaagcttagtttaagtatctctaggatttgaatagtaagaatttgtttatattgtttgatgacagattttggttcttcttgtattttttccaaacaagttggaacctattacttccaaagccaatggaagtaattgctcgagcttgtcaacatcatctagaatcaagagaaccttctttcgctggagtctatgttgtatcattgaaactccttgttgctcacttgctaacttaattttcttctttccaagtatatatgaaagaaggatgctttggaaatgttgtagctcatgtttgtttgatttttcttacattttgaagaaaacatgaactatcaaaacagttagcaattaaattacagacagagcaagtgttgttttccctattccacccataccatggatccctgtcatgtggtggacaccatcatcagatccaacgtccaaaagcttcattacttttgacacttgtgactctagtccaaccaaataatccgcaacatgtaaacaagtgggattaatcttgcagcagacctgctcaaccatcctcccaatgaactcatattcatgtgcatatctgtttaaaacaaaaaagttttaatgaagtcaaatattgccttgtatatccatgtcttgatacatatgttg

SEQ ID NO: 8448 - DNA, 1155 bp, Glycine max
  Gm_smallRNAprecursor_1281
gaaggcctttctattccattatactatttctttggcaaatatggagaaatctagacatatgatttcaatttcactagttccctgttaatacaaaggcagaaatcaaccacaatgtaagacttcaataaacgtttttagagaaatttgcataatataaagaaaaaagcaattatgatgtgaacatatgatagtcaaaaaaagataaatcaagataagaaaccaaatcattcatgagtctcactcaaggtgttgtcttccaaaacttgaattatagcttccctggttctcttggtgattcttgagtgacaatttttgtaaccatgtcctaaagtcgtgcaatgtacctctaccatctctaacctttatgagagattttttcagccaatatgtcaatactatttcacgttgtcaccataatgagcaccaagtatatcttcaacatttatcaacgcacaaatgtcaagcaaagcactatcaatgcatatcctttgaagcaacaagcaatgtcaagaaaagcaatataagtccatattctttgaagcaacaagcaatgtcaagaaaagcactcttctcttcttcttccaatgcatcaaagcttagtttaagtatctctaggatttgaatagtaagaatttgtttatattgtttgatgacagattttggttcttcttgtattttttccaaacaagttggaacctattacttccaaagccaatggaagtaattgctcgagcttgtcaacatcatctagaatcaagagaaccttctttcgctggagtctatgttgtatcattgaaactccttgttgctcacttgctaacttaattttcttctttccaagtatatatgaaagaaggatgctttggaaatgttgtagctcatgtttgtttgatttttcttacattttgaagaaaacatgaactatcaaaacagttagcaattaaattacagacagagcaagtgttgttttccctattccacccataccatggatccctgtcatgtggtggacaccatcatcagatccaacgtccaaaagcttcattacttttgacacttgtgactctagtccaaccaaataatccgcaacatgtaaacaagtgggattaatcttgcagcagacctgctcaaccatcctcccaatgaactcatatt

SEQ ID NO: 8449 - DNA, 1156 bp, Glycine max
  Gm_smallRNAprecursor_1282
gaaggcctttctattccattatactatttctttggcaaatatggagaaatctagacatatgatttcaatttcactagttccctgttaatacaaaggcagaaatcaaccacaatgtaagacttcaataaacgtttttagagaaatttgcataatataaagaaaaaagcaattatgatgtgaacatatgatagtcaaaaaaagataaatcaagataagaaaccaaatcattcatgagtctcactcaaggtgttgtcttccaaaacttgaattatagcttccctggttctcttggtgattcttgagtgacaatttttgtaaccatgtcctaaagtcgtgcaatgtacctctaccatctctaacctttatgagagattttttcagccaatatgtcaatactatttcacgttgtcaccataatgagcaccaagtatatcttcaacatttatcaacgcacaaatgtcaagcaaagcactatcaatgcatatcctttgaagcaacaagcaatgtcaagaaaagcaatataagtccatattctttgaagcaacaagcaatgtcaagaaaagcactcttctcttcttcttccaatgcatcaaagcttagtttaagtatctctaggatttgaatagtaagaatttgtttatattgtttgatgacagattttggttcttcttgtattttttccaaacaagttggaacctattacttccaaagccaatggaagtaattgctcgagcttgtcaacatcatctagaatcaagagaaccttctttcgctggagtctatgttgtatcattgaaactccttgttgctcacttgctaacttaattttcttctttccaagtatatatgaaagaaggatgctttggaaatgttgtagctcatgtttgtttgatttttcttacattttgaagaaaacatgaactatcaaaacagttagcaattaaattacagacagagcaagtgttgttttccctattccacccataccatggatccctgtcatgtggtggacaccatcatcagatccaacgtccaaaagcttcattacttttgacacttgtgactctagtccaaccaaataatccgcaacatgtaaacaagtgggattaatcttgcagcagacctgctcaaccatcctcccaatgaactcatattc

SEQ ID NO: 8450 - DNA, 1156 bp, Glycine max; identical to SEQ ID NO: 8449
  Gm_smallRNAprecursor_1283

SEQ ID NO: 8451 - DNA, 1154 bp, Glycine max
  Gm_smallRNAprecursor_1284
aaggcctttctattccattatactatttctttggcaaatatggagaaatctagacatatgatttcaatttcactagttccctgttaatacaaaggcagaaatcaaccacaatgtaagacttcaataaacgtttttagagaaatttgcataatataaagaaaaaagcaattatgatgtgaacatatgatagtcaaaaaaagataaatcaagataagaaaccaaatcattcatgagtctcactcaaggtgttgtcttccaaaacttgaattatagcttccctggttctcttggtgattcttgagtgacaatttttgtaaccatgtcctaaagtcgtgcaatgtacctctaccatctctaacctttatgagagattttttcagccaatatgtcaatactatttcacgttgtcaccataatgagcaccaagtatatcttcaacatttatcaacgcacaaatgtcaagcaaagcactatcaatgcatatcctttgaagcaacaagcaatgtcaagaaaagcaatataagtccatattctttgaagcaacaagcaatgtcaagaaaagcactcttctcttcttcttccaatgcatcaaagcttagtttaagtatctctaggatttgaatagtaagaatttgtttatattgtttgatgacagattttggttcttcttgtattttttccaaacaagttggaacctattacttccaaagccaatggaagtaattgctcgagcttgtcaacatcatctagaatcaagagaaccttctttcgctggagtctatgttgtatcattgaaactccttgttgctcacttgctaacttaattttcttctttccaagtatatatgaaagaaggatgctttggaaatgttgtagctcatgtttgtttgatttttcttacattttgaagaaaacatgaactatcaaaacagttagcaattaaattacagacagagcaagtgttgttttccctattccacccataccatggatccctgtcatgtggtggacaccatcatcagatccaacgtccaaaagcttcattacttttgacacttgtgactctagtccaaccaaataatccgcaacatgtaaacaagtgggattaatcttgcagcagacctgctcaaccatcctcccaatgaactcatatt

SEQ ID NO: 8452 - DNA, 1055 bp, Glycine max
  Gm_smallRNAprecursor_1285
cctttctattccattatactatttctttggcaaatatggagaaatctagacatatgatttcaatttcactagttccctgttaatacaaaggcagaaatcaaccacaatgtaagacttcaataaacgtttttagagaaatttgcataatataaagaaaaaagcaattatgatgtgaacatatgatagtcaaaaaaagataaatcaagataagaaaccaaatcattcatgagtctcactcaaggtgttgtcttccaaaacttgaattatagcttccctggttctcttggtgattcttgagtgacaatttttgtaaccatgtcctaaagtcgtgcaatgtacctctaccatctctaacctttatgagagattttttcagccaatatgtcaatactatttcacgttgtcaccataatgagcaccaagtatatcttcaacatttatcaacgcacaaatgtcaagcaaagcactatcaatgcatatcctttgaagcaacaagcaatgtcaagaaaagcaatataagtccatattctttgaagcaacaagcaatgtcaagaaaagcactcttctcttcttcttccaatgcatcaaagcttagtttaagtatctctaggatttgaatagtaagaatttgtttatattgtttgatgacagattttggttcttcttgtattttttccaaacaagttggaacctattacttccaaagccaatggaagtaattgctcgagcttgtcaacatcatctagaatcaagagaaccttctttcgctggagtctatgttgtatcattgaaactccttgttgctcacttgctaacttaattttcttctttccaagtatatatgaaagaaggatgctttggaaatgttgtagctcatgtttgtttgatttttcttacattttgaagaaaacatgaactatcaaaacagttagcaattaaattacagacagagcaagtgttgttttccctattccacccataccatggatccctgtcatgtggtggacaccatcatcagatccaacgtccaaaagcttcattacttttgacacttg

SEQ ID NO: 8453 - DNA, 1146 bp, Glycine max
  Gm_smallRNAprecursor_1286
cctttctattccattatactatttctttggcaaatatggagaaatctagacatatgatttcaatttcactagttccctgttaatacaaaggcagaaatcaaccacaatgtaagacttcaataaacgtttttagagaaatttgcataatataaagaaaaaagcaattatgatgtgaacatatgatagtcaaaaaaagataaatcaagataagaaaccaaatcattcatgagtctcactcaaggtgttgtcttccaaaacttgaattatagcttccctggttctcttggtgattcttgagtgacaatttttgtaaccatgtcctaaagtcgtgcaatgtacctctaccatctctaacctttatgagagattttttcagccaatatgtcaatactatttcacgttgtcaccataatgagcaccaagtatatcttcaacatttatcaacgcacaaatgtcaagcaaagcactatcaatgcatatcctttgaagcaacaagcaatgtcaagaaaagcaatataagtccatattctttgaagcaacaagcaatgtcaagaaaagcactcttctcttcttcttccaatgcatcaaagcttagtttaagtatctctaggatttgaatagtaagaatttgtttatattgtttgatgacagattttggttcttcttgtattttttccaaacaagttggaacctattacttccaaagccaatggaagtaattgctcgagcttgtcaacatcatctagaatcaagagaaccttctttcgctggagtctatgttgtatcattgaaactccttgttgctcacttgctaacttaattttcttctttccaagtatatatgaaagaaggatgctttggaaatgttgtagctcatgtttgtttgatttttcttacattttgaagaaaacatgaactatcaaaacagttagcaattaaattacagacagagcaagtgttgttttccctattccacccataccatggatccctgtcatgtggtggacaccatcatcagatccaacgtccaaaagcttcattacttttgacacttgtgactctagtccaaccaaataatccgcaacatgtaaacaagtgggattaatcttgcagcagacctgctcaaccatcctcccaatgaactca

SEQ ID NO: 8454 - DNA, 1150 bp, Glycine max
  Gm_smallRNAprecursor_1287
tctattccattatactatttctttggcaaatatggagaaatctagacatatgatttcaatttcactagttccctgttaatacaaaggcagaaatcaaccacaatgtaagacttcaataaacgtttttagagaaatttgcataatataaagaaaaaagcaattatgatgtgaacatatgatagtcaaaaaaagataaatcaagataagaaaccaaatcattcatgagtctcactcaaggtgttgtcttccaaaacttgaattatagcttccctggttctcttggtgattcttgagtgacaatttttgtaaccatgtcctaaagtcgtgcaatgtacctctaccatctctaacctttatgagagattttttcagccaatatgtcaatactatttcacgttgtcaccataatgagcaccaagtatatcttcaacatttatcaacgcacaaatgtcaagcaaagcactatcaatgcatatcctttgaagcaacaagcaatgtcaagaaaagcaatataagtccatattctttgaagcaacaagcaatgtcaagaaaagcactcttctcttcttcttccaatgcatcaaagcttagtttaagtatctctaggatttgaatagtaagaatttgtttatattgtttgatgacagattttggttcttcttgtattttttccaaacaagttggaacctattacttccaaagccaatggaagtaattgctcgagcttgtcaacatcatctagaatcaagagaaccttctttcgctggagtctatgttgtatcattgaaactccttgttgctcacttgctaacttaattttcttctttccaagtatatatgaaagaaggatgctttggaaatgttgtagctcatgtttgtttgatttttcttacattttgaagaaaacatgaactatcaaaacagttagcaattaaattacagacagagcaagtgttgttttccctattccacccataccatggatccctgtcatgtggtggacaccatcatcagatccaacgtccaaaagcttcattacttttgacacttgtgactctagtccaaccaaataatccgcaacatgtaaacaagtgggattaatcttgcagcagacctgctcaaccatcctcccaatgaactcatattcatg

SEQ ID NO: 8455 - DNA, 1138 bp, Glycine max
  Gm_smallRNAprecursor_1288
ttccattatactatttctttggcaaatatggagaaatctagacatatgatttcaatttcactagttccctgttaatacaaaggcagaaatcaaccacaatgtaagacttcaataaacgtttttagagaaatttgcataatataaagaaaaaagcaattatgatgtgaacatatgatagtcaaaaaaagataaatcaagataagaaaccaaatcattcatgagtctcactcaaggtgttgtcttccaaaacttgaattatagcttccctggttctcttggtgattcttgagtgacaatttttgtaaccatgtcctaaagtcgtgcaatgtacctctaccatctctaacctttatgagagattttttcagccaatatgtcaatactatttcacgttgtcaccataatgagcaccaagtatatcttcaacatttatcaacgcacaaatgtcaagcaaagcactatcaatgcatatcctttgaagcaacaagcaatgtcaagaaaagcaatataagtccatattctttgaagcaacaagcaatgtcaagaaaagcactcttctcttcttcttccaatgcatcaaagcttagtttaagtatctctaggatttgaatagtaagaatttgtttatattgtttgatgacagattttggttcttcttgtattttttccaaacaagttggaacctattacttccaaagccaatggaagtaattgctcgagcttgtcaacatcatctagaatcaagagaaccttctttcgctggagtctatgttgtatcattgaaactccttgttgctcacttgctaacttaattttcttctttccaagtatatatgaaagaaggatgctttggaaatgttgtagctcatgtttgtttgatttttcttacattttgaagaaaacatgaactatcaaaacagttagcaattaaattacagacagagcaagtgttgttttccctattccacccataccatggatccctgtcatgtggtggacaccatcatcagatccaacgtccaaaagcttcattacttttgacacttgtgactctagtccaaccaaataatccgcaacatgtaaacaagtgggattaatcttgcagcagacctgctcaaccatcctcccaatgaactca

SEQ ID NO: 8456 - DNA, 1193 bp, Glycine max
  Gm_smallRNAprecursor_1289
ttccattatactatttctttggcaaatatggagaaatctagacatatgatttcaatttcactagttccctgttaatacaaaggcagaaatcaaccacaatgtaagacttcaataaacgtttttagagaaatttgcataatataaagaaaaaagcaattatgatgtgaacatatgatagtcaaaaaaagataaatcaagataagaaaccaaatcattcatgagtctcactcaaggtgttgtcttccaaaacttgaattatagcttccctggttctcttggtgattcttgagtgacaatttttgtaaccatgtcctaaagtcgtgcaatgtacctctaccatctctaacctttatgagagattttttcagccaatatgtcaatactatttcacgttgtcaccataatgagcaccaagtatatcttcaacatttatcaacgcacaaatgtcaagcaaagcactatcaatgcatatcctttgaagcaacaagcaatgtcaagaaaagcaatataagtccatattctttgaagcaacaagcaatgtcaagaaaagcactcttctcttcttcttccaatgcatcaaagcttagtttaagtatctctaggatttgaatagtaagaatttgtttatattgtttgatgacagattttggttcttcttgtattttttccaaacaagttggaacctattacttccaaagccaatggaagtaattgctcgagcttgtcaacatcatctagaatcaagagaaccttctttcgctggagtctatgttgtatcattgaaactccttgttgctcacttgctaacttaattttcttctttccaagtatatatgaaagaaggatgctttggaaatgttgtagctcatgtttgtttgatttttcttacattttgaagaaaacatgaactatcaaaacagttagcaattaaattacagacagagcaagtgttgttttccctattccacccataccatggatccctgtcatgtggtggacaccatcatcagatccaacgtccaaaagcttcattacttttgacacttgtgactctagtccaaccaaataatccgcaacatgtaaacaagtgggattaatcttgcagcagacctgctcaaccatcctcccaatgaactcatattcatgtgcatatctgtttaaaacaaaaaagttttaatgaagtcaaatattgc

SEQ ID NO: 8457 - DNA, 1195 bp, Glycine max
  Gm_smallRNAprecursor_1290
ttccattatactatttctttggcaaatatggagaaatctagacatatgatttcaatttcactagttccctgttaatacaaaggcagaaatcaaccacaatgtaagacttcaataaacgtttttagagaaatttgcataatataaagaaaaaagcaattatgatgtgaacatatgatagtcaaaaaaagataaatcaagataagaaaccaaatcattcatgagtctcactcaaggtgttgtcttccaaaacttgaattatagcttccctggttctcttggtgattcttgagtgacaatttttgtaaccatgtcctaaagtcgtgcaatgtacctctaccatctctaacctttatgagagattttttcagccaatatgtcaatactatttcacgttgtcaccataatgagcaccaagtatatcttcaacatttatcaacgcacaaatgtcaagcaaagcactatcaatgcatatcctttgaagcaacaagcaatgtcaagaaaagcaatataagtccatattctttgaagcaacaagcaatgtcaagaaaagcactcttctcttcttcttccaatgcatcaaagcttagtttaagtatctctaggatttgaatagtaagaatttgtttatattgtttgatgacagattttggttcttcttgtattttttccaaacaagttggaacctattacttccaaagccaatggaagtaattgctcgagcttgtcaacatcatctagaatcaagagaaccttctttcgctggagtctatgttgtatcattgaaactccttgttgctcacttgctaacttaattttcttctttccaagtatatatgaaagaaggatgctttggaaatgttgtagctcatgtttgtttgatttttcttacattttgaagaaaacatgaactatcaaaacagttagcaattaaattacagacagagcaagtgttgttttccctattccacccataccatggatccctgtcatgtggtggacaccatcatcagatccaacgtccaaaagcttcattacttttgacacttgtgactctagtccaaccaaataatccgcaacatgtaaacaagtgggattaatcttgcagcagacctgctcaaccatcctcccaatgaactcatattcatgtgcatatctgtttaaaacaaaaaagttttaatgaagtcaaatattgcct

SEQ ID NO: 8458 - DNA, 1235 bp, Glycine max
  Gm_smallRNAprecursor_1291
ttccattatactatttctttggcaaatatggagaaatctagacatatgatttcaatttcactagttccctgttaatacaaaggcagaaatcaaccacaatgtaagacttcaataaacgtttttagagaaatttgcataatataaagaaaaaagcaattatgatgtgaacatatgatagtcaaaaaaagataaatcaagataagaaaccaaatcattcatgagtctcactcaaggtgttgtcttccaaaacttgaattatagcttccctggttctcttggtgattcttgagtgacaatttttgtaaccatgtcctaaagtcgtgcaatgtacctctaccatctctaacctttatgagagattttttcagccaatatgtcaatactatttcacgttgtcaccataatgagcaccaagtatatcttcaacatttatcaacgcacaaatgtcaagcaaagcactatcaatgcatatcctttgaagcaacaagcaatgtcaagaaaagcaatataagtccatattctttgaagcaacaagcaatgtcaagaaaagcactcttctcttcttcttccaatgcatcaaagcttagtttaagtatctctaggatttgaatagtaagaatttgtttatattgtttgatgacagattttggttcttcttgtattttttccaaacaagttggaacctattacttccaaagccaatggaagtaattgctcgagcttgtcaacatcatctagaatcaagagaaccttctttcgctggagtctatgttgtatcattgaaactccttgttgctcacttgctaacttaattttcttctttccaagtatatatgaaagaaggatgctttggaaatgttgtagctcatgtttgtttgatttttcttacattttgaagaaaacatgaactatcaaaacagttagcaattaaattacagacagagcaagtgttgttttccctattccacccataccatggatccctgtcatgtggtggacaccatcatcagatccaacgtccaaaagcttcattacttttgacacttgtgactctagtccaaccaaataatccgcaacatgtaaacaagtgggattaatcttgcagcagacctgctcaaccatcctcccaatgaactcatattcatgtgcatatctgtttaaaacaaaaaagttttaatgaagtcaaatattgccttgtatatccatgtcttgatacatatgttgtcaaggttaac

SEQ ID NO: 8459 - DNA, 1136 bp, Glycine max
  Gm_smallRNAprecursor_1292
ccattatactatttctttggcaaatatggagaaatctagacatatgatttcaatttcactagttccctgttaatacaaaggcagaaatcaaccacaatgtaagacttcaataaacgtttttagagaaatttgcataatataaagaaaaaagcaattatgatgtgaacatatgatagtcaaaaaaagataaatcaagataagaaaccaaatcattcatgagtctcactcaaggtgttgtcttccaaaacttgaattatagcttccctggttctcttggtgattcttgagtgacaatttttgtaaccatgtcctaaagtcgtgcaatgtacctctaccatctctaacctttatgagagattttttcagccaatatgtcaatactatttcacgttgtcaccataatgagcaccaagtatatcttcaacatttatcaacgcacaaatgtcaagcaaagcactatcaatgcatatcctttgaagcaacaagcaatgtcaagaaaagcaatataagtccatattctttgaagcaacaagcaatgtcaagaaaagcactcttctcttcttcttccaatgcatcaaagcttagtttaagtatctctaggatttgaatagtaagaatttgtttatattgtttgatgacagattttggttcttcttgtattttttccaaacaagttggaacctattacttccaaagccaatggaagtaattgctcgagcttgtcaacatcatctagaatcaagagaaccttctttcgctggagtctatgttgtatcattgaaactccttgttgctcacttgctaacttaattttcttctttccaagtatatatgaaagaaggatgctttggaaatgttgtagctcatgtttgtttgatttttcttacattttgaagaaaacatgaactatcaaaacagttagcaattaaattacagacagagcaagtgttgttttccctattccacccataccatggatccctgtcatgtggtggacaccatcatcagatccaacgtccaaaagcttcattacttttgacacttgtgactctagtccaaccaaataatccgcaacatgtaaacaagtgggattaatcttgcagcagacctgctcaaccatcctcccaatgaactca

SEQ ID NO: 8460 - DNA, 1191 bp, Glycine max
  Gm_smallRNAprecursor_1293
ccattatactatttctttggcaaatatggagaaatctagacatatgatttcaatttcactagttccctgttaatacaaaggcagaaatcaaccacaatgtaagacttcaataaacgtttttagagaaatttgcataatataaagaaaaaagcaattatgatgtgaacatatgatagtcaaaaaaagataaatcaagataagaaaccaaatcattcatgagtctcactcaaggtgttgtcttccaaaacttgaattatagcttccctggttctcttggtgattcttgagtgacaatttttgtaaccatgtcctaaagtcgtgcaatgtacctctaccatctctaacctttatgagagattttttcagccaatatgtcaatactatttcacgttgtcaccataatgagcaccaagtatatcttcaacatttatcaacgcacaaatgtcaagcaaagcactatcaatgcatatcctttgaagcaacaagcaatgtcaagaaaagcaatataagtccatattctttgaagcaacaagcaatgtcaagaaaagcactcttctcttcttcttccaatgcatcaaagcttagtttaagtatctctaggatttgaatagtaagaatttgtttatattgtttgatgacagattttggttcttcttgtattttttccaaacaagttggaacctattacttccaaagccaatggaagtaattgctcgagcttgtcaacatcatctagaatcaagagaaccttctttcgctggagtctatgttgtatcattgaaactccttgttgctcacttgctaacttaattttcttctttccaagtatatatgaaagaaggatgctttggaaatgttgtagctcatgtttgtttgatttttcttacattttgaagaaaacatgaactatcaaaacagttagcaattaaattacagacagagcaagtgttgttttccctattccacccataccatggatccctgtcatgtggtggacaccatcatcagatccaacgtccaaaagcttcattacttttgacacttgtgactctagtccaaccaaataatccgcaacatgtaaacaagtgggattaatcttgcagcagacctgctcaaccatcctcccaatgaactcatattcatgtgcatatctgtttaaaacaaaaaagttttaatgaagtcaaatattgc

SEQ ID NO: 8461 - DNA, 1189 bp, Glycine max
  Gm_smallRNAprecursor_1294
attatactatttctttggcaaatatggagaaatctagacatatgatttcaatttcactagttccctgttaatacaaaggcagaaatcaaccacaatgtaagacttcaataaacgtttttagagaaatttgcataatataaagaaaaaagcaattatgatgtgaacatatgatagtcaaaaaaagataaatcaagataagaaaccaaatcattcatgagtctcactcaaggtgttgtcttccaaaacttgaattatagcttccctggttctcttggtgattcttgagtgacaatttttgtaaccatgtcctaaagtcgtgcaatgtacctctaccatctctaacctttatgagagattttttcagccaatatgtcaatactatttcacgttgtcaccataatgagcaccaagtatatcttcaacatttatcaacgcacaaatgtcaagcaaagcactatcaatgcatatcctttgaagcaacaagcaatgtcaagaaaagcaatataagtccatattctttgaagcaacaagcaatgtcaagaaaagcactcttctcttcttcttccaatgcatcaaagcttagtttaagtatctctaggatttgaatagtaagaatttgtttatattgtttgatgacagattttggttcttcttgtattttttccaaacaagttggaacctattacttccaaagccaatggaagtaattgctcgagcttgtcaacatcatctagaatcaagagaaccttctttcgctggagtctatgttgtatcattgaaactccttgttgctcacttgctaacttaattttcttctttccaagtatatatgaaagaaggatgctttggaaatgttgtagctcatgtttgtttgatttttcttacattttgaagaaaacatgaactatcaaaacagttagcaattaaattacagacagagcaagtgttgttttccctattccacccataccatggatccctgtcatgtggtggacaccatcatcagatccaacgtccaaaagcttcattacttttgacacttgtgactctagtccaaccaaataatccgcaacatgtaaacaagtgggattaatcttgcagcagacctgctcaaccatcctcccaatgaactcatattcatgtgcatatctgtttaaaacaaaaaagttttaatgaagtcaaatattgc

SEQ ID NO: 8462 - DNA, 1070 bp, Glycine max
  Gm_smallRNAprecursor_1295
ttatactatttctttggcaaatatggagaaatctagacatatgatttcaatttcactagttccctgttaatacaaaggcagaaatcaaccacaatgtaagacttcaataaacgtttttagagaaatttgcataatataaagaaaaaagcaattatgatgtgaacatatgatagtcaaaaaaagataaatcaagataagaaaccaaatcattcatgagtctcactcaaggtgttgtcttccaaaacttgaattatagcttccctggttctcttggtgattcttgagtgacaatttttgtaaccatgtcctaaagtcgtgcaatgtacctctaccatctctaacctttatgagagattttttcagccaatatgtcaatactatttcacgttgtcaccataatgagcaccaagtatatcttcaacatttatcaacgcacaaatgtcaagcaaagcactatcaatgcatatcctttgaagcaacaagcaatgtcaagaaaagcaatataagtccatattctttgaagcaacaagcaatgtcaagaaaagcactcttctcttcttcttccaatgcatcaaagcttagtttaagtatctctaggatttgaatagtaagaatttgtttatattgtttgatgacagattttggttcttcttgtattttttccaaacaagttggaacctattacttccaaagccaatggaagtaattgctcgagcttgtcaacatcatctagaatcaagagaaccttctttcgctggagtctatgttgtatcattgaaactccttgttgctcacttgctaacttaattttcttctttccaagtatatatgaaagaaggatgctttggaaatgttgtagctcatgtttgtttgatttttcttacattttgaagaaaacatgaactatcaaaacagttagcaattaaattacagacagagcaagtgttgttttccctattccacccataccatggatccctgtcatgtggtggacaccatcatcagatccaacgtccaaaagcttcattacttttgacacttgtgactctagtccaaccaaataatccgca

SEQ ID NO: 8463 - DNA, 1231 bp, Glycine max
  Gm_smallRNAprecursor_1296
ttatactatttctttggcaaatatggagaaatctagacatatgatttcaatttcactagttccctgttaatacaaaggcagaaatcaaccacaatgtaagacttcaataaacgtttttagagaaatttgcataatataaagaaaaaagcaattatgatgtgaacatatgatagtcaaaaaaagataaatcaagataagaaaccaaatcattcatgagtctcactcaaggtgttgtcttccaaaacttgaattatagcttccctggttctcttggtgattcttgagtgacaatttttgtaaccatgtcctaaagtcgtgcaatgtacctctaccatctctaacctttatgagagattttttcagccaatatgtcaatactatttcacgttgtcaccataatgagcaccaagtatatcttcaacatttatcaacgcacaaatgtcaagcaaagcactatcaatgcatatcctttgaagcaacaagcaatgtcaagaaaagcaatataagtccatattctttgaagcaacaagcaatgtcaagaaaagcactcttctcttcttcttccaatgcatcaaagcttagtttaagtatctctaggatttgaatagtaagaatttgtttatattgtttgatgacagattttggttcttcttgtattttttccaaacaagttggaacctattacttccaaagccaatggaagtaattgctcgagcttgtcaacatcatctagaatcaagagaaccttctttcgctggagtctatgttgtatcattgaaactccttgttgctcacttgctaacttaattttcttctttccaagtatatatgaaagaaggatgctttggaaatgttgtagctcatgtttgtttgatttttcttacattttgaagaaaacatgaactatcaaaacagttagcaattaaattacagacagagcaagtgttgttttccctattccacccataccatggatccctgtcatgtggtggacaccatcatcagatccaacgtccaaaagcttcattacttttgacacttgtgactctagtccaaccaaataatccgcaacatgtaaacaagtgggattaatcttgcagcagacctgctcaaccatcctcccaatgaactcatattcatgtgcatatctgtttaaaacaaaaaagttttaatgaagtcaaatattgccttgtatatccatgtcttgatacatatgttgtcaaggttaaca

SEQ ID NO: 8464 - DNA, 1184 bp, Glycine max
  Gm_smallRNAprecursor_1297
tatactatttctttggcaaatatggagaaatctagacatatgatttcaatttcactagttccctgttaatacaaaggcagaaatcaaccacaatgtaagacttcaataaacgtttttagagaaatttgcataatataaagaaaaaagcaattatgatgtgaacatatgatagtcaaaaaaagataaatcaagataagaaaccaaatcattcatgagtctcactcaaggtgttgtcttccaaaacttgaattatagcttccctggttctcttggtgattcttgagtgacaatttttgtaaccatgtcctaaagtcgtgcaatgtacctctaccatctctaacctttatgagagattttttcagccaatatgtcaatactatttcacgttgtcaccataatgagcaccaagtatatcttcaacatttatcaacgcacaaatgtcaagcaaagcactatcaatgcatatcctttgaagcaacaagcaatgtcaagaaaagcaatataagtccatattctttgaagcaacaagcaatgtcaagaaaagcactcttctcttcttcttccaatgcatcaaagcttagtttaagtatctctaggatttgaatagtaagaatttgtttatattgtttgatgacagattttggttcttcttgtattttttccaaacaagttggaacctattacttccaaagccaatggaagtaattgctcgagcttgtcaacatcatctagaatcaagagaaccttctttcgctggagtctatgttgtatcattgaaactccttgttgctcacttgctaacttaattttcttctttccaagtatatatgaaagaaggatgctttggaaatgttgtagctcatgtttgtttgatttttcttacattttgaagaaaacatgaactatcaaaacagttagcaattaaattacagacagagcaagtgttgttttccctattccacccataccatggatccctgtcatgtggtggacaccatcatcagatccaacgtccaaaagcttcattacttttgacacttgtgactctagtccaaccaaataatccgcaacatgtaaacaagtgggattaatcttgcagcagacctgctcaaccatcctcccaatgaactcatattcatgtgcatatctgtttaaaacaaaaaagttttaatgaagtcaaatat

SEQ ID NO: 8465 - DNA, 1174 bp, Glycine max
  Gm_smallRNAprecursor_1298
tatttctttggcaaatatggagaaatctagacatatgatttcaatttcactagttccctgttaatacaaaggcagaaatcaaccacaatgtaagacttcaataaacgtttttagagaaatttgcataatataaagaaaaaagcaattatgatgtgaacatatgatagtcaaaaaaagataaatcaagataagaaaccaaatcattcatgagtctcactcaaggtgttgtcttccaaaacttgaattatagcttccctggttctcttggtgattcttgagtgacaatttttgtaaccatgtcctaaagtcgtgcaatgtacctctaccatctctaacctttatgagagattttttcagccaatatgtcaatactatttcacgttgtcaccataatgagcaccaagtatatcttcaacatttatcaacgcacaaatgtcaagcaaagcactatcaatgcatatcctttgaagcaacaagcaatgtcaagaaaagcaatataagtccatattctttgaagcaacaagcaatgtcaagaaaagcactcttctcttcttcttccaatgcatcaaagcttagtttaagtatctctaggatttgaatagtaagaatttgtttatattgtttgatgacagattttggttcttcttgtattttttccaaacaagttggaacctattacttccaaagccaatggaagtaattgctcgagcttgtcaacatcatctagaatcaagagaaccttctttcgctggagtctatgttgtatcattgaaactccttgttgctcacttgctaacttaattttcttctttccaagtatatatgaaagaaggatgctttggaaatgttgtagctcatgtttgtttgatttttcttacattttgaagaaaacatgaactatcaaaacagttagcaattaaattacagacagagcaagtgttgttttccctattccacccataccatggatccctgtcatgtggtggacaccatcatcagatccaacgtccaaaagcttcattacttttgacacttgtgactctagtccaaccaaataatccgcaacatgtaaacaagtgggattaatcttgcagcagacctgctcaaccatcctcccaatgaactcatattcatgtgcatatctgtttaaaacaaaaaagttttaatgaagtca

SEQ ID NO: 8466 - DNA, 1116 bp, Glycine max
  Gm_smallRNAprecursor_1299
atttctttggcaaatatggagaaatctagacatatgatttcaatttcactagttccctgttaatacaaaggcagaaatcaaccacaatgtaagacttcaataaacgtttttagagaaatttgcataatataaagaaaaaagcaattatgatgtgaacatatgatagtcaaaaaaagataaatcaagataagaaaccaaatcattcatgagtctcactcaaggtgttgtcttccaaaacttgaattatagcttccctggttctcttggtgattcttgagtgacaatttttgtaaccatgtcctaaagtcgtgcaatgtacctctaccatctctaacctttatgagagattttttcagccaatatgtcaatactatttcacgttgtcaccataatgagcaccaagtatatcttcaacatttatcaacgcacaaatgtcaagcaaagcactatcaatgcatatcctttgaagcaacaagcaatgtcaagaaaagcaatataagtccatattctttgaagcaacaagcaatgtcaagaaaagcactcttctcttcttcttccaatgcatcaaagcttagtttaagtatctctaggatttgaatagtaagaatttgtttatattgtttgatgacagattttggttcttcttgtattttttccaaacaagttggaacctattacttccaaagccaatggaagtaattgctcgagcttgtcaacatcatctagaatcaagagaaccttctttcgctggagtctatgttgtatcattgaaactccttgttgctcacttgctaacttaattttcttctttccaagtatatatgaaagaaggatgctttggaaatgttgtagctcatgtttgtttgatttttcttacattttgaagaaaacatgaactatcaaaacagttagcaattaaattacagacagagcaagtgttgttttccctattccacccataccatggatccctgtcatgtggtggacaccatcatcagatccaacgtccaaaagcttcattacttttgacacttgtgactctagtccaaccaaataatccgcaacatgtaaacaagtgggattaatcttgcagcagacctgctcaaccatcctccc

SEQ ID NO: 8467 - DNA, 1134 bp, Glycine max
  Gm_smallRNAprecursor_1300
atttctttggcaaatatggagaaatctagacatatgatttcaatttcactagttccctgttaatacaaaggcagaaatcaaccacaatgtaagacttcaataaacgtttttagagaaatttgcataatataaagaaaaaagcaattatgatgtgaacatatgatagtcaaaaaaagataaatcaagataagaaaccaaatcattcatgagtctcactcaaggtgttgtcttccaaaacttgaattatagcttccctggttctcttggtgattcttgagtgacaatttttgtaaccatgtcctaaagtcgtgcaatgtacctctaccatctctaacctttatgagagattttttcagccaatatgtcaatactatttcacgttgtcaccataatgagcaccaagtatatcttcaacatttatcaacgcacaaatgtcaagcaaagcactatcaatgcatatcctttgaagcaacaagcaatgtcaagaaaagcaatataagtccatattctttgaagcaacaagcaatgtcaagaaaagcactcttctcttcttcttccaatgcatcaaagcttagtttaagtatctctaggatttgaatagtaagaatttgtttatattgtttgatgacagattttggttcttcttgtattttttccaaacaagttggaacctattacttccaaagccaatggaagtaattgctcgagcttgtcaacatcatctagaatcaagagaaccttctttcgctggagtctatgttgtatcattgaaactccttgttgctcacttgctaacttaattttcttctttccaagtatatatgaaagaaggatgctttggaaatgttgtagctcatgtttgtttgatttttcttacattttgaagaaaacatgaactatcaaaacagttagcaattaaattacagacagagcaagtgttgttttccctattccacccataccatggatccctgtcatgtggtggacaccatcatcagatccaacgtccaaaagcttcattacttttgacacttgtgactctagtccaaccaaataatccgcaacatgtaaacaagtgggattaatcttgcagcagacctgctcaaccatcctcccaatgaactcatattcatg

SEQ ID NO: 8468 - DNA, 1171 bp, Glycine max
  Gm_smallRNAprecursor_1301
atttctttggcaaatatggagaaatctagacatatgatttcaatttcactagttccctgttaatacaaaggcagaaatcaaccacaatgtaagacttcaataaacgtttttagagaaatttgcataatataaagaaaaaagcaattatgatgtgaacatatgatagtcaaaaaaagataaatcaagataagaaaccaaatcattcatgagtctcactcaaggtgttgtcttccaaaacttgaattatagcttccctggttctcttggtgattcttgagtgacaatttttgtaaccatgtcctaaagtcgtgcaatgtacctctaccatctctaacctttatgagagattttttcagccaatatgtcaatactatttcacgttgtcaccataatgagcaccaagtatatcttcaacatttatcaacgcacaaatgtcaagcaaagcactatcaatgcatatcctttgaagcaacaagcaatgtcaagaaaagcaatataagtccatattctttgaagcaacaagcaatgtcaagaaaagcactcttctcttcttcttccaatgcatcaaagcttagtttaagtatctctaggatttgaatagtaagaatttgtttatattgtttgatgacagattttggttcttcttgtattttttccaaacaagttggaacctattacttccaaagccaatggaagtaattgctcgagcttgtcaacatcatctagaatcaagagaaccttctttcgctggagtctatgttgtatcattgaaactccttgttgctcacttgctaacttaattttcttctttccaagtatatatgaaagaaggatgctttggaaatgttgtagctcatgtttgtttgatttttcttacattttgaagaaaacatgaactatcaaaacagttagcaattaaattacagacagagcaagtgttgttttccctattccacccataccatggatccctgtcatgtggtggacaccatcatcagatccaacgtccaaaagcttcattacttttgacacttgtgactctagtccaaccaaataatccgcaacatgtaaacaagtgggattaatcttgcagcagacctgctcaaccatcctcccaatgaactcatattcatgtgcatatctgtttaaaacaaaaaagttttaatgaagt

SEQ ID NO: 8469 - DNA, 1171 bp, Glycine max; identical to SEQ ID NO: 8468
  Gm_smallRNAprecursor_1302

SEQ ID NO: 8470 - DNA, 1115 bp, Glycine max
  Gm_smallRNAprecursor_1303
tttctttggcaaatatggagaaatctagacatatgatttcaatttcactagttccctgttaatacaaaggcagaaatcaaccacaatgtaagacttcaataaacgtttttagagaaatttgcataatataaagaaaaaagcaattatgatgtgaacatatgatagtcaaaaaaagataaatcaagataagaaaccaaatcattcatgagtctcactcaaggtgttgtcttccaaaacttgaattatagcttccctggttctcttggtgattcttgagtgacaatttttgtaaccatgtcctaaagtcgtgcaatgtacctctaccatctctaacctttatgagagattttttcagccaatatgtcaatactatttcacgttgtcaccataatgagcaccaagtatatcttcaacatttatcaacgcacaaatgtcaagcaaagcactatcaatgcatatcctttgaagcaacaagcaatgtcaagaaaagcaatataagtccatattctttgaagcaacaagcaatgtcaagaaaagcactcttctcttcttcttccaatgcatcaaagcttagtttaagtatctctaggatttgaatagtaagaatttgtttatattgtttgatgacagattttggttcttcttgtattttttccaaacaagttggaacctattacttccaaagccaatggaagtaattgctcgagcttgtcaacatcatctagaatcaagagaaccttctttcgctggagtctatgttgtatcattgaaactccttgttgctcacttgctaacttaattttcttctttccaagtatatatgaaagaaggatgctttggaaatgttgtagctcatgtttgtttgatttttcttacattttgaagaaaacatgaactatcaaaacagttagcaattaaattacagacagagcaagtgttgttttccctattccacccataccatggatccctgtcatgtggtggacaccatcatcagatccaacgtccaaaagcttcattacttttgacacttgtgactctagtccaaccaaataatccgcaacatgtaaacaagtgggattaatcttgcagcagacctgctcaaccatcctccc

SEQ ID NO: 8471 - DNA, 1130 bp, Glycine max
  Gm_smallRNAprecursor_1304
tttctttggcaaatatggagaaatctagacatatgatttcaatttcactagttccctgttaatacaaaggcagaaatcaaccacaatgtaagacttcaataaacgtttttagagaaatttgcataatataaagaaaaaagcaattatgatgtgaacatatgatagtcaaaaaaagataaatcaagataagaaaccaaatcattcatgagtctcactcaaggtgttgtcttccaaaacttgaattatagcttccctggttctcttggtgattcttgagtgacaatttttgtaaccatgtcctaaagtcgtgcaatgtacctctaccatctctaacctttatgagagattttttcagccaatatgtcaatactatttcacgttgtcaccataatgagcaccaagtatatcttcaacatttatcaacgcacaaatgtcaagcaaagcactatcaatgcatatcctttgaagcaacaagcaatgtcaagaaaagcaatataagtccatattctttgaagcaacaagcaatgtcaagaaaagcactcttctcttcttcttccaatgcatcaaagcttagtttaagtatctctaggatttgaatagtaagaatttgtttatattgtttgatgacagattttggttcttcttgtattttttccaaacaagttggaacctattacttccaaagccaatggaagtaattgctcgagcttgtcaacatcatctagaatcaagagaaccttctttcgctggagtctatgttgtatcattgaaactccttgttgctcacttgctaacttaattttcttctttccaagtatatatgaaagaaggatgctttggaaatgttgtagctcatgtttgtttgatttttcttacattttgaagaaaacatgaactatcaaaacagttagcaattaaattacagacagagcaagtgttgttttccctattccacccataccatggatccctgtcatgtggtggacaccatcatcagatccaacgtccaaaagcttcattacttttgacacttgtgactctagtccaaccaaataatccgcaacatgtaaacaagtgggattaatcttgcagcagacctgctcaaccatcctcccaatgaactcatattc

SEQ ID NO: 8472 - DNA, 1203 bp, Glycine max
  Gm_smallRNAprecursor_1305
ggcaaatatggagaaatctagacatatgatttcaatttcactagttccctgttaatacaaaggcagaaatcaaccacaatgtaagacttcaataaacgtttttagagaaatttgcataatataaagaaaaaagcaattatgatgtgaacatatgatagtcaaaaaaagataaatcaagataagaaaccaaatcattcatgagtctcactcaaggtgttgtcttccaaaacttgaattatagcttccctggttctcttggtgattcttgagtgacaatttttgtaaccatgtcctaaagtcgtgcaatgtacctctaccatctctaacctttatgagagattttttcagccaatatgtcaatactatttcacgttgtcaccataatgagcaccaagtatatcttcaacatttatcaacgcacaaatgtcaagcaaagcactatcaatgcatatcctttgaagcaacaagcaatgtcaagaaaagcaatataagtccatattctttgaagcaacaagcaatgtcaagaaaagcactcttctcttcttcttccaatgcatcaaagcttagtttaagtatctctaggatttgaatagtaagaatttgtttatattgtttgatgacagattttggttcttcttgtattttttccaaacaagttggaacctattacttccaaagccaatggaagtaattgctcgagcttgtcaacatcatctagaatcaagagaaccttctttcgctggagtctatgttgtatcattgaaactccttgttgctcacttgctaacttaattttcttctttccaagtatatatgaaagaaggatgctttggaaatgttgtagctcatgtttgtttgatttttcttacattttgaagaaaacatgaactatcaaaacagttagcaattaaattacagacagagcaagtgttgttttccctattccacccataccatggatccctgtcatgtggtggacaccatcatcagatccaacgtccaaaagcttcattacttttgacacttgtgactctagtccaaccaaataatccgcaacatgtaaacaagtgggattaatcttgcagcagacctgctcaaccatcctcccaatgaactcatattcatgtgcatatctgtttaaaacaaaaaagttttaatgaagtcaaatattgccttgtatatccatgtcttgatacatatgtt

SEQ ID NO: 8473 - DNA, 1204 bp, Glycine max
  Gm_smallRNAprecursor_1306
ggcaaatatggagaaatctagacatatgatttcaatttcactagttccctgttaatacaaaggcagaaatcaaccacaatgtaagacttcaataaacgtttttagagaaatttgcataatataaagaaaaaagcaattatgatgtgaacatatgatagtcaaaaaaagataaatcaagataagaaaccaaatcattcatgagtctcactcaaggtgttgtcttccaaaacttgaattatagcttccctggttctcttggtgattcttgagtgacaatttttgtaaccatgtcctaaagtcgtgcaatgtacctctaccatctctaacctttatgagagattttttcagccaatatgtcaatactatttcacgttgtcaccataatgagcaccaagtatatcttcaacatttatcaacgcacaaatgtcaagcaaagcactatcaatgcatatcctttgaagcaacaagcaatgtcaagaaaagcaatataagtccatattctttgaagcaacaagcaatgtcaagaaaagcactcttctcttcttcttccaatgcatcaaagcttagtttaagtatctctaggatttgaatagtaagaatttgtttatattgtttgatgacagattttggttcttcttgtattttttccaaacaagttggaacctattacttccaaagccaatggaagtaattgctcgagcttgtcaacatcatctagaatcaagagaaccttctttcgctggagtctatgttgtatcattgaaactccttgttgctcacttgctaacttaattttcttctttccaagtatatatgaaagaaggatgctttggaaatgttgtagctcatgtttgtttgatttttcttacattttgaagaaaacatgaactatcaaaacagttagcaattaaattacagacagagcaagtgttgttttccctattccacccataccatggatccctgtcatgtggtggacaccatcatcagatccaacgtccaaaagcttcattacttttgacacttgtgactctagtccaaccaaataatccgcaacatgtaaacaagtgggattaatcttgcagcagacctgctcaaccatcctcccaatgaactcatattcatgtgcatatctgtttaaaacaaaaaagttttaatgaagtcaaatattgccttgtatatccatgtcttgatacatatgttg

SEQ ID NO: 8474 - DNA, 1158 bp, Glycine max
  Gm_smallRNAprecursor_1307
atgatttcaatttcactagttccctgttaatacaaaggcagaaatcaaccacaatgtaagacttcaataaacgtttttagagaaatttgcataatataaagaaaaaagcaattatgatgtgaacatatgatagtcaaaaaaagataaatcaagataagaaaccaaatcattcatgagtctcactcaaggtgttgtcttccaaaacttgaattatagcttccctggttctcttggtgattcttgagtgacaatttttgtaaccatgtcctaaagtcgtgcaatgtacctctaccatctctaacctttatgagagattttttcagccaatatgtcaatactatttcacgttgtcaccataatgagcaccaagtatatcttcaacatttatcaacgcacaaatgtcaagcaaagcactatcaatgcatatcctttgaagcaacaagcaatgtcaagaaaagcaatataagtccatattctttgaagcaacaagcaatgtcaagaaaagcactcttctcttcttcttccaatgcatcaaagcttagtttaagtatctctaggatttgaatagtaagaatttgtttatattgtttgatgacagattttggttcttcttgtattttttccaaacaagttggaacctattacttccaaagccaatggaagtaattgctcgagcttgtcaacatcatctagaatcaagagaaccttctttcgctggagtctatgttgtatcattgaaactccttgttgctcacttgctaacttaattttcttctttccaagtatatatgaaagaaggatgctttggaaatgttgtagctcatgtttgtttgatttttcttacattttgaagaaaacatgaactatcaaaacagttagcaattaaattacagacagagcaagtgttgttttccctattccacccataccatggatccctgtcatgtggtggacaccatcatcagatccaacgtccaaaagcttcattacttttgacacttgtgactctagtccaaccaaataatccgcaacatgtaaacaagtgggattaatcttgcagcagacctgctcaaccatcctcccaatgaactcatattcatgtgcatatctgtttaaaacaaaaaagttttaatgaagtcaaatattgccttgtatatc

SEQ ID NO: 8475 - DNA, 1191 bp, Glycine max
  Gm_smallRNAprecursor_1308
atgatttcaatttcactagttccctgttaatacaaaggcagaaatcaaccacaatgtaagacttcaataaacgtttttagagaaatttgcataatataaagaaaaaagcaattatgatgtgaacatatgatagtcaaaaaaagataaatcaagataagaaaccaaatcattcatgagtctcactcaaggtgttgtcttccaaaacttgaattatagcttccctggttctcttggtgattcttgagtgacaatttttgtaaccatgtcctaaagtcgtgcaatgtacctctaccatctctaacctttatgagagattttttcagccaatatgtcaatactatttcacgttgtcaccataatgagcaccaagtatatcttcaacatttatcaacgcacaaatgtcaagcaaagcactatcaatgcatatcctttgaagcaacaagcaatgtcaagaaaagcaatataagtccatattctttgaagcaacaagcaatgtcaagaaaagcactcttctcttcttcttccaatgcatcaaagcttagtttaagtatctctaggatttgaatagtaagaatttgtttatattgtttgatgacagattttggttcttcttgtattttttccaaacaagttggaacctattacttccaaagccaatggaagtaattgctcgagcttgtcaacatcatctagaatcaagagaaccttctttcgctggagtctatgttgtatcattgaaactccttgttgctcacttgctaacttaattttcttctttccaagtatatatgaaagaaggatgctttggaaatgttgtagctcatgtttgtttgatttttcttacattttgaagaaaacatgaactatcaaaacagttagcaattaaattacagacagagcaagtgttgttttccctattccacccataccatggatccctgtcatgtggtggacaccatcatcagatccaacgtccaaaagcttcattacttttgacacttgtgactctagtccaaccaaataatccgcaacatgtaaacaagtgggattaatcttgcagcagacctgctcaaccatcctcccaatgaactcatattcatgtgcatatctgtttaaaacaaaaaagttttaatgaagtcaaatattgccttgtatatccatgtcttgatacatatgttgtcaaggttaaca

SEQ ID NO: 8476 - DNA, 1189 bp, Glycine max
  Gm_smallRNAprecursor_1309
tgatttcaatttcactagttccctgttaatacaaaggcagaaatcaaccacaatgtaagacttcaataaacgtttttagagaaatttgcataatataaagaaaaaagcaattatgatgtgaacatatgatagtcaaaaaaagataaatcaagataagaaaccaaatcattcatgagtctcactcaaggtgttgtcttccaaaacttgaattatagcttccctggttctcttggtgattcttgagtgacaatttttgtaaccatgtcctaaagtcgtgcaatgtacctctaccatctctaacctttatgagagattttttcagccaatatgtcaatactatttcacgttgtcaccataatgagcaccaagtatatcttcaacatttatcaacgcacaaatgtcaagcaaagcactatcaatgcatatcctttgaagcaacaagcaatgtcaagaaaagcaatataagtccatattctttgaagcaacaagcaatgtcaagaaaagcactcttctcttcttcttccaatgcatcaaagcttagtttaagtatctctaggatttgaatagtaagaatttgtttatattgtttgatgacagattttggttcttcttgtattttttccaaacaagttggaacctattacttccaaagccaatggaagtaattgctcgagcttgtcaacatcatctagaatcaagagaaccttctttcgctggagtctatgttgtatcattgaaactccttgttgctcacttgctaacttaattttcttctttccaagtatatatgaaagaaggatgctttggaaatgttgtagctcatgtttgtttgatttttcttacattttgaagaaaacatgaactatcaaaacagttagcaattaaattacagacagagcaagtgttgttttccctattccacccataccatggatccctgtcatgtggtggacaccatcatcagatccaacgtccaaaagcttcattacttttgacacttgtgactctagtccaaccaaataatccgcaacatgtaaacaagtgggattaatcttgcagcagacctgctcaaccatcctcccaatgaactcatattcatgtgcatatctgtttaaaacaaaaaagttttaatgaagtcaaatattgccttgtatatccatgtcttgatacatatgttgtcaaggttaac

SEQ ID NO: 8477 - DNA, 1169 bp, Glycine max
  Gm_smallRNAprecursor_1310
tcaataaacgtttttagagaaatttgcataatataaagaaaaaagcaattatgatgtgaacatatgatagtcaaaaaaagataaatcaagataagaaaccaaatcattcatgagtctcactcaaggtgttgtcttccaaaacttgaattatagcttccctggttctcttggtgattcttgagtgacaatttttgtaaccatgtcctaaagtcgtgcaatgtacctctaccatctctaacctttatgagagattttttcagccaatatgtcaatactatttcacgttgtcaccataatgagcaccaagtatatcttcaacatttatcaacgcacaaatgtcaagcaaagcactatcaatgcatatcctttgaagcaacaagcaatgtcaagaaaagcaatataagtccatattctttgaagcaacaagcaatgtcaagaaaagcactcttctcttcttcttccaatgcatcaaagcttagtttaagtatctctaggatttgaatagtaagaatttgtttatattgtttgatgacagattttggttcttcttgtattttttccaaacaagttggaacctattacttccaaagccaatggaagtaattgctcgagcttgtcaacatcatctagaatcaagagaaccttctttcgctggagtctatgttgtatcattgaaactccttgttgctcacttgctaacttaattttcttctttccaagtatatatgaaagaaggatgctttggaaatgttgtagctcatgtttgtttgatttttcttacattttgaagaaaacatgaactatcaaaacagttagcaattaaattacagacagagcaagtgttgttttccctattccacccataccatggatccctgtcatgtggtggacaccatcatcagatccaacgtccaaaagcttcattacttttgacacttgtgactctagtccaaccaaataatccgcaacatgtaaacaagtgggattaatcttgcagcagacctgctcaaccatcctcccaatgaactcatattcatgtgcatatctgtttaaaacaaaaaagttttaatgaagtcaaatattgccttgtatatccatgtcttgatacatatgttgtcaaggttaacaaacatttctttttccctttatattttaacctcaaaccttat

SEQ ID NO: 8478 - DNA, 1168 bp, Glycine max
  Gm_smallRNAprecursor_1311
caataaacgtttttagagaaatttgcataatataaagaaaaaagcaattatgatgtgaacatatgatagtcaaaaaaagataaatcaagataagaaaccaaatcattcatgagtctcactcaaggtgttgtcttccaaaacttgaattatagcttccctggttctcttggtgattcttgagtgacaatttttgtaaccatgtcctaaagtcgtgcaatgtacctctaccatctctaacctttatgagagattttttcagccaatatgtcaatactatttcacgttgtcaccataatgagcaccaagtatatcttcaacatttatcaacgcacaaatgtcaagcaaagcactatcaatgcatatcctttgaagcaacaagcaatgtcaagaaaagcaatataagtccatattctttgaagcaacaagcaatgtcaagaaaagcactcttctcttcttcttccaatgcatcaaagcttagtttaagtatctctaggatttgaatagtaagaatttgtttatattgtttgatgacagattttggttcttcttgtattttttccaaacaagttggaacctattacttccaaagccaatggaagtaattgctcgagcttgtcaacatcatctagaatcaagagaaccttctttcgctggagtctatgttgtatcattgaaactccttgttgctcacttgctaacttaattttcttctttccaagtatatatgaaagaaggatgctttggaaatgttgtagctcatgtttgtttgatttttcttacattttgaagaaaacatgaactatcaaaacagttagcaattaaattacagacagagcaagtgttgttttccctattccacccataccatggatccctgtcatgtggtggacaccatcatcagatccaacgtccaaaagcttcattacttttgacacttgtgactctagtccaaccaaataatccgcaacatgtaaacaagtgggattaatcttgcagcagacctgctcaaccatcctcccaatgaactcatattcatgtgcatatctgtttaaaacaaaaaagttttaatgaagtcaaatattgccttgtatatccatgtcttgatacatatgttgtcaaggttaacaaacatttctttttccctttatattttaacctcaaaccttat

SEQ ID NO: 8479 - DNA, 1097 bp, Glycine max
  Gm_smallRNAprecursor_1312
aaatttgcataatataaagaaaaaagcaattatgatgtgaacatatgatagtcaaaaaaagataaatcaagataagaaaccaaatcattcatgagtctcactcaaggtgttgtcttccaaaacttgaattatagcttccctggttctcttggtgattcttgagtgacaatttttgtaaccatgtcctaaagtcgtgcaatgtacctctaccatctctaacctttatgagagattttttcagccaatatgtcaatactatttcacgttgtcaccataatgagcaccaagtatatcttcaacatttatcaacgcacaaatgtcaagcaaagcactatcaatgcatatcctttgaagcaacaagcaatgtcaagaaaagcaatataagtccatattctttgaagcaacaagcaatgtcaagaaaagcactcttctcttcttcttccaatgcatcaaagcttagtttaagtatctctaggatttgaatagtaagaatttgtttatattgtttgatgacagattttggttcttcttgtattttttccaaacaagttggaacctattacttccaaagccaatggaagtaattgctcgagcttgtcaacatcatctagaatcaagagaaccttctttcgctggagtctatgttgtatcattgaaactccttgttgctcacttgctaacttaattttcttctttccaagtatatatgaaagaaggatgctttggaaatgttgtagctcatgtttgtttgatttttcttacattttgaagaaaacatgaactatcaaaacagttagcaattaaattacagacagagcaagtgttgttttccctattccacccataccatggatccctgtcatgtggtggacaccatcatcagatccaacgtccaaaagcttcattacttttgacacttgtgactctagtccaaccaaataatccgcaacatgtaaacaagtgggattaatcttgcagcagacctgctcaaccatcctcccaatgaactcatattcatgtgcatatctgtttaaaacaaaaaagttttaatgaagtcaaatattgccttgtatatccatgtcttgatacatatgttg

SEQ ID NO: 8480 - DNA, 1101 bp, Glycine max
  Gm_smallRNAprecursor_1313
aaatttgcataatataaagaaaaaagcaattatgatgtgaacatatgatagtcaaaaaaagataaatcaagataagaaaccaaatcattcatgagtctcactcaaggtgttgtcttccaaaacttgaattatagcttccctggttctcttggtgattcttgagtgacaatttttgtaaccatgtcctaaagtcgtgcaatgtacctctaccatctctaacctttatgagagattttttcagccaatatgtcaatactatttcacgttgtcaccataatgagcaccaagtatatcttcaacatttatcaacgcacaaatgtcaagcaaagcactatcaatgcatatcctttgaagcaacaagcaatgtcaagaaaagcaatataagtccatattctttgaagcaacaagcaatgtcaagaaaagcactcttctcttcttcttccaatgcatcaaagcttagtttaagtatctctaggatttgaatagtaagaatttgtttatattgtttgatgacagattttggttcttcttgtattttttccaaacaagttggaacctattacttccaaagccaatggaagtaattgctcgagcttgtcaacatcatctagaatcaagagaaccttctttcgctggagtctatgttgtatcattgaaactccttgttgctcacttgctaacttaattttcttctttccaagtatatatgaaagaaggatgctttggaaatgttgtagctcatgtttgtttgatttttcttacattttgaagaaaacatgaactatcaaaacagttagcaattaaattacagacagagcaagtgttgttttccctattccacccataccatggatccctgtcatgtggtggacaccatcatcagatccaacgtccaaaagcttcattacttttgacacttgtgactctagtccaaccaaataatccgcaacatgtaaacaagtgggattaatcttgcagcagacctgctcaaccatcctcccaatgaactcatattcatgtgcatatctgtttaaaacaaaaaagttttaatgaagtcaaatattgccttgtatatccatgtcttgatacatatgttgtcaa

SEQ ID NO: 8481 - DNA, 1087 bp, Glycine max
  Gm_smallRNAprecursor_1314
aatataaagaaaaaagcaattatgatgtgaacatatgatagtcaaaaaaagataaatcaagataagaaaccaaatcattcatgagtctcactcaaggtgttgtcttccaaaacttgaattatagcttccctggttctcttggtgattcttgagtgacaatttttgtaaccatgtcctaaagtcgtgcaatgtacctctaccatctctaacctttatgagagattttttcagccaatatgtcaatactatttcacgttgtcaccataatgagcaccaagtatatcttcaacatttatcaacgcacaaatgtcaagcaaagcactatcaatgcatatcctttgaagcaacaagcaatgtcaagaaaagcaatataagtccatattctttgaagcaacaagcaatgtcaagaaaagcactcttctcttcttcttccaatgcatcaaagcttagtttaagtatctctaggatttgaatagtaagaatttgtttatattgtttgatgacagattttggttcttcttgtattttttccaaacaagttggaacctattacttccaaagccaatggaagtaattgctcgagcttgtcaacatcatctagaatcaagagaaccttctttcgctggagtctatgttgtatcattgaaactccttgttgctcacttgctaacttaattttcttctttccaagtatatatgaaagaaggatgctttggaaatgttgtagctcatgtttgtttgatttttcttacattttgaagaaaacatgaactatcaaaacagttagcaattaaattacagacagagcaagtgttgttttccctattccacccataccatggatccctgtcatgtggtggacaccatcatcagatccaacgtccaaaagcttcattacttttgacacttgtgactctagtccaaccaaataatccgcaacatgtaaacaagtgggattaatcttgcagcagacctgctcaaccatcctcccaatgaactcatattcatgtgcatatctgtttaaaacaaaaaagttttaatgaagtcaaatattgccttgtatatccatgtcttgatacatatgttg

SEQ ID NO: 8482 - DNA, 1032 bp, Glycine max
  Gm_smallRNAprecursor_1315
atgatagtcaaaaaaagataaatcaagataagaaaccaaatcattcatgagtctcactcaaggtgttgtcttccaaaacttgaattatagcttccctggttctcttggtgattcttgagtgacaatttttgtaaccatgtcctaaagtcgtgcaatgtacctctaccatctctaacctttatgagagattttttcagccaatatgtcaatactatttcacgttgtcaccataatgagcaccaagtatatcttcaacatttatcaacgcacaaatgtcaagcaaagcactatcaatgcatatcctttgaagcaacaagcaatgtcaagaaaagcaatataagtccatattctttgaagcaacaagcaatgtcaagaaaagcactcttctcttcttcttccaatgcatcaaagcttagtttaagtatctctaggatttgaatagtaagaatttgtttatattgtttgatgacagattttggttcttcttgtattttttccaaacaagttggaacctattacttccaaagccaatggaagtaattgctcgagcttgtcaacatcatctagaatcaagagaaccttctttcgctggagtctatgttgtatcattgaaactccttgttgctcacttgctaacttaattttcttctttccaagtatatatgaaagaaggatgctttggaaatgttgtagctcatgtttgtttgatttttcttacattttgaagaaaacatgaactatcaaaacagttagcaattaaattacagacagagcaagtgttgttttccctattccacccataccatggatccctgtcatgtggtggacaccatcatcagatccaacgtccaaaagcttcattacttttgacacttgtgactctagtccaaccaaataatccgcaacatgtaaacaagtgggattaatcttgcagcagacctgctcaaccatcctcccaatgaactcatattcatgtgcatatctgtttaaaacaaaaaagttttaatgaagtcaaatattgccttgtatatc

SEQ ID NO: 8483 - DNA, 1064 bp, Glycine max
  Gm_smallRNAprecursor_1316
atgatagtcaaaaaaagataaatcaagataagaaaccaaatcattcatgagtctcactcaaggtgttgtcttccaaaacttgaattatagcttccctggttctcttggtgattcttgagtgacaatttttgtaaccatgtcctaaagtcgtgcaatgtacctctaccatctctaacctttatgagagattttttcagccaatatgtcaatactatttcacgttgtcaccataatgagcaccaagtatatcttcaacatttatcaacgcacaaatgtcaagcaaagcactatcaatgcatatcctttgaagcaacaagcaatgtcaagaaaagcaatataagtccatattctttgaagcaacaagcaatgtcaagaaaagcactcttctcttcttcttccaatgcatcaaagcttagtttaagtatctctaggatttgaatagtaagaatttgtttatattgtttgatgacagattttggttcttcttgtattttttccaaacaagttggaacctattacttccaaagccaatggaagtaattgctcgagcttgtcaacatcatctagaatcaagagaaccttctttcgctggagtctatgttgtatcattgaaactccttgttgctcacttgctaacttaattttcttctttccaagtatatatgaaagaaggatgctttggaaatgttgtagctcatgtttgtttgatttttcttacattttgaagaaaacatgaactatcaaaacagttagcaattaaattacagacagagcaagtgttgttttccctattccacccataccatggatccctgtcatgtggtggacaccatcatcagatccaacgtccaaaagcttcattacttttgacacttgtgactctagtccaaccaaataatccgcaacatgtaaacaagtgggattaatcttgcagcagacctgctcaaccatcctcccaatgaactcatattcatgtgcatatctgtttaaaacaaaaaagttttaatgaagtcaaatattgccttgtatatccatgtcttgatacatatgttgtcaaggttaac

SEQ ID NO: 8484 - DNA, 1116 bp, Glycine max
  Gm_smallRNAprecursor_1317
tagtcaaaaaaagataaatcaagataagaaaccaaatcattcatgagtctcactcaaggtgttgtcttccaaaacttgaattatagcttccctggttctcttggtgattcttgagtgacaatttttgtaaccatgtcctaaagtcgtgcaatgtacctctaccatctctaacctttatgagagattttttcagccaatatgtcaatactatttcacgttgtcaccataatgagcaccaagtatatcttcaacatttatcaacgcacaaatgtcaagcaaagcactatcaatgcatatcctttgaagcaacaagcaatgtcaagaaaagcaatataagtccatattctttgaagcaacaagcaatgtcaagaaaagcactcttctcttcttcttccaatgcatcaaagcttagtttaagtatctctaggatttgaatagtaagaatttgtttatattgtttgatgacagattttggttcttcttgtattttttccaaacaagttggaacctattacttccaaagccaatggaagtaattgctcgagcttgtcaacatcatctagaatcaagagaaccttctttcgctggagtctatgttgtatcattgaaactccttgttgctcacttgctaacttaattttcttctttccaagtatatatgaaagaaggatgctttggaaatgttgtagctcatgtttgtttgatttttcttacattttgaagaaaacatgaactatcaaaacagttagcaattaaattacagacagagcaagtgttgttttccctattccacccataccatggatccctgtcatgtggtggacaccatcatcagatccaacgtccaaaagcttcattacttttgacacttgtgactctagtccaaccaaataatccgcaacatgtaaacaagtgggattaatcttgcagcagacctgctcaaccatcctcccaatgaactcatattcatgtgcatatctgtttaaaacaaaaaagttttaatgaagtcaaatattgccttgtatatccatgtcttgatacatatgttgtcaaggttaacaaacatttctttttccctttatattttaacctcaaaccttatgagaaataataagg

SEQ ID NO: 8485 - DNA, 1116 bp, Glycine max; identical to SEQ ID NO: 8484
  Gm_smallRNAprecursor_1318

SEQ ID NO: 8486 - DNA, 1173 bp, Glycine max
  Gm_smallRNAprecursor_1319
tagtcaaaaaaagataaatcaagataagaaaccaaatcattcatgagtctcactcaaggtgttgtcttccaaaacttgaattatagcttccctggttctcttggtgattcttgagtgacaatttttgtaaccatgtcctaaagtcgtgcaatgtacctctaccatctctaacctttatgagagattttttcagccaatatgtcaatactatttcacgttgtcaccataatgagcaccaagtatatcttcaacatttatcaacgcacaaatgtcaagcaaagcactatcaatgcatatcctttgaagcaacaagcaatgtcaagaaaagcaatataagtccatattctttgaagcaacaagcaatgtcaagaaaagcactcttctcttcttcttccaatgcatcaaagcttagtttaagtatctctaggatttgaatagtaagaatttgtttatattgtttgatgacagattttggttcttcttgtattttttccaaacaagttggaacctattacttccaaagccaatggaagtaattgctcgagcttgtcaacatcatctagaatcaagagaaccttctttcgctggagtctatgttgtatcattgaaactccttgttgctcacttgctaacttaattttcttctttccaagtatatatgaaagaaggatgctttggaaatgttgtagctcatgtttgtttgatttttcttacattttgaagaaaacatgaactatcaaaacagttagcaattaaattacagacagagcaagtgttgttttccctattccacccataccatggatccctgtcatgtggtggacaccatcatcagatccaacgtccaaaagcttcattacttttgacacttgtgactctagtccaaccaaataatccgcaacatgtaaacaagtgggattaatcttgcagcagacctgctcaaccatcctcccaatgaactcatattcatgtgcatatctgtttaaaacaaaaaagttttaatgaagtcaaatattgccttgtatatccatgtcttgatacatatgttgtcaaggttaacaaacatttctttttccctttatattttaacctcaaaccttatgagaaataataaggtgatcccggacctccttctaatatttacataacatataatcgtgttattaattattt

SEQ ID NO: 8487 - DNA, 1042 bp, Glycine max
  Gm_smallRNAprecursor_1320
aaaaagataaatcaagataagaaaccaaatcattcatgagtctcactcaaggtgttgtcttccaaaacttgaattatagcttccctggttctcttggtgattcttgagtgacaatttttgtaaccatgtcctaaagtcgtgcaatgtacctctaccatctctaacctttatgagagattttttcagccaatatgtcaatactatttcacgttgtcaccataatgagcaccaagtatatcttcaacatttatcaacgcacaaatgtcaagcaaagcactatcaatgcatatcctttgaagcaacaagcaatgtcaagaaaagcaatataagtccatattctttgaagcaacaagcaatgtcaagaaaagcactcttctcttcttcttccaatgcatcaaagcttagtttaagtatctctaggatttgaatagtaagaatttgtttatattgtttgatgacagattttggttcttcttgtattttttccaaacaagttggaacctattacttccaaagccaatggaagtaattgctcgagcttgtcaacatcatctagaatcaagagaaccttctttcgctggagtctatgttgtatcattgaaactccttgttgctcacttgctaacttaattttcttctttccaagtatatatgaaagaaggatgctttggaaatgttgtagctcatgtttgtttgatttttcttacattttgaagaaaacatgaactatcaaaacagttagcaattaaattacagacagagcaagtgttgttttccctattccacccataccatggatccctgtcatgtggtggacaccatcatcagatccaacgtccaaaagcttcattacttttgacacttgtgactctagtccaaccaaataatccgcaacatgtaaacaagtgggattaatcttgcagcagacctgctcaaccatcctcccaatgaactcatattcatgtgcatatctgtttaaaacaaaaaagttttaatgaagtcaaatattgccttgtatatccatgtcttgatacatatgttg

SEQ ID NO: 8488 - DNA, 1161 bp, Glycine max
  Gm_smallRNAprecursor_1321
aaaaagataaatcaagataagaaaccaaatcattcatgagtctcactcaaggtgttgtcttccaaaacttgaattatagcttccctggttctcttggtgattcttgagtgacaatttttgtaaccatgtcctaaagtcgtgcaatgtacctctaccatctctaacctttatgagagattttttcagccaatatgtcaatactatttcacgttgtcaccataatgagcaccaagtatatcttcaacatttatcaacgcacaaatgtcaagcaaagcactatcaatgcatatcctttgaagcaacaagcaatgtcaagaaaagcaatataagtccatattctttgaagcaacaagcaatgtcaagaaaagcactcttctcttcttcttccaatgcatcaaagcttagtttaagtatctctaggatttgaatagtaagaatttgtttatattgtttgatgacagattttggttcttcttgtattttttccaaacaagttggaacctattacttccaaagccaatggaagtaattgctcgagcttgtcaacatcatctagaatcaagagaaccttctttcgctggagtctatgttgtatcattgaaactccttgttgctcacttgctaacttaattttcttctttccaagtatatatgaaagaaggatgctttggaaatgttgtagctcatgtttgtttgatttttcttacattttgaagaaaacatgaactatcaaaacagttagcaattaaattacagacagagcaagtgttgttttccctattccacccataccatggatccctgtcatgtggtggacaccatcatcagatccaacgtccaaaagcttcattacttttgacacttgtgactctagtccaaccaaataatccgcaacatgtaaacaagtgggattaatcttgcagcagacctgctcaaccatcctcccaatgaactcatattcatgtgcatatctgtttaaaacaaaaaagttttaatgaagtcaaatattgccttgtatatccatgtcttgatacatatgttgtcaaggttaacaaacatttctttttccctttatattttaacctcaaaccttatgagaaataataaggtgatcccggacctccttctaatatttacataacatataatcgtgttattaat

SEQ ID NO: 8489 - DNA, 1038 bp, Glycine max
  Gm_smallRNAprecursor_1322
aagataaatcaagataagaaaccaaatcattcatgagtctcactcaaggtgttgtcttccaaaacttgaattatagcttccctggttctcttggtgattcttgagtgacaatttttgtaaccatgtcctaaagtcgtgcaatgtacctctaccatctctaacctttatgagagattttttcagccaatatgtcaatactatttcacgttgtcaccataatgagcaccaagtatatcttcaacatttatcaacgcacaaatgtcaagcaaagcactatcaatgcatatcctttgaagcaacaagcaatgtcaagaaaagcaatataagtccatattctttgaagcaacaagcaatgtcaagaaaagcactcttctcttcttcttccaatgcatcaaagcttagtttaagtatctctaggatttgaatagtaagaatttgtttatattgtttgatgacagattttggttcttcttgtattttttccaaacaagttggaacctattacttccaaagccaatggaagtaattgctcgagcttgtcaacatcatctagaatcaagagaaccttctttcgctggagtctatgttgtatcattgaaactccttgttgctcacttgctaacttaattttcttctttccaagtatatatgaaagaaggatgctttggaaatgttgtagctcatgtttgtttgatttttcttacattttgaagaaaacatgaactatcaaaacagttagcaattaaattacagacagagcaagtgttgttttccctattccacccataccatggatccctgtcatgtggtggacaccatcatcagatccaacgtccaaaagcttcattacttttgacacttgtgactctagtccaaccaaataatccgcaacatgtaaacaagtgggattaatcttgcagcagacctgctcaaccatcctcccaatgaactcatattcatgtgcatatctgtttaaaacaaaaaagttttaatgaagtcaaatattgccttgtatatccatgtcttgatacatatgtt

SEQ ID NO: 8490 - DNA, 1168 bp, Glycine max
  Gm_smallRNAprecursor_1323
taaatcaagataagaaaccaaatcattcatgagtctcactcaaggtgttgtcttccaaaacttgaattatagcttccctggttctcttggtgattcttgagtgacaatttttgtaaccatgtcctaaagtcgtgcaatgtacctctaccatctctaacctttatgagagattttttcagccaatatgtcaatactatttcacgttgtcaccataatgagcaccaagtatatcttcaacatttatcaacgcacaaatgtcaagcaaagcactatcaatgcatatcctttgaagcaacaagcaatgtcaagaaaagcaatataagtccatattctttgaagcaacaagcaatgtcaagaaaagcactcttctcttcttcttccaatgcatcaaagcttagtttaagtatctctaggatttgaatagtaagaatttgtttatattgtttgatgacagattttggttcttcttgtattttttccaaacaagttggaacctattacttccaaagccaatggaagtaattgctcgagcttgtcaacatcatctagaatcaagagaaccttctttcgctggagtctatgttgtatcattgaaactccttgttgctcacttgctaacttaattttcttctttccaagtatatatgaaagaaggatgctttggaaatgttgtagctcatgtttgtttgatttttcttacattttgaagaaaacatgaactatcaaaacagttagcaattaaattacagacagagcaagtgttgttttccctattccacccataccatggatccctgtcatgtggtggacaccatcatcagatccaacgtccaaaagcttcattacttttgacacttgtgactctagtccaaccaaataatccgcaacatgtaaacaagtgggattaatcttgcagcagacctgctcaaccatcctcccaatgaactcatattcatgtgcatatctgtttaaaacaaaaaagttttaatgaagtcaaatattgccttgtatatccatgtcttgatacatatgttgtcaaggttaacaaacatttctttttccctttatattttaacctcaaaccttatgagaaataataaggtgatcccggacctccttctaatatttacataacatataatcgtgttattaattatttctcctaaat

SEQ ID NO: 8491 - DNA, 1034 bp, Glycine max
  Gm_smallRNAprecursor_1324
gaaaccaaatcattcatgagtctcactcaaggtgttgtcttccaaaacttgaattatagcttccctggttctcttggtgattcttgagtgacaatttttgtaaccatgtcctaaagtcgtgcaatgtacctctaccatctctaacctttatgagagattttttcagccaatatgtcaatactatttcacgttgtcaccataatgagcaccaagtatatcttcaacatttatcaacgcacaaatgtcaagcaaagcactatcaatgcatatcctttgaagcaacaagcaatgtcaagaaaagcaatataagtccatattctttgaagcaacaagcaatgtcaagaaaagcactcttctcttcttcttccaatgcatcaaagcttagtttaagtatctctaggatttgaatagtaagaatttgtttatattgtttgatgacagattttggttcttcttgtattttttccaaacaagttggaacctattacttccaaagccaatggaagtaattgctcgagcttgtcaacatcatctagaatcaagagaaccttctttcgctggagtctatgttgtatcattgaaactccttgttgctcacttgctaacttaattttcttctttccaagtatatatgaaagaaggatgctttggaaatgttgtagctcatgtttgtttgatttttcttacattttgaagaaaacatgaactatcaaaacagttagcaattaaattacagacagagcaagtgttgttttccctattccacccataccatggatccctgtcatgtggtggacaccatcatcagatccaacgtccaaaagcttcattacttttgacacttgtgactctagtccaaccaaataatccgcaacatgtaaacaagtgggattaatcttgcagcagacctgctcaaccatcctcccaatgaactcatattcatgtgcatatctgtttaaaacaaaaaagttttaatgaagtcaaatattgccttgtatatccatgtcttgatacatatgttgtcaaggttaaca

SEQ ID NO: 8492 - DNA, 1141 bp, Glycine max
  Gm_smallRNAprecursor_1325
gaaaccaaatcattcatgagtctcactcaaggtgttgtcttccaaaacttgaattatagcttccctggttctcttggtgattcttgagtgacaatttttgtaaccatgtcctaaagtcgtgcaatgtacctctaccatctctaacctttatgagagattttttcagccaatatgtcaatactatttcacgttgtcaccataatgagcaccaagtatatcttcaacatttatcaacgcacaaatgtcaagcaaagcactatcaatgcatatcctttgaagcaacaagcaatgtcaagaaaagcaatataagtccatattctttgaagcaacaagcaatgtcaagaaaagcactcttctcttcttcttccaatgcatcaaagcttagtttaagtatctctaggatttgaatagtaagaatttgtttatattgtttgatgacagattttggttcttcttgtattttttccaaacaagttggaacctattacttccaaagccaatggaagtaattgctcgagcttgtcaacatcatctagaatcaagagaaccttctttcgctggagtctatgttgtatcattgaaactccttgttgctcacttgctaacttaattttcttctttccaagtatatatgaaagaaggatgctttggaaatgttgtagctcatgtttgtttgatttttcttacattttgaagaaaacatgaactatcaaaacagttagcaattaaattacagacagagcaagtgttgttttccctattccacccataccatggatccctgtcatgtggtggacaccatcatcagatccaacgtccaaaagcttcattacttttgacacttgtgactctagtccaaccaaataatccgcaacatgtaaacaagtgggattaatcttgcagcagacctgctcaaccatcctcccaatgaactcatattcatgtgcatatctgtttaaaacaaaaaagttttaatgaagtcaaatattgccttgtatatccatgtcttgatacatatgttgtcaaggttaacaaacatttctttttccctttatattttaacctcaaaccttatgagaaataataaggtgatcccggacctccttctaatatttacataacatataatcgtgttattaat

SEQ ID NO: 8493 - DNA, 1053 bp, Glycine max
  Gm_smallRNAprecursor_1326
tctcactcaaggtgttgtcttccaaaacttgaattatagcttccctggttctcttggtgattcttgagtgacaatttttgtaaccatgtcctaaagtcgtgcaatgtacctctaccatctctaacctttatgagagattttttcagccaatatgtcaatactatttcacgttgtcaccataatgagcaccaagtatatcttcaacatttatcaacgcacaaatgtcaagcaaagcactatcaatgcatatcctttgaagcaacaagcaatgtcaagaaaagcaatataagtccatattctttgaagcaacaagcaatgtcaagaaaagcactcttctcttcttcttccaatgcatcaaagcttagtttaagtatctctaggatttgaatagtaagaatttgtttatattgtttgatgacagattttggttcttcttgtattttttccaaacaagttggaacctattacttccaaagccaatggaagtaattgctcgagcttgtcaacatcatctagaatcaagagaaccttctttcgctggagtctatgttgtatcattgaaactccttgttgctcacttgctaacttaattttcttctttccaagtatatatgaaagaaggatgctttggaaatgttgtagctcatgtttgtttgatttttcttacattttgaagaaaacatgaactatcaaaacagttagcaattaaattacagacagagcaagtgttgttttccctattccacccataccatggatccctgtcatgtggtggacaccatcatcagatccaacgtccaaaagcttcattacttttgacacttgtgactctagtccaaccaaataatccgcaacatgtaaacaagtgggattaatcttgcagcagacctgctcaaccatcctcccaatgaactcatattcatgtgcatatctgtttaaaacaaaaaagttttaatgaagtcaaatattgccttgtatatccatgtcttgatacatatgttgtcaaggttaacaaacatttctttttccctttatattttaacctcaaacctt

SEQ ID NO: 8494 - DNA, 1121 bp, Glycine max
  Gm_smallRNAprecursor_1327
tctcactcaaggtgttgtcttccaaaacttgaattatagcttccctggttctcttggtgattcttgagtgacaatttttgtaaccatgtcctaaagtcgtgcaatgtacctctaccatctctaacctttatgagagattttttcagccaatatgtcaatactatttcacgttgtcaccataatgagcaccaagtatatcttcaacatttatcaacgcacaaatgtcaagcaaagcactatcaatgcatatcctttgaagcaacaagcaatgtcaagaaaagcaatataagtccatattctttgaagcaacaagcaatgtcaagaaaagcactcttctcttcttcttccaatgcatcaaagcttagtttaagtatctctaggatttgaatagtaagaatttgtttatattgtttgatgacagattttggttcttcttgtattttttccaaacaagttggaacctattacttccaaagccaatggaagtaattgctcgagcttgtcaacatcatctagaatcaagagaaccttctttcgctggagtctatgttgtatcattgaaactccttgttgctcacttgctaacttaattttcttctttccaagtatatatgaaagaaggatgctttggaaatgttgtagctcatgtttgtttgatttttcttacattttgaagaaaacatgaactatcaaaacagttagcaattaaattacagacagagcaagtgttgttttccctattccacccataccatggatccctgtcatgtggtggacaccatcatcagatccaacgtccaaaagcttcattacttttgacacttgtgactctagtccaaccaaataatccgcaacatgtaaacaagtgggattaatcttgcagcagacctgctcaaccatcctcccaatgaactcatattcatgtgcatatctgtttaaaacaaaaaagttttaatgaagtcaaatattgccttgtatatccatgtcttgatacatatgttgtcaaggttaacaaacatttctttttccctttatattttaacctcaaaccttatgagaaataataaggtgatcccggacctccttctaatatttacataacatataatcgtgttattaat

SEQ ID NO: 8495 - DNA, 1153 bp, Glycine max
  Gm_smallRNAprecursor_1328
tctcactcaaggtgttgtcttccaaaacttgaattatagcttccctggttctcttggtgattcttgagtgacaatttttgtaaccatgtcctaaagtcgtgcaatgtacctctaccatctctaacctttatgagagattttttcagccaatatgtcaatactatttcacgttgtcaccataatgagcaccaagtatatcttcaacatttatcaacgcacaaatgtcaagcaaagcactatcaatgcatatcctttgaagcaacaagcaatgtcaagaaaagcaatataagtccatattctttgaagcaacaagcaatgtcaagaaaagcactcttctcttcttcttccaatgcatcaaagcttagtttaagtatctctaggatttgaatagtaagaatttgtttatattgtttgatgacagattttggttcttcttgtattttttccaaacaagttggaacctattacttccaaagccaatggaagtaattgctcgagcttgtcaacatcatctagaatcaagagaaccttctttcgctggagtctatgttgtatcattgaaactccttgttgctcacttgctaacttaattttcttctttccaagtatatatgaaagaaggatgctttggaaatgttgtagctcatgtttgtttgatttttcttacattttgaagaaaacatgaactatcaaaacagttagcaattaaattacagacagagcaagtgttgttttccctattccacccataccatggatccctgtcatgtggtggacaccatcatcagatccaacgtccaaaagcttcattacttttgacacttgtgactctagtccaaccaaataatccgcaacatgtaaacaagtgggattaatcttgcagcagacctgctcaaccatcctcccaatgaactcatattcatgtgcatatctgtttaaaacaaaaaagttttaatgaagtcaaatattgccttgtatatccatgtcttgatacatatgttgtcaaggttaacaaacatttctttttccctttatattttaacctcaaaccttatgagaaataataaggtgatcccggacctccttctaatatttacataacatataatcgtgttattaattatttctcctaaattgtaaaaattaaatacat

SEQ ID NO: 8496 - DNA, 1052 bp, Glycine max
  Gm_smallRNAprecursor_1329
ctcactcaaggtgttgtcttccaaaacttgaattatagcttccctggttctcttggtgattcttgagtgacaatttttgtaaccatgtcctaaagtcgtgcaatgtacctctaccatctctaacctttatgagagattttttcagccaatatgtcaatactatttcacgttgtcaccataatgagcaccaagtatatcttcaacatttatcaacgcacaaatgtcaagcaaagcactatcaatgcatatcctttgaagcaacaagcaatgtcaagaaaagcaatataagtccatattctttgaagcaacaagcaatgtcaagaaaagcactcttctcttcttcttccaatgcatcaaagcttagtttaagtatctctaggatttgaatagtaagaatttgtttatattgtttgatgacagattttggttcttcttgtattttttccaaacaagttggaacctattacttccaaagccaatggaagtaattgctcgagcttgtcaacatcatctagaatcaagagaaccttctttcgctggagtctatgttgtatcattgaaactccttgttgctcacttgctaacttaattttcttctttccaagtatatatgaaagaaggatgctttggaaatgttgtagctcatgtttgtttgatttttcttacattttgaagaaaacatgaactatcaaaacagttagcaattaaattacagacagagcaagtgttgttttccctattccacccataccatggatccctgtcatgtggtggacaccatcatcagatccaacgtccaaaagcttcattacttttgacacttgtgactctagtccaaccaaataatccgcaacatgtaaacaagtgggattaatcttgcagcagacctgctcaaccatcctcccaatgaactcatattcatgtgcatatctgtttaaaacaaaaaagttttaatgaagtcaaatattgccttgtatatccatgtcttgatacatatgttgtcaaggttaacaaacatttctttttccctttatattttaacctcaaacctt

SEQ ID NO: 8497 - DNA, 1120 bp, Glycine max
  Gm_smallRNAprecursor_1330
ctcactcaaggtgttgtcttccaaaacttgaattatagcttccctggttctcttggtgattcttgagtgacaatttttgtaaccatgtcctaaagtcgtgcaatgtacctctaccatctctaacctttatgagagattttttcagccaatatgtcaatactatttcacgttgtcaccataatgagcaccaagtatatcttcaacatttatcaacgcacaaatgtcaagcaaagcactatcaatgcatatcctttgaagcaacaagcaatgtcaagaaaagcaatataagtccatattctttgaagcaacaagcaatgtcaagaaaagcactcttctcttcttcttccaatgcatcaaagcttagtttaagtatctctaggatttgaatagtaagaatttgtttatattgtttgatgacagattttggttcttcttgtattttttccaaacaagttggaacctattacttccaaagccaatggaagtaattgctcgagcttgtcaacatcatctagaatcaagagaaccttctttcgctggagtctatgttgtatcattgaaactccttgttgctcacttgctaacttaattttcttctttccaagtatatatgaaagaaggatgctttggaaatgttgtagctcatgtttgtttgatttttcttacattttgaagaaaacatgaactatcaaaacagttagcaattaaattacagacagagcaagtgttgttttccctattccacccataccatggatccctgtcatgtggtggacaccatcatcagatccaacgtccaaaagcttcattacttttgacacttgtgactctagtccaaccaaataatccgcaacatgtaaacaagtgggattaatcttgcagcagacctgctcaaccatcctcccaatgaactcatattcatgtgcatatctgtttaaaacaaaaaagttttaatgaagtcaaatattgccttgtatatccatgtcttgatacatatgttgtcaaggttaacaaacatttctttttccctttatattttaacctcaaaccttatgagaaataataaggtgatcccggacctccttctaatatttacataacatataatcgtgttattaat

SEQ ID NO: 8498 - DNA, 1152 bp, Glycine max
  Gm_smallRNAprecursor_1331
ctcactcaaggtgttgtcttccaaaacttgaattatagcttccctggttctcttggtgattcttgagtgacaatttttgtaaccatgtcctaaagtcgtgcaatgtacctctaccatctctaacctttatgagagattttttcagccaatatgtcaatactatttcacgttgtcaccataatgagcaccaagtatatcttcaacatttatcaacgcacaaatgtcaagcaaagcactatcaatgcatatcctttgaagcaacaagcaatgtcaagaaaagcaatataagtccatattctttgaagcaacaagcaatgtcaagaaaagcactcttctcttcttcttccaatgcatcaaagcttagtttaagtatctctaggatttgaatagtaagaatttgtttatattgtttgatgacagattttggttcttcttgtattttttccaaacaagttggaacctattacttccaaagccaatggaagtaattgctcgagcttgtcaacatcatctagaatcaagagaaccttctttcgctggagtctatgttgtatcattgaaactccttgttgctcacttgctaacttaattttcttctttccaagtatatatgaaagaaggatgctttggaaatgttgtagctcatgtttgtttgatttttcttacattttgaagaaaacatgaactatcaaaacagttagcaattaaattacagacagagcaagtgttgttttccctattccacccataccatggatccctgtcatgtggtggacaccatcatcagatccaacgtccaaaagcttcattacttttgacacttgtgactctagtccaaccaaataatccgcaacatgtaaacaagtgggattaatcttgcagcagacctgctcaaccatcctcccaatgaactcatattcatgtgcatatctgtttaaaacaaaaaagttttaatgaagtcaaatattgccttgtatatccatgtcttgatacatatgttgtcaaggttaacaaacatttctttttccctttatattttaacctcaaaccttatgagaaataataaggtgatcccggacctccttctaatatttacataacatataatcgtgttattaattatttctcctaaattgtaaaaattaaatacat

SEQ ID NO: 8499 - DNA, 1154 bp, Glycine max
  Gm_smallRNAprecursor_1332
cttggtgattcttgagtgacaatttttgtaaccatgtcctaaagtcgtgcaatgtacctctaccatctctaacctttatgagagattttttcagccaatatgtcaatactatttcacgttgtcaccataatgagcaccaagtatatcttcaacatttatcaacgcacaaatgtcaagcaaagcactatcaatgcatatcctttgaagcaacaagcaatgtcaagaaaagcaatataagtccatattctttgaagcaacaagcaatgtcaagaaaagcactcttctcttcttcttccaatgcatcaaagcttagtttaagtatctctaggatttgaatagtaagaatttgtttatattgtttgatgacagattttggttcttcttgtattttttccaaacaagttggaacctattacttccaaagccaatggaagtaattgctcgagcttgtcaacatcatctagaatcaagagaaccttctttcgctggagtctatgttgtatcattgaaactccttgttgctcacttgctaacttaattttcttctttccaagtatatatgaaagaaggatgctttggaaatgttgtagctcatgtttgtttgatttttcttacattttgaagaaaacatgaactatcaaaacagttagcaattaaattacagacagagcaagtgttgttttccctattccacccataccatggatccctgtcatgtggtggacaccatcatcagatccaacgtccaaaagcttcattacttttgacacttgtgactctagtccaaccaaataatccgcaacatgtaaacaagtgggattaatcttgcagcagacctgctcaaccatcctcccaatgaactcatattcatgtgcatatctgtttaaaacaaaaaagttttaatgaagtcaaatattgccttgtatatccatgtcttgatacatatgttgtcaaggttaacaaacatttctttttccctttatattttaacctcaaaccttatgagaaataataaggtgatcccggacctccttctaatatttacataacatataatcgtgttattaattatttctcctaaattgtaaaaattaaatacatttatataaacattcatcaagaccatgaccaaacggtggtccaaaactatctaa

SEQ ID NO: 8500 - DNA, 1119 bp, Glycine max
  Gm_smallRNAprecursor_1333
tggtgattcttgagtgacaatttttgtaaccatgtcctaaagtcgtgcaatgtacctctaccatctctaacctttatgagagattttttcagccaatatgtcaatactatttcacgttgtcaccataatgagcaccaagtatatcttcaacatttatcaacgcacaaatgtcaagcaaagcactatcaatgcatatcctttgaagcaacaagcaatgtcaagaaaagcaatataagtccatattctttgaagcaacaagcaatgtcaagaaaagcactcttctcttcttcttccaatgcatcaaagcttagtttaagtatctctaggatttgaatagtaagaatttgtttatattgtttgatgacagattttggttcttcttgtattttttccaaacaagttggaacctattacttccaaagccaatggaagtaattgctcgagcttgtcaacatcatctagaatcaagagaaccttctttcgctggagtctatgttgtatcattgaaactccttgttgctcacttgctaacttaattttcttctttccaagtatatatgaaagaaggatgctttggaaatgttgtagctcatgtttgtttgatttttcttacattttgaagaaaacatgaactatcaaaacagttagcaattaaattacagacagagcaagtgttgttttccctattccacccataccatggatccctgtcatgtggtggacaccatcatcagatccaacgtccaaaagcttcattacttttgacacttgtgactctagtccaaccaaataatccgcaacatgtaaacaagtgggattaatcttgcagcagacctgctcaaccatcctcccaatgaactcatattcatgtgcatatctgtttaaaacaaaaaagttttaatgaagtcaaatattgccttgtatatccatgtcttgatacatatgttgtcaaggttaacaaacatttctttttccctttatattttaacctcaaaccttatgagaaataataaggtgatcccggacctccttctaatatttacataacatataatcgtgttattaattatttctcctaaattgtaaaaattaaatacatttatataaacattcatcaag

SEQ ID NO: 8501 - DNA, 1137 bp, Glycine max
  Gm_smallRNAprecursor_1334
tgacaatttttgtaaccatgtcctaaagtcgtgcaatgtacctctaccatctctaacctttatgagagattttttcagccaatatgtcaatactatttcacgttgtcaccataatgagcaccaagtatatcttcaacatttatcaacgcacaaatgtcaagcaaagcactatcaatgcatatcctttgaagcaacaagcaatgtcaagaaaagcaatataagtccatattctttgaagcaacaagcaatgtcaagaaaagcactcttctcttcttcttccaatgcatcaaagcttagtttaagtatctctaggatttgaatagtaagaatttgtttatattgtttgatgacagattttggttcttcttgtattttttccaaacaagttggaacctattacttccaaagccaatggaagtaattgctcgagcttgtcaacatcatctagaatcaagagaaccttctttcgctggagtctatgttgtatcattgaaactccttgttgctcacttgctaacttaattttcttctttccaagtatatatgaaagaaggatgctttggaaatgttgtagctcatgtttgtttgatttttcttacattttgaagaaaacatgaactatcaaaacagttagcaattaaattacagacagagcaagtgttgttttccctattccacccataccatggatccctgtcatgtggtggacaccatcatcagatccaacgtccaaaagcttcattacttttgacacttgtgactctagtccaaccaaataatccgcaacatgtaaacaagtgggattaatcttgcagcagacctgctcaaccatcctcccaatgaactcatattcatgtgcatatctgtttaaaacaaaaaagttttaatgaagtcaaatattgccttgtatatccatgtcttgatacatatgttgtcaaggttaacaaacatttctttttccctttatattttaacctcaaaccttatgagaaataataaggtgatcccggacctccttctaatatttacataacatataatcgtgttattaattatttctcctaaattgtaaaaattaaatacatttatataaacattcatcaagaccatgaccaaacggtggtccaaaactatcta

SEQ ID NO: 8502 - DNA, 1137 bp, Glycine max; identical to SEQ ID NO: 8501
  Gm_smallRNAprecursor_1335

SEQ ID NO: 8503 - DNA, 1138 bp, Glycine max
  Gm_smallRNAprecursor_1336
tgacaatttttgtaaccatgtcctaaagtcgtgcaatgtacctctaccatctctaacctttatgagagattttttcagccaatatgtcaatactatttcacgttgtcaccataatgagcaccaagtatatcttcaacatttatcaacgcacaaatgtcaagcaaagcactatcaatgcatatcctttgaagcaacaagcaatgtcaagaaaagcaatataagtccatattctttgaagcaacaagcaatgtcaagaaaagcactcttctcttcttcttccaatgcatcaaagcttagtttaagtatctctaggatttgaatagtaagaatttgtttatattgtttgatgacagattttggttcttcttgtattttttccaaacaagttggaacctattacttccaaagccaatggaagtaattgctcgagcttgtcaacatcatctagaatcaagagaaccttctttcgctggagtctatgttgtatcattgaaactccttgttgctcacttgctaacttaattttcttctttccaagtatatatgaaagaaggatgctttggaaatgttgtagctcatgtttgtttgatttttcttacattttgaagaaaacatgaactatcaaaacagttagcaattaaattacagacagagcaagtgttgttttccctattccacccataccatggatccctgtcatgtggtggacaccatcatcagatccaacgtccaaaagcttcattacttttgacacttgtgactctagtccaaccaaataatccgcaacatgtaaacaagtgggattaatcttgcagcagacctgctcaaccatcctcccaatgaactcatattcatgtgcatatctgtttaaaacaaaaaagttttaatgaagtcaaatattgccttgtatatccatgtcttgatacatatgttgtcaaggttaacaaacatttctttttccctttatattttaacctcaaaccttatgagaaataataaggtgatcccggacctccttctaatatttacataacatataatcgtgttattaattatttctcctaaattgtaaaaattaaatacatttatataaacattcatcaagaccatgaccaaacggtggtccaaaactatctaa

SEQ ID NO: 8504 - DNA, 1080 bp, Glycine max
  Gm_smallRNAprecursor_1337
ctttatgagagattttttcagccaatatgtcaatactatttcacgttgtcaccataatgagcaccaagtatatcttcaacatttatcaacgcacaaatgtcaagcaaagcactatcaatgcatatcctttgaagcaacaagcaatgtcaagaaaagcaatataagtccatattctttgaagcaacaagcaatgtcaagaaaagcactcttctcttcttcttccaatgcatcaaagcttagtttaagtatctctaggatttgaatagtaagaatttgtttatattgtttgatgacagattttggttcttcttgtattttttccaaacaagttggaacctattacttccaaagccaatggaagtaattgctcgagcttgtcaacatcatctagaatcaagagaaccttctttcgctggagtctatgttgtatcattgaaactccttgttgctcacttgctaacttaattttcttctttccaagtatatatgaaagaaggatgctttggaaatgttgtagctcatgtttgtttgatttttcttacattttgaagaaaacatgaactatcaaaacagttagcaattaaattacagacagagcaagtgttgttttccctattccacccataccatggatccctgtcatgtggtggacaccatcatcagatccaacgtccaaaagcttcattacttttgacacttgtgactctagtccaaccaaataatccgcaacatgtaaacaagtgggattaatcttgcagcagacctgctcaaccatcctcccaatgaactcatattcatgtgcatatctgtttaaaacaaaaaagttttaatgaagtcaaatattgccttgtatatccatgtcttgatacatatgttgtcaaggttaacaaacatttctttttccctttatattttaacctcaaaccttatgagaaataataaggtgatcccggacctccttctaatatttacataacatataatcgtgttattaattatttctcctaaattgtaaaaattaaatacatttatataaacattcatcaagaccatgaccaaacggtggtccaaaactatcta

SEQ ID NO: 8505 - DNA, 1039 bp, Glycine max
  Gm_smallRNAprecursor_1338
agattttttcagccaatatgtcaatactatttcacgttgtcaccataatgagcaccaagtatatcttcaacatttatcaacgcacaaatgtcaagcaaagcactatcaatgcatatcctttgaagcaacaagcaatgtcaagaaaagcaatataagtccatattctttgaagcaacaagcaatgtcaagaaaagcactcttctcttcttcttccaatgcatcaaagcttagtttaagtatctctaggatttgaatagtaagaatttgtttatattgtttgatgacagattttggttcttcttgtattttttccaaacaagttggaacctattacttccaaagccaatggaagtaattgctcgagcttgtcaacatcatctagaatcaagagaaccttctttcgctggagtctatgttgtatcattgaaactccttgttgctcacttgctaacttaattttcttctttccaagtatatatgaaagaaggatgctttggaaatgttgtagctcatgtttgtttgatttttcttacattttgaagaaaacatgaactatcaaaacagttagcaattaaattacagacagagcaagtgttgttttccctattccacccataccatggatccctgtcatgtggtggacaccatcatcagatccaacgtccaaaagcttcattacttttgacacttgtgactctagtccaaccaaataatccgcaacatgtaaacaagtgggattaatcttgcagcagacctgctcaaccatcctcccaatgaactcatattcatgtgcatatctgtttaaaacaaaaaagttttaatgaagtcaaatattgccttgtatatccatgtcttgatacatatgttgtcaaggttaacaaacatttctttttccctttatattttaacctcaaaccttatgagaaataataaggtgatcccggacctccttctaatatttacataacatataatcgtgttattaattatttctcctaaattgtaaaaattaaatacatttatataaacattcatcaag

SEQ ID NO: 8506 - DNA, 1176 bp, Glycine max
  Gm_smallRNAprecursor_1339
tttcacgttgtcaccataatgagcaccaagtatatcttcaacatttatcaacgcacaaatgtcaagcaaagcactatcaatgcatatcctttgaagcaacaagcaatgtcaagaaaagcaatataagtccatattctttgaagcaacaagcaatgtcaagaaaagcactcttctcttcttcttccaatgcatcaaagcttagtttaagtatctctaggatttgaatagtaagaatttgtttatattgtttgatgacagattttggttcttcttgtattttttccaaacaagttggaacctattacttccaaagccaatggaagtaattgctcgagcttgtcaacatcatctagaatcaagagaaccttctttcgctggagtctatgttgtatcattgaaactccttgttgctcacttgctaacttaattttcttctttccaagtatatatgaaagaaggatgctttggaaatgttgtagctcatgtttgtttgatttttcttacattttgaagaaaacatgaactatcaaaacagttagcaattaaattacagacagagcaagtgttgttttccctattccacccataccatggatccctgtcatgtggtggacaccatcatcagatccaacgtccaaaagcttcattacttttgacacttgtgactctagtccaaccaaataatccgcaacatgtaaacaagtgggattaatcttgcagcagacctgctcaaccatcctcccaatgaactcatattcatgtgcatatctgtttaaaacaaaaaagttttaatgaagtcaaatattgccttgtatatccatgtcttgatacatatgttgtcaaggttaacaaacatttctttttccctttatattttaacctcaaaccttatgagaaataataaggtgatcccggacctccttctaatatttacataacatataatcgtgttattaattatttctcctaaattgtaaaaattaaatacatttatataaacattcatcaagaccatgaccaaacggtggtccaaaactatctaataatttctcaattaaacaagtgaaacttaatccaacaaaaattactaagtaaataagattggtaaggtgggtacccatctttgaaatgatagccagacaagttagctgcttgataaaaaggcatcttccattt

SEQ ID NO: 8507 - DNA, 1071 bp, Glycine max
  Gm_smallRNAprecursor_1340
tcacttctatttcttgagtcccacccacgaacacgacgagctcaagagaagcggcgagtaccacgagccacgaccacgaggtccacgacgaacttgagagaagccgcgagtccgggtgagaatttcagaaatttcatggtgttagcttagtgctctaagtcttctttctgttgttgtgatgcatttgctttagtggctttgcctaaagcttcctgtaatcatgtcagaattgcctcttccatagtacaatcgaaattgatatttctggaactctggaaatagtttggtaaaatattgtttgaaaatagttagtactaataactgtcaagagaattaagactgaatggaaattaagttgacaaagatcagaagaaataatcagttaaggaacatgaggaacatgaagaaatgtgctgttcacagtgacatgagagtcaatgagtcatcacctgtaggctgtagcaacctatgaagcaccgacactctagccctttgtcatgtccggtgtccgacacgcgtccgtgtcagtgtccgacacccgtattacgttctatattttggacattacaggtgtccacgtgtccgtatccgtgtcatatctgttgtccgtgtcgatgtcgatatttcataggtagcaactctcattggtttcatcttttctactaatgtattaaaaactctagctaccttcagattcttggcaagtctctcaaagctttgttccctatgcaatgaataatatttacctcagaaataaagatatgttgaaccaaccctttccaacataattgttggtgctctgagaactttttgtagaatttcatcatgctaataattttaacaaatgcatttgaagagaggttctggaactgttctgtcatgcagcaaaacactaatataggaagacatatatataagtcaaatttggattagattctagattatgaaagtttgaatggtaaaatctttatatacattaattttttaagataaggatgaagaataaaagtgcttatggaagttattgatttagaaaagtgaggccaaaagaaaatgtcaggtaattgtcta

SEQ ID NO: 8508 - DNA, 1079 bp, Glycine max
  Gm_smallRNAprecursor_1341
atggcgtccctcccgcaccccacacacgcacccagccgcgtccctcccgcaccccacacacgcacccagccgcgacacccgcagccgcacgcgcacgcagccgcgacgagctccggtagcgacgcaccggcacaaacggcggcgacgagctccggctgcgacgagcttcgacagcgacgcacctgtcacgaacggcggcctgcagcgagaggttctcgcggagaagacgaagctgtcgcgaagaagaagaagacgtaggttttcttagttttatttttgctgtttgacaccccctgttttctgtctgcagctttttttttccttttgctatttgacacccctttttacttttaacagtcccatttttttttcgtatttgacaccacaattttttttttctgttcagtcctcttttaaatggctgagtttatttgaactctttaatgagtttatttggtgttggtacttgattattgtatgaactcatgaaacttttttagtttatttgaatgcaatcctttgtttttttcaatttcaatgagtttatatatatgttttttttttttttggtccgccatgacatccgccattttccgctacgccatccgccatatttttatggcggattttttactttccgccatgaaccgccatccgccattaacaacattgtgctcaacaaaccttccccattttagtatcataaggaaagcacacatactcctttagatgtaaaaatacacatcttatgattcaatgatatgcagtaatttaaaatatatatatatatatatatatatatatatatatatatatatatatatatataacctctccagacaaaaggaatataacaaacaactaaattatgagtaatttcccaagcaccttaagaagctttcgtagtattggaatttttttgaagtcatgcctgtactgcttcataatgttatgtaacatctgtaaacctggaaggcaacactataattacttttcaacacaaccaaatgtgcgatgagttttacacatttcagatatatagggggggaaactacattacatagaaagaaaatatgtat

SEQ ID NO: 8509 - DNA, 1033 bp, Glycine max
  Gm_smallRNAprecursor_1342
aaatattcgaacaatatttttactccattcaatgtcattctattttgtttcactccgcgacattccaatctaatccactccaatattgatttttgatgggaaaaatacgtattttccaatttcaaacgtcatgacgccaaatgatacagatctgagacactattggcatgcaatgtctctagcaagttctttcagaggtttttgcgtatgaaaggctaaatcaaattacaacccaatatcgtataatttaggcaaacgtcaaatttggtcccctaatttatcttcagttttggatttggtaccccagtaatttaatttacaaatttggtcctcctattttgtaaaatgttggtctcccaagtcacaattgaactttgaccgttaataagttaataagtgatgctgacgatcacgtgtcacgtttttattagatgatgactgctacgtgtcatgttctaattaatcaatgaaaacaacaattcatttcttttatggagttgacatccaatcagaacatgacacgtgacagtcatcatccaataagaacgtgacacgtgacagtcaacatcacttgttaacgatcaacgtccaattgtggcctaggggaccaacattgaacggttttacaaaatagggggaccaaattcaaaactagagataaattggagatcaaatttgtaattttgcctatattttatcctcaaattttttcacgccaacaacacggtgtcattatcggtgaatagaaactctagatcattccctacctctatcagtaaaaaagaaagaataaagtgtctactgcttataaataagtcaaaatactttacaaaacgtccaagtcagaacaaggaccagaggagaagagagacagaatctacactaaataattacataaacacgtcctccacttccaaaggaaacaggatgagtgctcaaaccaaatagacatgacaaacatttccaaactagtctctgtccatgaaagtagaaagactacagcttactactagataactttgtatgtgtttgt

SEQ ID NO: 8510 - DNA, 1082 bp, Glycine max
  Gm_smallRNAprecursor_1343
aatgttgttttaaaaaattgatggaaaaggtcgatgtcaataacaaagtcttgccccactaggcgggctttgaggaaaaacaatgatatttcaagtgatgtagttattaagactacacaatcgtagtacatagctaacaattactttgagcaagtttgtcattcgtaatatatgttaagcagctgttggattgcctgtttggataagtttatccaaaaacactcctaagagaagaaaataacaagaaaaacagaaaatgaacttttccataaattaaaattaatttatacataagttaaaaatcatcttttaatgaaactctgtgagagagtttctagaaatttacttacataagctaaatttagcttaggaagaaacttatttcatttttttcttcatattttctgctcttataagtgtttgtggagaagtttatccaaacagacactatttgagagcaaaaaggaactatattgtgagcattgtcaactatgaagcaccaacaccgacacggacaccggacacgacacggacacggacacgtggacacctgtaatgtccaaaatatagaacgtagtacgggtgtcgtgtcggtgtcggacactgacacggacgcgtgtcggataccggacacggcaatgggctggagtgtccgtgcttcatagattgtcaacaattttttgtagtgttctgagcttaaaagtagaaaaacgtgtcacatgctaaatactagtcataggtgcttatacagaaattacgagcaacaaacagatgcaacaagttacatgagtaagcatcaatattctgccaaaacctgcttctttgtaagctggccaagcaaaggatgatccaataaaatattgattctcgatataaataaaatgttgagcagatctgatcgcatgtatatatgctgtttgaatactcttgtctatgaccaaattttttgcacaaacaaggttctgcaatgaatgacaatcaaaaagaaattagcgagacagggaaatccaaagattctacttcgatgacatttatctaactatagagcaacccaatgttggatgagttacctgagtctcggc

SEQ ID NO: 8511 - DNA, 1082 bp, Glycine max; identical to SEQ ID NO: 8510
  Gm_smallRNAprecursor_1344

SEQ ID NO: 8512 - DNA, 1083 bp, Glycine max
  Gm_smallRNAprecursor_1345
aatgttgttttaaaaaattgatggaaaaggtcgatgtcaataacaaagtcttgccccactaggcgggctttgaggaaaaacaatgatatttcaagtgatgtagttattaagactacacaatcgtagtacatagctaacaattactttgagcaagtttgtcattcgtaatatatgttaagcagctgttggattgcctgtttggataagtttatccaaaaacactcctaagagaagaaaataacaagaaaaacagaaaatgaacttttccataaattaaaattaatttatacataagttaaaaatcatcttttaatgaaactctgtgagagagtttctagaaatttacttacataagctaaatttagcttaggaagaaacttatttcatttttttcttcatattttctgctcttataagtgtttgtggagaagtttatccaaacagacactatttgagagcaaaaaggaactatattgtgagcattgtcaactatgaagcaccaacaccgacacggacaccggacacgacacggacacggacacgtggacacctgtaatgtccaaaatatagaacgtagtacgggtgtcgtgtcggtgtcggacactgacacggacgcgtgtcggataccggacacggcaatgggctggagtgtccgtgcttcatagattgtcaacaattttttgtagtgttctgagcttaaaagtagaaaaacgtgtcacatgctaaatactagtcataggtgcttatacagaaattacgagcaacaaacagatgcaacaagttacatgagtaagcatcaatattctgccaaaacctgcttctttgtaagctggccaagcaaaggatgatccaataaaatattgattctcgatataaataaaatgttgagcagatctgatcgcatgtatatatgctgtttgaatactcttgtctatgaccaaattttttgcacaaacaaggttctgcaatgaatgacaatcaaaaagaaattagcgagacagggaaatccaaagattctacttcgatgacatttatctaactatagagcaacccaatgttggatgagttacctgagtctcggca

SEQ ID NO: 8513 - DNA, 1072 bp, Glycine max
  Gm_smallRNAprecursor_1346
ttgttttaaaaaattgatggaaaaggtcgatgtcaataacaaagtcttgccccactaggcgggctttgaggaaaaacaatgatatttcaagtgatgtagttattaagactacacaatcgtagtacatagctaacaattactttgagcaagtttgtcattcgtaatatatgttaagcagctgttggattgcctgtttggataagtttatccaaaaacactcctaagagaagaaaataacaagaaaaacagaaaatgaacttttccataaattaaaattaatttatacataagttaaaaatcatcttttaatgaaactctgtgagagagtttctagaaatttacttacataagctaaatttagcttaggaagaaacttatttcatttttttcttcatattttctgctcttataagtgtttgtggagaagtttatccaaacagacactatttgagagcaaaaaggaactatattgtgagcattgtcaactatgaagcaccaacaccgacacggacaccggacacgacacggacacggacacgtggacacctgtaatgtccaaaatatagaacgtagtacgggtgtcgtgtcggtgtcggacactgacacggacgcgtgtcggataccggacacggcaatgggctggagtgtccgtgcttcatagattgtcaacaattttttgtagtgttctgagcttaaaagtagaaaaacgtgtcacatgctaaatactagtcataggtgcttatacagaaattacgagcaacaaacagatgcaacaagttacatgagtaagcatcaatattctgccaaaacctgcttctttgtaagctggccaagcaaaggatgatccaataaaatattgattctcgatataaataaaatgttgagcagatctgatcgcatgtatatatgctgtttgaatactcttgtctatgaccaaattttttgcacaaacaaggttctgcaatgaatgacaatcaaaaagaaattagcgagacagggaaatccaaagattctacttcgatgacatttatctaactatagagcaacccaatgttggatgagttacctgagt

SEQ ID NO: 8514 - DNA, 1073 bp, Glycine max
  Gm_smallRNAprecursor_1347
ttgttttaaaaaattgatggaaaaggtcgatgtcaataacaaagtcttgccccactaggcgggctttgaggaaaaacaatgatatttcaagtgatgtagttattaagactacacaatcgtagtacatagctaacaattactttgagcaagtttgtcattcgtaatatatgttaagcagctgttggattgcctgtttggataagtttatccaaaaacactcctaagagaagaaaataacaagaaaaacagaaaatgaacttttccataaattaaaattaatttatacataagttaaaaatcatcttttaatgaaactctgtgagagagtttctagaaatttacttacataagctaaatttagcttaggaagaaacttatttcatttttttcttcatattttctgctcttataagtgtttgtggagaagtttatccaaacagacactatttgagagcaaaaaggaactatattgtgagcattgtcaactatgaagcaccaacaccgacacggacaccggacacgacacggacacggacacgtggacacctgtaatgtccaaaatatagaacgtagtacgggtgtcgtgtcggtgtcggacactgacacggacgcgtgtcggataccggacacggcaatgggctggagtgtccgtgcttcatagattgtcaacaattttttgtagtgttctgagcttaaaagtagaaaaacgtgtcacatgctaaatactagtcataggtgcttatacagaaattacgagcaacaaacagatgcaacaagttacatgagtaagcatcaatattctgccaaaacctgcttctttgtaagctggccaagcaaaggatgatccaataaaatattgattctcgatataaataaaatgttgagcagatctgatcgcatgtatatatgctgtttgaatactcttgtctatgaccaaattttttgcacaaacaaggttctgcaatgaatgacaatcaaaaagaaattagcgagacagggaaatccaaagattctacttcgatgacatttatctaactatagagcaacccaatgttggatgagttacctgagtc

SEQ ID NO: 8515 - DNA, 1070 bp, Glycine max
  Gm_smallRNAprecursor_1348
tgttttaaaaaattgatggaaaaggtcgatgtcaataacaaagtcttgccccactaggcgggctttgaggaaaaacaatgatatttcaagtgatgtagttattaagactacacaatcgtagtacatagctaacaattactttgagcaagtttgtcattcgtaatatatgttaagcagctgttggattgcctgtttggataagtttatccaaaaacactcctaagagaagaaaataacaagaaaaacagaaaatgaacttttccataaattaaaattaatttatacataagttaaaaatcatcttttaatgaaactctgtgagagagtttctagaaatttacttacataagctaaatttagcttaggaagaaacttatttcatttttttcttcatattttctgctcttataagtgtttgtggagaagtttatccaaacagacactatttgagagcaaaaaggaactatattgtgagcattgtcaactatgaagcaccaacaccgacacggacaccggacacgacacggacacggacacgtggacacctgtaatgtccaaaatatagaacgtagtacgggtgtcgtgtcggtgtcggacactgacacggacgcgtgtcggataccggacacggcaatgggctggagtgtccgtgcttcatagattgtcaacaattttttgtagtgttctgagcttaaaagtagaaaaacgtgtcacatgctaaatactagtcataggtgcttatacagaaattacgagcaacaaacagatgcaacaagttacatgagtaagcatcaatattctgccaaaacctgcttctttgtaagctggccaagcaaaggatgatccaataaaatattgattctcgatataaataaaatgttgagcagatctgatcgcatgtatatatgctgtttgaatactcttgtctatgaccaaattttttgcacaaacaaggttctgcaatgaatgacaatcaaaaagaaattagcgagacagggaaatccaaagattctacttcgatgacatttatctaactatagagcaacccaatgttggatgagttacctgag

SEQ ID NO: 8516 - DNA, 1070 bp, Glycine max; identical to SEQ ID NO: 8515
  Gm_smallRNAprecursor_1349

SEQ ID NO: 8517 - DNA, 1071 bp, Glycine max
  Gm_smallRNAprecursor_1350
tgttttaaaaaattgatggaaaaggtcgatgtcaataacaaagtcttgccccactaggcgggctttgaggaaaaacaatgatatttcaagtgatgtagttattaagactacacaatcgtagtacatagctaacaattactttgagcaagtttgtcattcgtaatatatgttaagcagctgttggattgcctgtttggataagtttatccaaaaacactcctaagagaagaaaataacaagaaaaacagaaaatgaacttttccataaattaaaattaatttatacataagttaaaaatcatcttttaatgaaactctgtgagagagtttctagaaatttacttacataagctaaatttagcttaggaagaaacttatttcatttttttcttcatattttctgctcttataagtgtttgtggagaagtttatccaaacagacactatttgagagcaaaaaggaactatattgtgagcattgtcaactatgaagcaccaacaccgacacggacaccggacacgacacggacacggacacgtggacacctgtaatgtccaaaatatagaacgtagtacgggtgtcgtgtcggtgtcggacactgacacggacgcgtgtcggataccggacacggcaatgggctggagtgtccgtgcttcatagattgtcaacaattttttgtagtgttctgagcttaaaagtagaaaaacgtgtcacatgctaaatactagtcataggtgcttatacagaaattacgagcaacaaacagatgcaacaagttacatgagtaagcatcaatattctgccaaaacctgcttctttgtaagctggccaagcaaaggatgatccaataaaatattgattctcgatataaataaaatgttgagcagatctgatcgcatgtatatatgctgtttgaatactcttgtctatgaccaaattttttgcacaaacaaggttctgcaatgaatgacaatcaaaaagaaattagcgagacagggaaatccaaagattctacttcgatgacatttatctaactatagagcaacccaatgttggatgagttacctgagt

SEQ ID NO: 8518 - DNA, 1071 bp, Glycine max; identical to SEQ ID NO: 8517
  Gm_smallRNAprecursor_1351

SEQ ID NO: 8519 - DNA, 1072 bp, Glycine max
  Gm_smallRNAprecursor_1352
tgttttaaaaaattgatggaaaaggtcgatgtcaataacaaagtcttgccccactaggcgggctttgaggaaaaacaatgatatttcaagtgatgtagttattaagactacacaatcgtagtacatagctaacaattactttgagcaagtttgtcattcgtaatatatgttaagcagctgttggattgcctgtttggataagtttatccaaaaacactcctaagagaagaaaataacaagaaaaacagaaaatgaacttttccataaattaaaattaatttatacataagttaaaaatcatcttttaatgaaactctgtgagagagtttctagaaatttacttacataagctaaatttagcttaggaagaaacttatttcatttttttcttcatattttctgctcttataagtgtttgtggagaagtttatccaaacagacactatttgagagcaaaaaggaactatattgtgagcattgtcaactatgaagcaccaacaccgacacggacaccggacacgacacggacacggacacgtggacacctgtaatgtccaaaatatagaacgtagtacgggtgtcgtgtcggtgtcggacactgacacggacgcgtgtcggataccggacacggcaatgggctggagtgtccgtgcttcatagattgtcaacaattttttgtagtgttctgagcttaaaagtagaaaaacgtgtcacatgctaaatactagtcataggtgcttatacagaaattacgagcaacaaacagatgcaacaagttacatgagtaagcatcaatattctgccaaaacctgcttctttgtaagctggccaagcaaaggatgatccaataaaatattgattctcgatataaataaaatgttgagcagatctgatcgcatgtatatatgctgtttgaatactcttgtctatgaccaaattttttgcacaaacaaggttctgcaatgaatgacaatcaaaaagaaattagcgagacagggaaatccaaagattctacttcgatgacatttatctaactatagagcaacccaatgttggatgagttacctgagtc

SEQ ID NO: 8520 - DNA, 1072 bp, Glycine max; identical to SEQ ID NO: 8519
  Gm_smallRNAprecursor_1353

SEQ ID NO: 8521 - DNA, 1077 bp, Glycine max
  Gm_smallRNAprecursor_1354
tgttttaaaaaattgatggaaaaggtcgatgtcaataacaaagtcttgccccactaggcgggctttgaggaaaaacaatgatatttcaagtgatgtagttattaagactacacaatcgtagtacatagctaacaattactttgagcaagtttgtcattcgtaatatatgttaagcagctgttggattgcctgtttggataagtttatccaaaaacactcctaagagaagaaaataacaagaaaaacagaaaatgaacttttccataaattaaaattaatttatacataagttaaaaatcatcttttaatgaaactctgtgagagagtttctagaaatttacttacataagctaaatttagcttaggaagaaacttatttcatttttttcttcatattttctgctcttataagtgtttgtggagaagtttatccaaacagacactatttgagagcaaaaaggaactatattgtgagcattgtcaactatgaagcaccaacaccgacacggacaccggacacgacacggacacggacacgtggacacctgtaatgtccaaaatatagaacgtagtacgggtgtcgtgtcggtgtcggacactgacacggacgcgtgtcggataccggacacggcaatgggctggagtgtccgtgcttcatagattgtcaacaattttttgtagtgttctgagcttaaaagtagaaaaacgtgtcacatgctaaatactagtcataggtgcttatacagaaattacgagcaacaaacagatgcaacaagttacatgagtaagcatcaatattctgccaaaacctgcttctttgtaagctggccaagcaaaggatgatccaataaaatattgattctcgatataaataaaatgttgagcagatctgatcgcatgtatatatgctgtttgaatactcttgtctatgaccaaattttttgcacaaacaaggttctgcaatgaatgacaatcaaaaagaaattagcgagacagggaaatccaaagattctacttcgatgacatttatctaactatagagcaacccaatgttggatgagttacctgagtctcggc

SEQ ID NO: 8522 - DNA, 1077 bp, Glycine max; identical to SEQ ID NO: 8521
  Gm_smallRNAprecursor_1355

SEQ ID NO: 8523 - DNA, 1078 bp, Glycine max
  Gm_smallRNAprecursor_1356
tgttttaaaaaattgatggaaaaggtcgatgtcaataacaaagtcttgccccactaggcgggctttgaggaaaaacaatgatatttcaagtgatgtagttattaagactacacaatcgtagtacatagctaacaattactttgagcaagtttgtcattcgtaatatatgttaagcagctgttggattgcctgtttggataagtttatccaaaaacactcctaagagaagaaaataacaagaaaaacagaaaatgaacttttccataaattaaaattaatttatacataagttaaaaatcatcttttaatgaaactctgtgagagagtttctagaaatttacttacataagctaaatttagcttaggaagaaacttatttcatttttttcttcatattttctgctcttataagtgtttgtggagaagtttatccaaacagacactatttgagagcaaaaaggaactatattgtgagcattgtcaactatgaagcaccaacaccgacacggacaccggacacgacacggacacggacacgtggacacctgtaatgtccaaaatatagaacgtagtacgggtgtcgtgtcggtgtcggacactgacacggacgcgtgtcggataccggacacggcaatgggctggagtgtccgtgcttcatagattgtcaacaattttttgtagtgttctgagcttaaaagtagaaaaacgtgtcacatgctaaatactagtcataggtgcttatacagaaattacgagcaacaaacagatgcaacaagttacatgagtaagcatcaatattctgccaaaacctgcttctttgtaagctggccaagcaaaggatgatccaataaaatattgattctcgatataaataaaatgttgagcagatctgatcgcatgtatatatgctgtttgaatactcttgtctatgaccaaattttttgcacaaacaaggttctgcaatgaatgacaatcaaaaagaaattagcgagacagggaaatccaaagattctacttcgatgacatttatctaactatagagcaacccaatgttggatgagttacctgagtctcggca

SEQ ID NO: 8524 - DNA, 1078 bp, Glycine max; identical to SEQ ID NO: 8523
  Gm_smallRNAprecursor_1357

SEQ ID NO: 8525 - DNA, 1079 bp, Glycine max
  Gm_smallRNAprecursor_1358
tgttttaaaaaattgatggaaaaggtcgatgtcaataacaaagtcttgccccactaggcgggctttgaggaaaaacaatgatatttcaagtgatgtagttattaagactacacaatcgtagtacatagctaacaattactttgagcaagtttgtcattcgtaatatatgttaagcagctgttggattgcctgtttggataagtttatccaaaaacactcctaagagaagaaaataacaagaaaaacagaaaatgaacttttccataaattaaaattaatttatacataagttaaaaatcatcttttaatgaaactctgtgagagagtttctagaaatttacttacataagctaaatttagcttaggaagaaacttatttcatttttttcttcatattttctgctcttataagtgtttgtggagaagtttatccaaacagacactatttgagagcaaaaaggaactatattgtgagcattgtcaactatgaagcaccaacaccgacacggacaccggacacgacacggacacggacacgtggacacctgtaatgtccaaaatatagaacgtagtacgggtgtcgtgtcggtgtcggacactgacacggacgcgtgtcggataccggacacggcaatgggctggagtgtccgtgcttcatagattgtcaacaattttttgtagtgttctgagcttaaaagtagaaaaacgtgtcacatgctaaatactagtcataggtgcttatacagaaattacgagcaacaaacagatgcaacaagttacatgagtaagcatcaatattctgccaaaacctgcttctttgtaagctggccaagcaaaggatgatccaataaaatattgattctcgatataaataaaatgttgagcagatctgatcgcatgtatatatgctgtttgaatactcttgtctatgaccaaattttttgcacaaacaaggttctgcaatgaatgacaatcaaaaagaaattagcgagacagggaaatccaaagattctacttcgatgacatttatctaactatagagcaacccaatgttggatgagttacctgagtctcggcaa

SEQ ID NO: 8526 - DNA, 1079 bp, Glycine max; identical to SEQ ID NO: 8525
  Gm_smallRNAprecursor_1359

SEQ ID NO: 8527 - DNA, 1080 bp, Glycine max
  Gm_smallRNAprecursor_1360
tgttttaaaaaattgatggaaaaggtcgatgtcaataacaaagtcttgccccactaggcgggctttgaggaaaaacaatgatatttcaagtgatgtagttattaagactacacaatcgtagtacatagctaacaattactttgagcaagtttgtcattcgtaatatatgttaagcagctgttggattgcctgtttggataagtttatccaaaaacactcctaagagaagaaaataacaagaaaaacagaaaatgaacttttccataaattaaaattaatttatacataagttaaaaatcatcttttaatgaaactctgtgagagagtttctagaaatttacttacataagctaaatttagcttaggaagaaacttatttcatttttttcttcatattttctgctcttataagtgtttgtggagaagtttatccaaacagacactatttgagagcaaaaaggaactatattgtgagcattgtcaactatgaagcaccaacaccgacacggacaccggacacgacacggacacggacacgtggacacctgtaatgtccaaaatatagaacgtagtacgggtgtcgtgtcggtgtcggacactgacacggacgcgtgtcggataccggacacggcaatgggctggagtgtccgtgcttcatagattgtcaacaattttttgtagtgttctgagcttaaaagtagaaaaacgtgtcacatgctaaatactagtcataggtgcttatacagaaattacgagcaacaaacagatgcaacaagttacatgagtaagcatcaatattctgccaaaacctgcttctttgtaagctggccaagcaaaggatgatccaataaaatattgattctcgatataaataaaatgttgagcagatctgatcgcatgtatatatgctgtttgaatactcttgtctatgaccaaattttttgcacaaacaaggttctgcaatgaatgacaatcaaaaagaaattagcgagacagggaaatccaaagattctacttcgatgacatttatctaactatagagcaacccaatgttggatgagttacctgagtctcggcaac

SEQ ID NO: 8528 - DNA, 1080 bp, Glycine max; identical to SEQ ID NO: 8527
  Gm_smallRNAprecursor_1361

SEQ ID NO: 8529 - DNA, 1113 bp, Glycine max
  Gm_smallRNAprecursor_1362
tgttttaaaaaattgatggaaaaggtcgatgtcaataacaaagtcttgccccactaggcgggctttgaggaaaaacaatgatatttcaagtgatgtagttattaagactacacaatcgtagtacatagctaacaattactttgagcaagtttgtcattcgtaatatatgttaagcagctgttggattgcctgtttggataagtttatccaaaaacactcctaagagaagaaaataacaagaaaaacagaaaatgaacttttccataaattaaaattaatttatacataagttaaaaatcatcttttaatgaaactctgtgagagagtttctagaaatttacttacataagctaaatttagcttaggaagaaacttatttcatttttttcttcatattttctgctcttataagtgtttgtggagaagtttatccaaacagacactatttgagagcaaaaaggaactatattgtgagcattgtcaactatgaagcaccaacaccgacacggacaccggacacgacacggacacggacacgtggacacctgtaatgtccaaaatatagaacgtagtacgggtgtcgtgtcggtgtcggacactgacacggacgcgtgtcggataccggacacggcaatgggctggagtgtccgtgcttcatagattgtcaacaattttttgtagtgttctgagcttaaaagtagaaaaacgtgtcacatgctaaatactagtcataggtgcttatacagaaattacgagcaacaaacagatgcaacaagttacatgagtaagcatcaatattctgccaaaacctgcttctttgtaagctggccaagcaaaggatgatccaataaaatattgattctcgatataaataaaatgttgagcagatctgatcgcatgtatatatgctgtttgaatactcttgtctatgaccaaattttttgcacaaacaaggttctgcaatgaatgacaatcaaaaagaaattagcgagacagggaaatccaaagattctacttcgatgacatttatctaactatagagcaacccaatgttggatgagttacctgagtctcggcaactactacatccttaggaaatcccttcaaagaacc

SEQ ID NO: 8530 - DNA, 1113 bp, Glycine max; identical to SEQ ID NO: 8529
  Gm_smallRNAprecursor_1363

SEQ ID NO: 8531 - DNA, 1069 bp, Glycine max
  Gm_smallRNAprecursor_1364
gttttaaaaaattgatggaaaaggtcgatgtcaataacaaagtcttgccccactaggcgggctttgaggaaaaacaatgatatttcaagtgatgtagttattaagactacacaatcgtagtacatagctaacaattactttgagcaagtttgtcattcgtaatatatgttaagcagctgttggattgcctgtttggataagtttatccaaaaacactcctaagagaagaaaataacaagaaaaacagaaaatgaacttttccataaattaaaattaatttatacataagttaaaaatcatcttttaatgaaactctgtgagagagtttctagaaatttacttacataagctaaatttagcttaggaagaaacttatttcatttttttcttcatattttctgctcttataagtgtttgtggagaagtttatccaaacagacactatttgagagcaaaaaggaactatattgtgagcattgtcaactatgaagcaccaacaccgacacggacaccggacacgacacggacacggacacgtggacacctgtaatgtccaaaatatagaacgtagtacgggtgtcgtgtcggtgtcggacactgacacggacgcgtgtcggataccggacacggcaatgggctggagtgtccgtgcttcatagattgtcaacaattttttgtagtgttctgagcttaaaagtagaaaaacgtgtcacatgctaaatactagtcataggtgcttatacagaaattacgagcaacaaacagatgcaacaagttacatgagtaagcatcaatattctgccaaaacctgcttctttgtaagctggccaagcaaaggatgatccaataaaatattgattctcgatataaataaaatgttgagcagatctgatcgcatgtatatatgctgtttgaatactcttgtctatgaccaaattttttgcacaaacaaggttctgcaatgaatgacaatcaaaaagaaattagcgagacagggaaatccaaagattctacttcgatgacatttatctaactatagagcaacccaatgttggatgagttacctgag

SEQ ID NO: 8532 - DNA, 1069 bp, Glycine max; identical to SEQ ID NO: 8531
  Gm_smallRNAprecursor_1365

SEQ ID NO: 8533 - DNA, 1069 bp, Glycine max; identical to SEQ ID NO: 8531
  Gm_smallRNAprecursor_1366

SEQ ID NO: 8534 - DNA, 1069 bp, Glycine max; identical to SEQ ID NO: 8531
  Gm_smallRNAprecursor_1367

SEQ ID NO: 8535 - DNA, 1071 bp, Glycine max
  Gm_smallRNAprecursor_1368
gttttaaaaaattgatggaaaaggtcgatgtcaataacaaagtcttgccccactaggcgggctttgaggaaaaacaatgatatttcaagtgatgtagttattaagactacacaatcgtagtacatagctaacaattactttgagcaagtttgtcattcgtaatatatgttaagcagctgttggattgcctgtttggataagtttatccaaaaacactcctaagagaagaaaataacaagaaaaacagaaaatgaacttttccataaattaaaattaatttatacataagttaaaaatcatcttttaatgaaactctgtgagagagtttctagaaatttacttacataagctaaatttagcttaggaagaaacttatttcatttttttcttcatattttctgctcttataagtgtttgtggagaagtttatccaaacagacactatttgagagcaaaaaggaactatattgtgagcattgtcaactatgaagcaccaacaccgacacggacaccggacacgacacggacacggacacgtggacacctgtaatgtccaaaatatagaacgtagtacgggtgtcgtgtcggtgtcggacactgacacggacgcgtgtcggataccggacacggcaatgggctggagtgtccgtgcttcatagattgtcaacaattttttgtagtgttctgagcttaaaagtagaaaaacgtgtcacatgctaaatactagtcataggtgcttatacagaaattacgagcaacaaacagatgcaacaagttacatgagtaagcatcaatattctgccaaaacctgcttctttgtaagctggccaagcaaaggatgatccaataaaatattgattctcgatataaataaaatgttgagcagatctgatcgcatgtatatatgctgtttgaatactcttgtctatgaccaaattttttgcacaaacaaggttctgcaatgaatgacaatcaaaaagaaattagcgagacagggaaatccaaagattctacttcgatgacatttatctaactatagagcaacccaatgttggatgagttacctgagtc

SEQ ID NO: 8536 - DNA, 1071 bp, Glycine max; identical to SEQ ID NO: 8535
  Gm_smallRNAprecursor_1369

SEQ ID NO: 8537 - DNA, 1076 bp, Glycine max
  Gm_smallRNAprecursor_1370
gttttaaaaaattgatggaaaaggtcgatgtcaataacaaagtcttgccccactaggcgggctttgaggaaaaacaatgatatttcaagtgatgtagttattaagactacacaatcgtagtacatagctaacaattactttgagcaagtttgtcattcgtaatatatgttaagcagctgttggattgcctgtttggataagtttatccaaaaacactcctaagagaagaaaataacaagaaaaacagaaaatgaacttttccataaattaaaattaatttatacataagttaaaaatcatcttttaatgaaactctgtgagagagtttctagaaatttacttacataagctaaatttagcttaggaagaaacttatttcatttttttcttcatattttctgctcttataagtgtttgtggagaagtttatccaaacagacactatttgagagcaaaaaggaactatattgtgagcattgtcaactatgaagcaccaacaccgacacggacaccggacacgacacggacacggacacgtggacacctgtaatgtccaaaatatagaacgtagtacgggtgtcgtgtcggtgtcggacactgacacggacgcgtgtcggataccggacacggcaatgggctggagtgtccgtgcttcatagattgtcaacaattttttgtagtgttctgagcttaaaagtagaaaaacgtgtcacatgctaaatactagtcataggtgcttatacagaaattacgagcaacaaacagatgcaacaagttacatgagtaagcatcaatattctgccaaaacctgcttctttgtaagctggccaagcaaaggatgatccaataaaatattgattctcgatataaataaaatgttgagcagatctgatcgcatgtatatatgctgtttgaatactcttgtctatgaccaaattttttgcacaaacaaggttctgcaatgaatgacaatcaaaaagaaattagcgagacagggaaatccaaagattctacttcgatgacatttatctaactatagagcaacccaatgttggatgagttacctgagtctcggc

SEQ ID NO: 8538 - DNA, 1076 bp, Glycine max; identical to SEQ ID NO: 8537
  Gm_smallRNAprecursor_1371

SEQ ID NO: 8539 - DNA, 1076 bp, Glycine max; identical to SEQ ID NO: 8537
  Gm_smallRNAprecursor_1372

SEQ ID NO: 8540 - DNA, 1076 bp, Glycine max; identical to SEQ ID NO: 8537
  Gm_smallRNAprecursor_1373

SEQ ID NO: 8541 - DNA, 1077 bp, Glycine max
  Gm_smallRNAprecursor_1374
gttttaaaaaattgatggaaaaggtcgatgtcaataacaaagtcttgccccactaggcgggctttgaggaaaaacaatgatatttcaagtgatgtagttattaagactacacaatcgtagtacatagctaacaattactttgagcaagtttgtcattcgtaatatatgttaagcagctgttggattgcctgtttggataagtttatccaaaaacactcctaagagaagaaaataacaagaaaaacagaaaatgaacttttccataaattaaaattaatttatacataagttaaaaatcatcttttaatgaaactctgtgagagagtttctagaaatttacttacataagctaaatttagcttaggaagaaacttatttcatttttttcttcatattttctgctcttataagtgtttgtggagaagtttatccaaacagacactatttgagagcaaaaaggaactatattgtgagcattgtcaactatgaagcaccaacaccgacacggacaccggacacgacacggacacggacacgtggacacctgtaatgtccaaaatatagaacgtagtacgggtgtcgtgtcggtgtcggacactgacacggacgcgtgtcggataccggacacggcaatgggctggagtgtccgtgcttcatagattgtcaacaattttttgtagtgttctgagcttaaaagtagaaaaacgtgtcacatgctaaatactagtcataggtgcttatacagaaattacgagcaacaaacagatgcaacaagttacatgagtaagcatcaatattctgccaaaacctgcttctttgtaagctggccaagcaaaggatgatccaataaaatattgattctcgatataaataaaatgttgagcagatctgatcgcatgtatatatgctgtttgaatactcttgtctatgaccaaattttttgcacaaacaaggttctgcaatgaatgacaatcaaaaagaaattagcgagacagggaaatccaaagattctacttcgatgacatttatctaactatagagcaacccaatgttggatgagttacctgagtctcggca

SEQ ID NO: 8542 - DNA, 1077 bp, Glycine max; identical to SEQ ID NO: 8541
  Gm_smallRNAprecursor_1375

SEQ ID NO: 8543 - DNA, 1078 bp, Glycine max
  Gm_smallRNAprecursor_1376
gttttaaaaaattgatggaaaaggtcgatgtcaataacaaagtcttgccccactaggcgggctttgaggaaaaacaatgatatttcaagtgatgtagttattaagactacacaatcgtagtacatagctaacaattactttgagcaagtttgtcattcgtaatatatgttaagcagctgttggattgcctgtttggataagtttatccaaaaacactcctaagagaagaaaataacaagaaaaacagaaaatgaacttttccataaattaaaattaatttatacataagttaaaaatcatcttttaatgaaactctgtgagagagtttctagaaatttacttacataagctaaatttagcttaggaagaaacttatttcatttttttcttcatattttctgctcttataagtgtttgtggagaagtttatccaaacagacactatttgagagcaaaaaggaactatattgtgagcattgtcaactatgaagcaccaacaccgacacggacaccggacacgacacggacacggacacgtggacacctgtaatgtccaaaatatagaacgtagtacgggtgtcgtgtcggtgtcggacactgacacggacgcgtgtcggataccggacacggcaatgggctggagtgtccgtgcttcatagattgtcaacaattttttgtagtgttctgagcttaaaagtagaaaaacgtgtcacatgctaaatactagtcataggtgcttatacagaaattacgagcaacaaacagatgcaacaagttacatgagtaagcatcaatattctgccaaaacctgcttctttgtaagctggccaagcaaaggatgatccaataaaatattgattctcgatataaataaaatgttgagcagatctgatcgcatgtatatatgctgtttgaatactcttgtctatgaccaaattttttgcacaaacaaggttctgcaatgaatgacaatcaaaaagaaattagcgagacagggaaatccaaagattctacttcgatgacatttatctaactatagagcaacccaatgttggatgagttacctgagtctcggcaa

SEQ ID NO: 8544 - DNA, 1112 bp, Glycine max
  Gm_smallRNAprecursor_1377
gttttaaaaaattgatggaaaaggtcgatgtcaataacaaagtcttgccccactaggcgggctttgaggaaaaacaatgatatttcaagtgatgtagttattaagactacacaatcgtagtacatagctaacaattactttgagcaagtttgtcattcgtaatatatgttaagcagctgttggattgcctgtttggataagtttatccaaaaacactcctaagagaagaaaataacaagaaaaacagaaaatgaacttttccataaattaaaattaatttatacataagttaaaaatcatcttttaatgaaactctgtgagagagtttctagaaatttacttacataagctaaatttagcttaggaagaaacttatttcatttttttcttcatattttctgctcttataagtgtttgtggagaagtttatccaaacagacactatttgagagcaaaaaggaactatattgtgagcattgtcaactatgaagcaccaacaccgacacggacaccggacacgacacggacacggacacgtggacacctgtaatgtccaaaatatagaacgtagtacgggtgtcgtgtcggtgtcggacactgacacggacgcgtgtcggataccggacacggcaatgggctggagtgtccgtgcttcatagattgtcaacaattttttgtagtgttctgagcttaaaagtagaaaaacgtgtcacatgctaaatactagtcataggtgcttatacagaaattacgagcaacaaacagatgcaacaagttacatgagtaagcatcaatattctgccaaaacctgcttctttgtaagctggccaagcaaaggatgatccaataaaatattgattctcgatataaataaaatgttgagcagatctgatcgcatgtatatatgctgtttgaatactcttgtctatgaccaaattttttgcacaaacaaggttctgcaatgaatgacaatcaaaaagaaattagcgagacagggaaatccaaagattctacttcgatgacatttatctaactatagagcaacccaatgttggatgagttacctgagtctcggcaactactacatccttaggaaatcccttcaaagaacc

SEQ ID NO: 8545 - DNA, 1112 bp, Glycine max; identical to SEQ ID NO: 8544
  Gm_smallRNAprecursor_1378

SEQ ID NO: 8546 - DNA, 1060 bp, Glycine max
  Gm_smallRNAprecursor_1379
attgatggaaaaggtcgatgtcaataacaaagtcttgccccactaggcgggctttgaggaaaaacaatgatatttcaagtgatgtagttattaagactacacaatcgtagtacatagctaacaattactttgagcaagtttgtcattcgtaatatatgttaagcagctgttggattgcctgtttggataagtttatccaaaaacactcctaagagaagaaaataacaagaaaaacagaaaatgaacttttccataaattaaaattaatttatacataagttaaaaatcatcttttaatgaaactctgtgagagagtttctagaaatttacttacataagctaaatttagcttaggaagaaacttatttcatttttttcttcatattttctgctcttataagtgtttgtggagaagtttatccaaacagacactatttgagagcaaaaaggaactatattgtgagcattgtcaactatgaagcaccaacaccgacacggacaccggacacgacacggacacggacacgtggacacctgtaatgtccaaaatatagaacgtagtacgggtgtcgtgtcggtgtcggacactgacacggacgcgtgtcggataccggacacggcaatgggctggagtgtccgtgcttcatagattgtcaacaattttttgtagtgttctgagcttaaaagtagaaaaacgtgtcacatgctaaatactagtcataggtgcttatacagaaattacgagcaacaaacagatgcaacaagttacatgagtaagcatcaatattctgccaaaacctgcttctttgtaagctggccaagcaaaggatgatccaataaaatattgattctcgatataaataaaatgttgagcagatctgatcgcatgtatatatgctgtttgaatactcttgtctatgaccaaattttttgcacaaacaaggttctgcaatgaatgacaatcaaaaagaaattagcgagacagggaaatccaaagattctacttcgatgacatttatctaactatagagcaacccaatgttggatgagttacctgagt

SEQ ID NO: 8547 - DNA, 1061 bp, Glycine max
  Gm_smallRNAprecursor_1380
attgatggaaaaggtcgatgtcaataacaaagtcttgccccactaggcgggctttgaggaaaaacaatgatatttcaagtgatgtagttattaagactacacaatcgtagtacatagctaacaattactttgagcaagtttgtcattcgtaatatatgttaagcagctgttggattgcctgtttggataagtttatccaaaaacactcctaagagaagaaaataacaagaaaaacagaaaatgaacttttccataaattaaaattaatttatacataagttaaaaatcatcttttaatgaaactctgtgagagagtttctagaaatttacttacataagctaaatttagcttaggaagaaacttatttcatttttttcttcatattttctgctcttataagtgtttgtggagaagtttatccaaacagacactatttgagagcaaaaaggaactatattgtgagcattgtcaactatgaagcaccaacaccgacacggacaccggacacgacacggacacggacacgtggacacctgtaatgtccaaaatatagaacgtagtacgggtgtcgtgtcggtgtcggacactgacacggacgcgtgtcggataccggacacggcaatgggctggagtgtccgtgcttcatagattgtcaacaattttttgtagtgttctgagcttaaaagtagaaaaacgtgtcacatgctaaatactagtcataggtgcttatacagaaattacgagcaacaaacagatgcaacaagttacatgagtaagcatcaatattctgccaaaacctgcttctttgtaagctggccaagcaaaggatgatccaataaaatattgattctcgatataaataaaatgttgagcagatctgatcgcatgtatatatgctgtttgaatactcttgtctatgaccaaattttttgcacaaacaaggttctgcaatgaatgacaatcaaaaagaaattagcgagacagggaaatccaaagattctacttcgatgacatttatctaactatagagcaacccaatgttggatgagttacctgagtc

SEQ ID NO: 8548 - DNA, 1046 bp, Glycine max
  Gm_smallRNAprecursor_1381
gtcgatgtcaataacaaagtcttgccccactaggcgggctttgaggaaaaacaatgatatttcaagtgatgtagttattaagactacacaatcgtagtacatagctaacaattactttgagcaagtttgtcattcgtaatatatgttaagcagctgttggattgcctgtttggataagtttatccaaaaacactcctaagagaagaaaataacaagaaaaacagaaaatgaacttttccataaattaaaattaatttatacataagttaaaaatcatcttttaatgaaactctgtgagagagtttctagaaatttacttacataagctaaatttagcttaggaagaaacttatttcatttttttcttcatattttctgctcttataagtgtttgtggagaagtttatccaaacagacactatttgagagcaaaaaggaactatattgtgagcattgtcaactatgaagcaccaacaccgacacggacaccggacacgacacggacacggacacgtggacacctgtaatgtccaaaatatagaacgtagtacgggtgtcgtgtcggtgtcggacactgacacggacgcgtgtcggataccggacacggcaatgggctggagtgtccgtgcttcatagattgtcaacaattttttgtagtgttctgagcttaaaagtagaaaaacgtgtcacatgctaaatactagtcataggtgcttatacagaaattacgagcaacaaacagatgcaacaagttacatgagtaagcatcaatattctgccaaaacctgcttctttgtaagctggccaagcaaaggatgatccaataaaatattgattctcgatataaataaaatgttgagcagatctgatcgcatgtatatatgctgtttgaatactcttgtctatgaccaaattttttgcacaaacaaggttctgcaatgaatgacaatcaaaaagaaattagcgagacagggaaatccaaagattctacttcgatgacatttatctaactatagagcaacccaatgttggatgagttacctgag

SEQ ID NO: 8549 - DNA, 1053 bp, Glycine max
  Gm_smallRNAprecursor_1382
gtcgatgtcaataacaaagtcttgccccactaggcgggctttgaggaaaaacaatgatatttcaagtgatgtagttattaagactacacaatcgtagtacatagctaacaattactttgagcaagtttgtcattcgtaatatatgttaagcagctgttggattgcctgtttggataagtttatccaaaaacactcctaagagaagaaaataacaagaaaaacagaaaatgaacttttccataaattaaaattaatttatacataagttaaaaatcatcttttaatgaaactctgtgagagagtttctagaaatttacttacataagctaaatttagcttaggaagaaacttatttcatttttttcttcatattttctgctcttataagtgtttgtggagaagtttatccaaacagacactatttgagagcaaaaaggaactatattgtgagcattgtcaactatgaagcaccaacaccgacacggacaccggacacgacacggacacggacacgtggacacctgtaatgtccaaaatatagaacgtagtacgggtgtcgtgtcggtgtcggacactgacacggacgcgtgtcggataccggacacggcaatgggctggagtgtccgtgcttcatagattgtcaacaattttttgtagtgttctgagcttaaaagtagaaaaacgtgtcacatgctaaatactagtcataggtgcttatacagaaattacgagcaacaaacagatgcaacaagttacatgagtaagcatcaatattctgccaaaacctgcttctttgtaagctggccaagcaaaggatgatccaataaaatattgattctcgatataaataaaatgttgagcagatctgatcgcatgtatatatgctgtttgaatactcttgtctatgaccaaattttttgcacaaacaaggttctgcaatgaatgacaatcaaaaagaaattagcgagacagggaaatccaaagattctacttcgatgacatttatctaactatagagcaacccaatgttggatgagttacctgagtctcggc

SEQ ID NO: 8550 - DNA, 1053 bp, Glycine max; identical to SEQ ID NO: 8549
  Gm_smallRNAprecursor_1383

SEQ ID NO: 8551 - DNA, 1054 bp, Glycine max
  Gm_smallRNAprecursor_1384
gtcgatgtcaataacaaagtcttgccccactaggcgggctttgaggaaaaacaatgatatttcaagtgatgtagttattaagactacacaatcgtagtacatagctaacaattactttgagcaagtttgtcattcgtaatatatgttaagcagctgttggattgcctgtttggataagtttatccaaaaacactcctaagagaagaaaataacaagaaaaacagaaaatgaacttttccataaattaaaattaatttatacataagttaaaaatcatcttttaatgaaactctgtgagagagtttctagaaatttacttacataagctaaatttagcttaggaagaaacttatttcatttttttcttcatattttctgctcttataagtgtttgtggagaagtttatccaaacagacactatttgagagcaaaaaggaactatattgtgagcattgtcaactatgaagcaccaacaccgacacggacaccggacacgacacggacacggacacgtggacacctgtaatgtccaaaatatagaacgtagtacgggtgtcgtgtcggtgtcggacactgacacggacgcgtgtcggataccggacacggcaatgggctggagtgtccgtgcttcatagattgtcaacaattttttgtagtgttctgagcttaaaagtagaaaaacgtgtcacatgctaaatactagtcataggtgcttatacagaaattacgagcaacaaacagatgcaacaagttacatgagtaagcatcaatattctgccaaaacctgcttctttgtaagctggccaagcaaaggatgatccaataaaatattgattctcgatataaataaaatgttgagcagatctgatcgcatgtatatatgctgtttgaatactcttgtctatgaccaaattttttgcacaaacaaggttctgcaatgaatgacaatcaaaaagaaattagcgagacagggaaatccaaagattctacttcgatgacatttatctaactatagagcaacccaatgttggatgagttacctgagtctcggca

SEQ ID NO: 8552 - DNA, 1054 bp, Glycine max; identical to SEQ ID NO: 8551
  Gm_smallRNAprecursor_1385

SEQ ID NO: 8553 - DNA, 1055 bp, Glycine max
  Gm_smallRNAprecursor_1386
gtcgatgtcaataacaaagtcttgccccactaggcgggctttgaggaaaaacaatgatatttcaagtgatgtagttattaagactacacaatcgtagtacatagctaacaattactttgagcaagtttgtcattcgtaatatatgttaagcagctgttggattgcctgtttggataagtttatccaaaaacactcctaagagaagaaaataacaagaaaaacagaaaatgaacttttccataaattaaaattaatttatacataagttaaaaatcatcttttaatgaaactctgtgagagagtttctagaaatttacttacataagctaaatttagcttaggaagaaacttatttcatttttttcttcatattttctgctcttataagtgtttgtggagaagtttatccaaacagacactatttgagagcaaaaaggaactatattgtgagcattgtcaactatgaagcaccaacaccgacacggacaccggacacgacacggacacggacacgtggacacctgtaatgtccaaaatatagaacgtagtacgggtgtcgtgtcggtgtcggacactgacacggacgcgtgtcggataccggacacggcaatgggctggagtgtccgtgcttcatagattgtcaacaattttttgtagtgttctgagcttaaaagtagaaaaacgtgtcacatgctaaatactagtcataggtgcttatacagaaattacgagcaacaaacagatgcaacaagttacatgagtaagcatcaatattctgccaaaacctgcttctttgtaagctggccaagcaaaggatgatccaataaaatattgattctcgatataaataaaatgttgagcagatctgatcgcatgtatatatgctgtttgaatactcttgtctatgaccaaattttttgcacaaacaaggttctgcaatgaatgacaatcaaaaagaaattagcgagacagggaaatccaaagattctacttcgatgacatttatctaactatagagcaacccaatgttggatgagttacctgagtctcggcaa

SEQ ID NO: 8554 - DNA, 1055 bp, Glycine max; identical to SEQ ID NO: 8553
  Gm_smallRNAprecursor_1387

SEQ ID NO: 8555 - DNA, 1053 bp, Glycine max
  Gm_smallRNAprecursor_1388
ttggttgggaggaagcaagaacaaattatttcacgtgcatgaaaaatcaagctattatcctgaagaaacaaagaaagtttactcttacacatatactctcgtagcttttgagttttgaaatgaatcttcaaaaaataaataaaaaaaccataataataatataaaaaaataaattttatttcaacttttgaaagtcgttggattaaaaatttaatttcataataatcaccgatctaagtaattgtagatatattgaatgtgatataattttaatggaatgttttttttaacaggagcattaatggaagtttattaatttttaaaacttaatattttatatattttttataaaaataattatgattgaatgtcttttgatttactatttttattaaattaaagtaaagaaaactaataaaataaaagataatgtaaccatgattatcaaactctcgagttaactcgttaactcttacaagtttacgagtccacttgttctgcgagttgactcttgagtaaactctttttttagtagactctaggtaaactctataaactctaagtaaactcggtagactctcgagtttaccactgaattaacaagttaacaagttaaaaaaattagacaaaaatgtaagtcattttttattattttctatttgtttagcattcaacataccttttaacatgttattctcaaatacaaaattctcacctttaataatatcaaattcttgttctctaataaaatcaaatcctcgatgagaataatctaccactactataacctctacaaattattgtttagtggtgatgtattattactaggcttggttaattaaatattctgaactttatgatttactgttttactttattatattgttgaaatgtttaattagtatgttatttatagatattttgttattatttttatatgaagtagactcttacgagtctacgagttgagtctataaaactctcacgaatttgtgtaaactctcgagtttgataaccatgtaactactctaaaataatattcatttttacttc

SEQ ID NO: 8556 - DNA, 1158 bp, Glycine max
  Gm_smallRNAprecursor_1389
attgttttgtgaatttattgtattatattttattttgcagtatcaatgacatcttcatcgtcatgtccatcacatattaaaattaagtttggcccgatcgacggtgatgtattatggatgcaacctaagcatgtttcataacatgtttggaatggggaagaagatcagaaattacatatcagacgagttgtccccacgtattaaggggaagaaatttcagagcaaattttttcttttcttcgacaatttggtttttacttgattatgaagataggatacttaaaaataaatgtctcattaattagtgctttgatagaaagatggaggccggaaacacatacgtttcacatgagatgcggagagtgtactattactcttcaagatgtctctgtattgttaggtctacgtgtggatggtttaccattaatcgatccaacaaatcttaattgggttgatttatgtgaggaattattgggagtcagatcaccacaagaaggtgaaattaaaggtagtgtggttaaattaagttggctgactcaccattttgcacaaataaataaccacgacgacgaagaacaagtacgaaggtgtgcccgtgcatggatactaagattcattggaggtgtcttgttcgttgacaaaaacagtaacaaagtttcgctaaggtaccttcaatttttacgtgactttgaagactgtagcacatatgcatggggacctgccgtacttgcttttctatacaaagagatgtgcagtgtcaccgattataaaactaaatcaatcggaggtatgtgcatcttactacaaatgtgggcatgggaacgatgtccaaccttggctccaaagaggtatgtgcatcttaccaccatttccatcttgtgatgtggccattaatagggtcccacggtatttcccgtataaatgtgtgccgtcaacttgtatgattgacttacagtacttaaaagcctctttacattgaccaaatgtccaaaatactctatgaaacacacgatgttcgcgactcacgctattaccaacaataaaatcgtcatgtagtatttgaaaataagagtcaggagaatgattttgcatgtgtgttagccatgacgagagtttcgcatacgactcttcccaattgccatattcaattgcaatcgt

SEQ ID NO: 8557 - DNA, 1035 bp, Glycine max
  Gm_smallRNAprecursor_1390
tgttttgtgaatttattgtattatattttattttgcagtatcaatgacatcttcatcgtcatgtccatcacatattaaaattaagtttggcccgatcgacggtgatgtattatggatgcaacctaagcatgtttcataacatgtttggaatggggaagaagatcagaaattacatatcagacgagttgtccccacgtattaaggggaagaaatttcagagcaaattttttcttttcttcgacaatttggtttttacttgattatgaagataggatacttaaaaataaatgtctcattaattagtgctttgatagaaagatggaggccggaaacacatacgtttcacatgagatgcggagagtgtactattactcttcaagatgtctctgtattgttaggtctacgtgtggatggtttaccattaatcgatccaacaaatcttaattgggttgatttatgtgaggaattattgggagtcagatcaccacaagaaggtgaaattaaaggtagtgtggttaaattaagttggctgactcaccattttgcacaaataaataaccacgacgacgaagaacaagtacgaaggtgtgcccgtgcatggatactaagattcattggaggtgtcttgttcgttgacaaaaacagtaacaaagtttcgctaaggtaccttcaatttttacgtgactttgaagactgtagcacatatgcatggggacctgccgtacttgcttttctatacaaagagatgtgcagtgtcaccgattataaaactaaatcaatcggaggtatgtgcatcttactacaaatgtgggcatgggaacgatgtccaaccttggctccaaagaggtatgtgcatcttaccaccatttccatcttgtgatgtggccattaatagggtcccacggtatttcccgtataaatgtgtgccgtcaacttgtatgattgacttacagtacttaaaagcctctttacattgaccaaatgtccaaaatactctatgaaacacacgatgttcgcgactcacgctattaccaa

SEQ ID NO: 8558 - DNA, 1155 bp, Glycine max
  Gm_smallRNAprecursor_1391
tgttttgtgaatttattgtattatattttattttgcagtatcaatgacatcttcatcgtcatgtccatcacatattaaaattaagtttggcccgatcgacggtgatgtattatggatgcaacctaagcatgtttcataacatgtttggaatggggaagaagatcagaaattacatatcagacgagttgtccccacgtattaaggggaagaaatttcagagcaaattttttcttttcttcgacaatttggtttttacttgattatgaagataggatacttaaaaataaatgtctcattaattagtgctttgatagaaagatggaggccggaaacacatacgtttcacatgagatgcggagagtgtactattactcttcaagatgtctctgtattgttaggtctacgtgtggatggtttaccattaatcgatccaacaaatcttaattgggttgatttatgtgaggaattattgggagtcagatcaccacaagaaggtgaaattaaaggtagtgtggttaaattaagttggctgactcaccattttgcacaaataaataaccacgacgacgaagaacaagtacgaaggtgtgcccgtgcatggatactaagattcattggaggtgtcttgttcgttgacaaaaacagtaacaaagtttcgctaaggtaccttcaatttttacgtgactttgaagactgtagcacatatgcatggggacctgccgtacttgcttttctatacaaagagatgtgcagtgtcaccgattataaaactaaatcaatcggaggtatgtgcatcttactacaaatgtgggcatgggaacgatgtccaaccttggctccaaagaggtatgtgcatcttaccaccatttccatcttgtgatgtggccattaatagggtcccacggtatttcccgtataaatgtgtgccgtcaacttgtatgattgacttacagtacttaaaagcctctttacattgaccaaatgtccaaaatactctatgaaacacacgatgttcgcgactcacgctattaccaacaataaaatcgtcatgtagtatttgaaaataagagtcaggagaatgattttgcatgtgtgttagccatgacgagagtttcgcatacgactcttcccaattgccatattcaattgcaatcg

SEQ ID NO: 8559 - DNA, 1043 bp, Glycine max
  Gm_smallRNAprecursor_1392
agggttttactaggaaatctccccttctcccaataccaattttcaatagtagtagtagtatatgcttttggttcttgtaatatgttatttttataaaaaaaaaaaatttaaagtggtccttataaaattcagagaaaggtttaaatatgtggattttgagcaagcattgaatggaaatatcaaatttctttcgtttgttagagagcaagtttaaaaagatggtagatatatggtatattacatcaattacttttttttttttctatatgtgtctaggtgtagatcaaatggagtctccacaaagggtgttgctaggtgcacccagtattattgttggtgcacccagcatttaaggtgaaatgacaaaaatatccttgatccgtaagccatttaagttaattcgtaaaagtcttacggatcaacttgatccgtagaagctttacggatcaacttgatccgtaagctttttatgaatcaagttgatccgtattgttccgtaaaaggcttacggatcaagttgatccgtatcaaccttacggatcaacatgattcgtacgatttacgaatcaccctcacacatccatcacaaatgcgaaaaaagcgtaagggcaattttggtattttaataaaatgttgggtgcaccagcaataatttctaattcacatatatgtattattgttttttggtaatgggatgaaaagaaacaaaaaacgaaaagcctaattaagggaaaaagatgcccatgctagcaaactacgtactatgaactccaagaggaggaaagaaaacacatcatttctctttgagatgctctcaagtctcatctttattgttttaaaaaataaaatctgctctataattgccttcgtgaaaagtgtgacgaagaattaattgccattcttcactcaatctgtcacgtatgctttgaaggggcaaacacgtgagagggtgagaaagaatgattgatcaatttaatagccccagctaggattgtctaggaccctggtcccaagccatatttaagtcatgtaaaatggctaag

SEQ ID NO: 8560 - DNA, 1147 bp, Glycine max
  Gm_smallRNAprecursor_1393
ctttgttcctttgtcaaggcaaggcaatttatgcattagtctatagatataaatatttgttttcaatttcatagatataaaaattaaataaattaaaaactaagataaatataaatatatagtgtcttttggtgtagataaatatatagtgtctaagatattaatcacttttgttctgtaggtaacccgttattagtaatatatagtaattttcatttacttttggcattctctgctacttgcatttaattaaatggtttagagctgcataattttatggatccaaaacctcatttgttctccatattttttcttgctggttttatgtcttggtcaatggacttgttcctttatttgttattttcaatcacagtgtgaggtgcaagcctgctattaatgtcaatatttgagcattttttcatgctttgttatatttgtatggtttcataataatgcttttattattttttaaattaaatatttttttttcaaaataacattctaagacggtcgttagctaatgactatcttagaaaggtaactttctaagacagtcgttagctaaccaccgtcttagaaagttacctttttaaggcagtggttagctaagaaacgtcttagaaaggtactttctaagacggtgattagctaacgaccgtcttagaaagttacatttctaagacggtcgttagctaacgaccgtcttagaagataatgtttttctaagacgggttttataggaccgtcataaactttcgacgacgttggattcaaagacggtgctccaccgtctttgtatgttgttttccaccgtctttgtttgtgttttttgtagtagtgagtacatataatttttttactatatattatggttttagttaatttaataatatataattaagcatgatataaataaattaatattttgaaaataagtacatatgaagcaagcaggactcacaataggataacaagtcaagatctcgaacaatcacgagtccacctactcccccagcatgaccaactctattatctagaccagcttcagggaataaagcaccttgaacaatgtccttcaccttttgtctgtaacctggaagaaaataaatctccttatgattagtaaggatactattcaagaaaatat

SEQ ID NO: 8561 - DNA, 1061 bp, Glycine max
  Gm_smallRNAprecursor_1394
cttggcacagtaagaaacaaaatagtgttgctttatccactgcagaagcggaatatatttctgtcggcagttgttgtgctcaaatcttatggatgaagcaacaactttctgattatggaattcttcttgaccatatacctattagatgtgataatacaagtgaaattaatatctccaagaatccagttcaacactctagaactaaacatatagaaattaggcaccattttcttagagatcatgttctaaagggagattatgtattagagtttgttgatactaagaatcaacttgctgatattttcacaaaaactctccccaaagaagcattcttctctattagaagggaattaggcctcttagatattagtgatttagatagacaaggattgattgattaatttactcttatgattgattgtttatgttaagtatgttactttgattgattttgtttaaattcttgttattatgatagaatttatgaattcctgtgtgttttatatttgaatgcttgaattaagtgcataagtagtgataattaataatattaggtgtatttagcatagacataggtaattttttagaaactagcctagtttatgctctggtaatcgattaccatccagtgtaatcgattacacaagaacaggcagcctgtaatcgattacaacatcctgtaatcgattaccagaaggcttattactcttgtaatcgattaccaatccttgtaatcgattacaactcgtcctcgtctataaatatccacgaaatcagagttgctgcgcagccaaggcctctcctcgtgcctcctccatccctaaatcttccaaccttcgtatcttactcaaatcttcaccaaatcacgtcccgtaaagcccaatcttcctctttttcactcctctttcacttccaccgattgaaatccactaaaacttcatcaaatggcagaaccatcgaagaagagaaagggatcatcctccactgccgctgctgctgcccatcgccgccacagaccatccgaagcacccgcaacacctattcatctctgtcatctccta

SEQ ID NO: 8562 - DNA, 1036 bp, Glycine max
  Gm_smallRNAprecursor_1395
agaccacaagaagatgaaattagaggtagtgtggttaaattaagttggttggctcaccattttgcacaaataaataacaacgacgacgaagaacaagtacgaaggtttgcccgtgcatggatactgagattcattggaggtgtcttgttcgttgacaaaagcagtaacaaagtttcgctaaggtaccttcaatttttacgtgactttgaagaatgtggcagatatgcatggggagccgccgtacttggttttctatacagagagatgtgcaatgccaccgattataaaactaaatccatcggaggtatgtgcatcttactacaaatgtgggcttgggaacgatgtccaaccttggctccaaagaggactccttcccaagtagaaaatacatcactggggcacaggttagtcatttttaacagcgtctttcatttcaatagaataaatggttttagcatatattaaattttaatctttgtaggtggctgcgacgtggaaaccaacatatcggcaatgatgatgtgagagtttttcgtcgcaagttggatattatgaaacgtcatgaggtaagaacatgctattgtatttgtaaaataaaaaattatatgtgttattttactaaaatgttcacaactatgttgttaattgcagtttgtgtgggagcacccatcaaccgttatatcactgttgcctcccgtttgtttagtcggaagtctcgcgtggtacgcggtggtgccactaatttgtttccaagttattgagtggcaccaaccggacagagtattgagacaatttgggatgcagcaaccaattccagagtctccttcacaacccttaaacattcatggcataacattaaaagggaaacatgacgaaaattgggggcaattgttcgccccaatgattcataagtggaataatcgtcatgcatttagggtcgtcgcttatccccgacaagaaggcctattaagctttaactcggactacatggtctggtataggcaaaagacaaagatgtttgttgacccacaaaatg

SEQ ID NO: 8563 - DNA, 1132 bp, Glycine max
  Gm_smallRNAprecursor_1396
ggttctgactttgcaatggctcaaagaaaaactcattctcctagtaagaaacttttaccatatgacaaatacaaataccatactatttttttatgtattagttataattcagaattctaactttgaagttatgctcttggttggtaattggtattgcagcatattggtggcgaatgtttgggtcacaaactccaaatttgcaaaagctagctattaaaattttaagtttgacttgcagtgcttcaggatgtgaaagaaattggagtgtgtttgagcaagtaattgtgacaaaactctaactatactttttaattttatataattttgatgatcaagttttatttggagtatatttgagattgaaatcaacatttatttgttatgttgtagattcattccaaagaaagaaatagggttgagcacaagaggttgcatgatttggtgtttgtcaaatacaaccaacaattgaagcaaagatataatgcaagagatgaaattgatccaatttctcttaatgatattgatgtgtgcaatgaatggctcgtgggagagatggatcaagatgatgataatgatgctggaaatgatttggtatttgaagatgatgatgctctaaattgggcaactgtgtatcaggcttcgggggttggagagtgtaggatgtatactaggcggaaaaagcaaaaaacaacaagtgttgctgctgcccaaacttctaaaaaacaggcaatggttgttggatcttcatcaaggaagcaaaaagcagtccaagaaaatgatgaagatctagattttgaggagaatattgatcttgaatctaaagaagaagaaatcatggtcaattttgaggcgtctgatggggaagagggagagggagatgctccattaccatatgataacaacaaagatgattatgttgggattggagaagatgattagagcctcaaccttcactttgcactttgcattatgtttttatcattttcttattttgaactctttaatgagtttatttggtgttggtacttgattactgtatgaactcgtgacttttttagtttatttgaatgcaatccttttggtttttttcaatttcaatgagtttatatatatgtatttctttttttgtccg

SEQ ID NO: 8564 - DNA, 1132 bp, Glycine max
  Gm_smallRNAprecursor_1397
tttacaagattggtgctgaccactttggttccgactttgcaatggctcaaaggaaaacccattctcctagtaagaaacttttatcatactattttttttatgtattagttttataattcagaattctaagttatgctcttggttggtaattggtattgcagcatattggtggcgaatgtttgggtcacaaactccaaatttgcagaagctagctattaagattttgagtttaacttgcagtgcttcaggatgtgaaagaaattggagtgtctttgagcaagtaattgtgacaactctaactatactttttaattttatttaattttgatgatcaagttttatttggagtatatttgagattgaaatcaacatttatttgttatgttgtagattcattccaaaaaaagaaataggcttgagcacaagaggttgcatgatttggtgtttgtcaaatacaaccaacaattgaagcaaagatataatgcaagagatgaaattgatccaatttctcttaatgatattgatgtatgcaatgaatgactcgtgggagagatggatcaaaatgatgataatgatgctggaaatgatttggtatttgaagatgatgatgctctaaattggacaactgtgtatcaggcttcgggggttggagagtgtaggatgtatactaggcggaaaaagcaaaaaacaagtgttgctgctgcccaaacttctaaaaaacaggcaatgattgttggatcttcatcaaggaagcaaaaagcagtccaagaaaatgatgaggatctagatgttgaggagaatattgatgttgaatttgaagaagaagaaatcatggtcaattttgaggcgtctgatggggaagagggagagggagatgctccattaccatatgataacaacgaagatgattatgtggggattggagaagatgattagagcctcaaccttcactttgcactttgcataattttttttttgatcagcaaaaataagtatttatattaatgaagtatcaggggtactttaaagtacagatataggggtcagatttttggttccatggcagacttaatgtagtctaacatagaaccagtttctgggtacataaaatataataaactctagtaacagt

SEQ ID NO: 8565 - DNA, 1046 bp, Glycine max
  Gm_smallRNAprecursor_1398
ttaatatttcttagacatccaaagcagaataagatcaaacagacagataggaagtaagaatgcagtatgataaatgaaaatattatcttgaaaaatagatatcaagggtacaccggagaccggcttacaaaccccaggttttcataaacaaagaaaccgaagcggcgaagggagaagagagaaggatgaaaaatagaaatttattgattctagaaagaagcgcttacaaaaatcttgtttcagagcacctctcttcagaaacctgaaaaatggctaaatgaaagggtacctcacaacatacttgaggactccttatatagccaaaaatctaagaccggtagttttgaccgggactatttgactctttgttacaagacaagtagttttgaccgggactttaatggctacaagacaggtagtattgtccagcattaattacacattaattacaaacagactgttttgtgaccgaaattaaatttaatctaaacagataccaaaacaatcatcttcgttttggtaaaagggatcttcttcttcttcttcagcagaacttgtttcttccttctttgaggatgaagcttcttcttcctgctgtaacatttgtagaaattccttcagatttttagctaagacctcctttgatgtcgatcctgctaaaaatgctgccagatgagacttttggttcaaaaacacagaagtttctggatcagctgctttgaggaattctggatgggattggaaccagagttttacttgttctggatccgctttggatgagtgaaattatgcccaccattttacgaatgcgtgcctttgtagtgatggatattggtttgtcttttcagtcttgctgtaacgatattgccatgagaatatccatgacagtgcaaagcttgaaaagtatttaagatatgctggaattcgtgattcctgcgaattgtattgtttcttaaattgggcaaatccttgttggaccgtttctgggaatatctctgggattggtccaaagaagtcccaccattgcaaaaaccaattgggaaaat

SEQ ID NO: 8566 - DNA, 1114 bp, Glycine max
  Gm_smallRNAprecursor_1399
ggactttaatggctacaagacaggtagtattgtccagcattaattacacattaattacaaacagactgttttgtgaccgaaattaaatttaatctaaacagataccaaaacaatcatcttcgttttggtaaaagggatcttcttcttcttcttcagcagaacttgtttcttccttctttgaggatgaagcttcttcttcctgctgtaacatttgtagaaattccttcagatttttagctaagacctcctttgatgtcgatcctgctaaaaatgctgccagatgagacttttggttcaaaaacacagaagtttctggatcagctgctttgaggaattctggatgggattggaaccagagttttacttgttctggatccgctttggatgagtgaaattatgcccaccattttacgaatgcgtgcctttgtagtgatggatattggtttgtcttttcagtcttgctgtaacgatattgccatgagaatatccatgacagtgcaaagcttgaaaagtatttaagatatgctggaattcgtgattcctgcgaattgtattgtttcttaaattgggcaaatccttgttggaccgtttctgggaatatctctgggattggtccaaagaagtcccaccattgcaaaaaccaattgggaaaattgtaaattgtgttggtcttgaaatatatcagtcatgaatgcttgaagcgggtattttggtgccaaaacaccttagtccaagcatcaacgtaatcccaataggtataacctaccggatcaaatggaactgaaaatctctttcctttgttcaagtccaaaccaaagtgtcttggttgaagaacttttagtatttggattgtcgagtgggtgtttaaggtttggtcttttggatctttgaaatgtttgatagatactgagtttgaatctaccaaaatcaattcataaaagttcttgtctttaggatggtggttggtttgtagtgaaatcctggtgggaaagccttggccgtcgccttgaaaggatttttgtcccaaaattcaggttccatctgcaaaacagttaacaatttatttttataaatataattgttagtttgtttggtaggtggtgtttgagctttg

SEQ ID NO: 8567 - DNA, 1072 bp, Glycine max
  Gm_smallRNAprecursor_1400
gcttcttcttcctgctgtaacatttgtagaaattccttcagatttttagctaagacctcctttgatgtcgatcctgctaaaaatgctgccagatgagacttttggttcaaaaacacagaagtttctggatcagctgctttgaggaattctggatgggattggaaccagagttttacttgttctggatccgctttggatgagtgaaattatgcccaccattttacgaatgcgtgcctttgtagtgatggatattggtttgtcttttcagtcttgctgtaacgatattgccatgagaatatccatgacagtgcaaagcttgaaaagtatttaagatatgctggaattcgtgattcctgcgaattgtattgtttcttaaattgggcaaatccttgttggaccgtttctgggaatatctctgggattggtccaaagaagtcccaccattgcaaaaaccaattgggaaaattgtaaattgtgttggtcttgaaatatatcagtcatgaatgcttgaagcgggtattttggtgccaaaacaccttagtccaagcatcaacgtaatcccaataggtataacctaccggatcaaatggaactgaaaatctctttcctttgttcaagtccaaaccaaagtgtcttggttgaagaacttttagtatttggattgtcgagtgggtgtttaaggtttggtcttttggatctttgaaatgtttgatagatactgagtttgaatctaccaaaatcaattcataaaagttcttgtctttaggatggtggttggtttgtagtgaaatcctggtgggaaagccttggccgtcgccttgaaaggatttttgtcccaaaattcaggttccatctgcaaaacagttaacaatttatttttataaatataattgttagtttgtttggtaggtggtgtttgagctttggctaaaggtagttttcctttagtattggtggctgttttggtcattgacgcattttggatcattgtttgtaaatttgattcagattcatcatcagattctgaggcaatgtctgcccaagattttttgattatttttggaaatttggt

SEQ ID NO: 8568 - DNA, 1174 bp, Glycine max
  Gm_smallRNAprecursor_1401
gcgggtattttggtgccaaaacaccttagtccaagcatcaacgtaatcccaataggtataacctaccggatcaaatggaactgaaaatctctttcctttgttcaagtccaaaccaaagtgtcttggttgaagaacttttagtatttggattgtcgagtgggtgtttaaggtttggtcttttggatctttgaaatgtttgatagatactgagtttgaatctaccaaaatcaattcataaaagttcttgtctttaggatggtggttggtttgtagtgaaatcctggtgggaaagccttggccgtcgccttgaaaggatttttgtcccaaaattcaggttccatctgcaaaacagttaacaatttatttttataaatataattgttagtttgtttggtaggtggtgtttgagctttggctaaaggtagttttcctttagtattggtggctgttttggtcattgacgcattttggatcattgtttgtaaatttgattcagattcatcatcagattctgaggcaatgtctgcccaagattttttgattatttttggaaatttggtcagacccatgtcttgaagggcctgaagggtttcaattggccatgcatagtcggctgatgtttgtttggcggttgccggtttgggagattcctgagtggatggctcaggtttgattgaggcaatctgggttgatgacccttctaaattggttttctgggtagatgacccagcctgagttggtgacccagaagaggttgatgatttcttgatggttggctctggaagagccagtctggctcctttgcctgtactccttcctccccttagggagattcccgatgccttaggaggcattaccacttttctgtaagaattcacgggtaaggtagtcagataatgagtttgaggtgcccttgatgtattctatgtcaaaatcaaagacacttagaattgcttgccatcttgcaaaaatttgttttgaggcaaggtttttaacatctttttgtaaaatatctttggctgatttacaatcaaccctgattagaaatttttggtttaataaatccgattgaaatttggaaatgcacaaaacaattgctaaaacttcttttttaacagttgaatactttaattgtgcaggattccaatgttttgatgtatatgcaatgacatga

SEQ ID NO: 8569 - DNA, 1173 bp, Glycine max
  Gm_smallRNAprecursor_1402
cgggtattttggtgccaaaacaccttagtccaagcatcaacgtaatcccaataggtataacctaccggatcaaatggaactgaaaatctctttcctttgttcaagtccaaaccaaagtgtcttggttgaagaacttttagtatttggattgtcgagtgggtgtttaaggtttggtcttttggatctttgaaatgtttgatagatactgagtttgaatctaccaaaatcaattcataaaagttcttgtctttaggatggtggttggtttgtagtgaaatcctggtgggaaagccttggccgtcgccttgaaaggatttttgtcccaaaattcaggttccatctgcaaaacagttaacaatttatttttataaatataattgttagtttgtttggtaggtggtgtttgagctttggctaaaggtagttttcctttagtattggtggctgttttggtcattgacgcattttggatcattgtttgtaaatttgattcagattcatcatcagattctgaggcaatgtctgcccaagattttttgattatttttggaaatttggtcagacccatgtcttgaagggcctgaagggtttcaattggccatgcatagtcggctgatgtttgtttggcggttgccggtttgggagattcctgagtggatggctcaggtttgattgaggcaatctgggttgatgacccttctaaattggttttctgggtagatgacccagcctgagttggtgacccagaagaggttgatgatttcttgatggttggctctggaagagccagtctggctcctttgcctgtactccttcctccccttagggagattcccgatgccttaggaggcattaccacttttctgtaagaattcacgggtaaggtagtcagataatgagtttgaggtgcccttgatgtattctatgtcaaaatcaaagacacttagaattgcttgccatcttgcaaaaatttgttttgaggcaaggtttttaacatctttttgtaaaatatctttggctgatttacaatcaaccctgattagaaatttttggtttaataaatccgattgaaatttggaaatgcacaaaacaattgctaaaacttcttttttaacagttgaatactttaattgtgcaggattccaatgttttgatgtatatgcaatgacatga

SEQ ID NO: 8570 - DNA, 1176 bp, Glycine max
  Gm_smallRNAprecursor_1403
cgggtattttggtgccaaaacaccttagtccaagcatcaacgtaatcccaataggtataacctaccggatcaaatggaactgaaaatctctttcctttgttcaagtccaaaccaaagtgtcttggttgaagaacttttagtatttggattgtcgagtgggtgtttaaggtttggtcttttggatctttgaaatgtttgatagatactgagtttgaatctaccaaaatcaattcataaaagttcttgtctttaggatggtggttggtttgtagtgaaatcctggtgggaaagccttggccgtcgccttgaaaggatttttgtcccaaaattcaggttccatctgcaaaacagttaacaatttatttttataaatataattgttagtttgtttggtaggtggtgtttgagctttggctaaaggtagttttcctttagtattggtggctgttttggtcattgacgcattttggatcattgtttgtaaatttgattcagattcatcatcagattctgaggcaatgtctgcccaagattttttgattatttttggaaatttggtcagacccatgtcttgaagggcctgaagggtttcaattggccatgcatagtcggctgatgtttgtttggcggttgccggtttgggagattcctgagtggatggctcaggtttgattgaggcaatctgggttgatgacccttctaaattggttttctgggtagatgacccagcctgagttggtgacccagaagaggttgatgatttcttgatggttggctctggaagagccagtctggctcctttgcctgtactccttcctccccttagggagattcccgatgccttaggaggcattaccacttttctgtaagaattcacgggtaaggtagtcagataatgagtttgaggtgcccttgatgtattctatgtcaaaatcaaagacacttagaattgcttgccatcttgcaaaaatttgttttgaggcaaggtttttaacatctttttgtaaaatatctttggctgatttacaatcaaccctgattagaaatttttggtttaataaatccgattgaaatttggaaatgcacaaaacaattgctaaaacttcttttttaacagttgaatactttaattgtgcaggattccaatgttttgatgtatatgcaatgacatgatct

SEQ ID NO: 8571 - DNA, 1129 bp, Glycine max
  Gm_smallRNAprecursor_1404
ctgcaaaacagttaacaatttatttttataaatataattgttagtttgtttggtaggtggtgtttgagctttggctaaaggtagttttcctttagtattggtggctgttttggtcattgacgcattttggatcattgtttgtaaatttgattcagattcatcatcagattctgaggcaatgtctgcccaagattttttgattatttttggaaatttggtcagacccatgtcttgaagggcctgaagggtttcaattggccatgcatagtcggctgatgtttgtttggcggttgccggtttgggagattcctgagtggatggctcaggtttgattgaggcaatctgggttgatgacccttctaaattggttttctgggtagatgacccagcctgagttggtgacccagaagaggttgatgatttcttgatggttggctctggaagagccagtctggctcctttgcctgtactccttcctccccttagggagattcccgatgccttaggaggcattaccacttttctgtaagaattcacgggtaaggtagtcagataatgagtttgaggtgcccttgatgtattctatgtcaaaatcaaagacacttagaattgcttgccatcttgcaaaaatttgttttgaggcaaggtttttaacatctttttgtaaaatatctttggctgatttacaatcaaccctgattagaaatttttggtttaataaatccgattgaaatttggaaatgcacaaaacaattgctaaaacttcttttttaacagttgaatactttaattgtgcaggattccaatgttttgatgtatatgcaatgacatgatcttggccatggactctttgtttgaggatgccaccataacctatgtctgaagcatcagtttcgacaattttaaatgcctgtggaataggaagatacagacatttaatggattggactttgactttgatttctttaacagtttgtgtatggaggtcagaccaaggaggcggatttttcttcagcctatcatgcaatggcttgacaatattgtttaaataggggacaaattctcctacgtaatttagacaacctagaaatctttgtaactgggttttgtctaagatttggttggggaa

SEQ ID NO: 8572 - DNA, 1115 bp, Glycine max
  Gm_smallRNAprecursor_1405
acaatttatttttataaatataattgttagtttgtttggtaggtggtgtttgagctttggctaaaggtagttttcctttagtattggtggctgttttggtcattgacgcattttggatcattgtttgtaaatttgattcagattcatcatcagattctgaggcaatgtctgcccaagattttttgattatttttggaaatttggtcagacccatgtcttgaagggcctgaagggtttcaattggccatgcatagtcggctgatgtttgtttggcggttgccggtttgggagattcctgagtggatggctcaggtttgattgaggcaatctgggttgatgacccttctaaattggttttctgggtagatgacccagcctgagttggtgacccagaagaggttgatgatttcttgatggttggctctggaagagccagtctggctcctttgcctgtactccttcctccccttagggagattcccgatgccttaggaggcattaccacttttctgtaagaattcacgggtaaggtagtcagataatgagtttgaggtgcccttgatgtattctatgtcaaaatcaaagacacttagaattgcttgccatcttgcaaaaatttgttttgaggcaaggtttttaacatctttttgtaaaatatctttggctgatttacaatcaaccctgattagaaatttttggtttaataaatccgattgaaatttggaaatgcacaaaacaattgctaaaacttcttttttaacagttgaatactttaattgtgcaggattccaatgttttgatgtatatgcaatgacatgatcttggccatggactctttgtttgaggatgccaccataacctatgtctgaagcatcagtttcgacaattttaaatgcctgtggaataggaagatacagacatttaatggattggactttgactttgatttctttaacagtttgtgtatggaggtcagaccaaggaggcggatttttcttcagcctatcatgcaatggcttgacaatattgtttaaataggggacaaattctcctacgtaatttagacaacctagaaatctttgtaactgggttttgtctaagatttggttggggaa

SEQ ID NO: 8573 - DNA, 1218 bp, Glycine max
  Gm_smallRNAprecursor_1406
tggctcaggtttgattgaggcaatctgggttgatgacccttctaaattggttttctgggtagatgacccagcctgagttggtgacccagaagaggttgatgatttcttgatggttggctctggaagagccagtctggctcctttgcctgtactccttcctccccttagggagattcccgatgccttaggaggcattaccacttttctgtaagaattcacgggtaaggtagtcagataatgagtttgaggtgcccttgatgtattctatgtcaaaatcaaagacacttagaattgcttgccatcttgcaaaaatttgttttgaggcaaggtttttaacatctttttgtaaaatatctttggctgatttacaatcaaccctgattagaaatttttggtttaataaatccgattgaaatttggaaatgcacaaaacaattgctaaaacttcttttttaacagttgaatactttaattgtgcaggattccaatgttttgatgtatatgcaatgacatgatcttggccatggactctttgtttgaggatgccaccataacctatgtctgaagcatcagtttcgacaattttaaatgcctgtggaataggaagatacagacatttaatggattggactttgactttgatttctttaacagtttgtgtatggaggtcagaccaaggaggcggatttttcttcagcctatcatgcaatggcttgacaatattgtttaaataggggacaaattctcctacgtaatttagacaacctagaaatctttgtaactgggttttgtctaagatttggttggggaatttgctagcaaactctattgacctttcgattggaatgattgtaccttgatatatattgtgaccaaggaatcgaattcgagtttggaaaagattgatttttgatttggagactgccaaaccattttgtttgatgatatgtatgaaggtttgaagatgtttgaaatgttggtcaatgttttgggaaaagattaaaacatcatctatgtagacaatgacaaattttgaatagggattaaaaatatcgttcataattttttgaaattctgaaggggcattcttcagtccgaatggcatcacgttccattcatattgcccgaaaggtacagtaaacgttgttttgtacttatctgattcttggatttggatctgccaaaatctatatttcatatcaaattttgaaaatatct

SEQ ID NO: 8574 - DNA, 1071 bp, Glycine max
  Gm_smallRNAprecursor_1407
taaattggttttctgggtagatgacccagcctgagttggtgacccagaagaggttgatgatttcttgatggttggctctggaagagccagtctggctcctttgcctgtactccttcctccccttagggagattcccgatgccttaggaggcattaccacttttctgtaagaattcacgggtaaggtagtcagataatgagtttgaggtgcccttgatgtattctatgtcaaaatcaaagacacttagaattgcttgccatcttgcaaaaatttgttttgaggcaaggtttttaacatctttttgtaaaatatctttggctgatttacaatcaaccctgattagaaatttttggtttaataaatccgattgaaatttggaaatgcacaaaacaattgctaaaacttcttttttaacagttgaatactttaattgtgcaggattccaatgttttgatgtatatgcaatgacatgatcttggccatggactctttgtttgaggatgccaccataacctatgtctgaagcatcagtttcgacaattttaaatgcctgtggaataggaagatacagacatttaatggattggactttgactttgatttctttaacagtttgtgtatggaggtcagaccaaggaggcggatttttcttcagcctatcatgcaatggcttgacaatattgtttaaataggggacaaattctcctacgtaatttagacaacctagaaatctttgtaactgggttttgtctaagatttggttggggaatttgctagcaaactctattgacctttcgattggaatgattgtaccttgatatatattgtgaccaaggaatcgaattcgagtttggaaaagattgatttttgatttggagactgccaaaccattttgtttgatgatatgtatgaaggtttgaagatgtttgaaatgttggtcaatgttttgggaaaagattaaaacatcatctatgtagacaatgacaaattttgaatagggattaaaaatatcgttcataattttttgaaattctgaaggggcattcttcagtccgaatggcatcacgttcc

SEQ ID NO: 8575 - DNA, 1073 bp, Glycine max
  Gm_smallRNAprecursor_1408
taaattggttttctgggtagatgacccagcctgagttggtgacccagaagaggttgatgatttcttgatggttggctctggaagagccagtctggctcctttgcctgtactccttcctccccttagggagattcccgatgccttaggaggcattaccacttttctgtaagaattcacgggtaaggtagtcagataatgagtttgaggtgcccttgatgtattctatgtcaaaatcaaagacacttagaattgcttgccatcttgcaaaaatttgttttgaggcaaggtttttaacatctttttgtaaaatatctttggctgatttacaatcaaccctgattagaaatttttggtttaataaatccgattgaaatttggaaatgcacaaaacaattgctaaaacttcttttttaacagttgaatactttaattgtgcaggattccaatgttttgatgtatatgcaatgacatgatcttggccatggactctttgtttgaggatgccaccataacctatgtctgaagcatcagtttcgacaattttaaatgcctgtggaataggaagatacagacatttaatggattggactttgactttgatttctttaacagtttgtgtatggaggtcagaccaaggaggcggatttttcttcagcctatcatgcaatggcttgacaatattgtttaaataggggacaaattctcctacgtaatttagacaacctagaaatctttgtaactgggttttgtctaagatttggttggggaatttgctagcaaactctattgacctttcgattggaatgattgtaccttgatatatattgtgaccaaggaatcgaattcgagtttggaaaagattgatttttgatttggagactgccaaaccattttgtttgatgatatgtatgaaggtttgaagatgtttgaaatgttggtcaatgttttgggaaaagattaaaacatcatctatgtagacaatgacaaattttgaatagggattaaaaatatcgttcataattttttgaaattctgaaggggcattcttcagtccgaatggcatcacgttccat

SEQ ID NO: 8576 - DNA, 1178 bp, Glycine max
  Gm_smallRNAprecursor_1409
tggttggctctggaagagccagtctggctcctttgcctgtactccttcctccccttagggagattcccgatgccttaggaggcattaccacttttctgtaagaattcacgggtaaggtagtcagataatgagtttgaggtgcccttgatgtattctatgtcaaaatcaaagacacttagaattgcttgccatcttgcaaaaatttgttttgaggcaaggtttttaacatctttttgtaaaatatctttggctgatttacaatcaaccctgattagaaatttttggtttaataaatccgattgaaatttggaaatgcacaaaacaattgctaaaacttcttttttaacagttgaatactttaattgtgcaggattccaatgttttgatgtatatgcaatgacatgatcttggccatggactctttgtttgaggatgccaccataacctatgtctgaagcatcagtttcgacaattttaaatgcctgtggaataggaagatacagacatttaatggattggactttgactttgatttctttaacagtttgtgtatggaggtcagaccaaggaggcggatttttcttcagcctatcatgcaatggcttgacaatattgtttaaataggggacaaattctcctacgtaatttagacaacctagaaatctttgtaactgggttttgtctaagatttggttggggaatttgctagcaaactctattgacctttcgattggaatgattgtaccttgatatatattgtgaccaaggaatcgaattcgagtttggaaaagattgatttttgatttggagactgccaaaccattttgtttgatgatatgtatgaaggtttgaagatgtttgaaatgttggtcaatgttttgggaaaagattaaaacatcatctatgtagacaatgacaaattttgaatagggattaaaaatatcgttcataattttttgaaattctgaaggggcattcttcagtccgaatggcatcacgttccattcatattgcccgaaaggtacagtaaacgttgttttgtacttatctgattcttggatttggatctgccaaaatctatatttcatatcaaattttgaaaatatctttgcagaatttaatctgttaagcaaatcttttttgtttggaataggatatctaatccattgtaatgcttg

SEQ ID NO: 8577 - DNA, 1109 bp, Glycine max
  Gm_smallRNAprecursor_1410
acgggtaaggtagtcagataatgagtttgaggtgcccttgatgtattctatgtcaaaatcaaagacacttagaattgcttgccatcttgcaaaaatttgttttgaggcaaggtttttaacatctttttgtaaaatatctttggctgatttacaatcaaccctgattagaaatttttggtttaataaatccgattgaaatttggaaatgcacaaaacaattgctaaaacttcttttttaacagttgaatactttaattgtgcaggattccaatgttttgatgtatatgcaatgacatgatcttggccatggactctttgtttgaggatgccaccataacctatgtctgaagcatcagtttcgacaattttaaatgcctgtggaataggaagatacagacatttaatggattggactttgactttgatttctttaacagtttgtgtatggaggtcagaccaaggaggcggatttttcttcagcctatcatgcaatggcttgacaatattgtttaaataggggacaaattctcctacgtaatttagacaacctagaaatctttgtaactgggttttgtctaagatttggttggggaatttgctagcaaactctattgacctttcgattggaatgattgtaccttgatatatattgtgaccaaggaatcgaattcgagtttggaaaagattgatttttgatttggagactgccaaaccattttgtttgatgatatgtatgaaggtttgaagatgtttgaaatgttggtcaatgttttgggaaaagattaaaacatcatctatgtagacaatgacaaattttgaatagggattaaaaatatcgttcataattttttgaaattctgaaggggcattcttcagtccgaatggcatcacgttccattcatattgcccgaaaggtacagtaaacgttgttttgtacttatctgattcttggatttggatctgccaaaatctatatttcatatcaaattttgaaaatatctttgcagaatttaatctgttaagcaaatcttttttgtttggaataggatatctaatccattgtaatgcttgatttagtggtttgtaatttatgactaaacggggtgttc

SEQ ID NO: 8578 - DNA, 1196 bp, Glycine max
  Gm_smallRNAprecursor_1411
aaggtttttaacatctttttgtaaaatatctttggctgatttacaatcaaccctgattagaaatttttggtttaataaatccgattgaaatttggaaatgcacaaaacaattgctaaaacttcttttttaacagttgaatactttaattgtgcaggattccaatgttttgatgtatatgcaatgacatgatcttggccatggactctttgtttgaggatgccaccataacctatgtctgaagcatcagtttcgacaattttaaatgcctgtggaataggaagatacagacatttaatggattggactttgactttgatttctttaacagtttgtgtatggaggtcagaccaaggaggcggatttttcttcagcctatcatgcaatggcttgacaatattgtttaaataggggacaaattctcctacgtaatttagacaacctagaaatctttgtaactgggttttgtctaagatttggttggggaatttgctagcaaactctattgacctttcgattggaatgattgtaccttgatatatattgtgaccaaggaatcgaattcgagtttggaaaagattgatttttgatttggagactgccaaaccattttgtttgatgatatgtatgaaggtttgaagatgtttgaaatgttggtcaatgttttgggaaaagattaaaacatcatctatgtagacaatgacaaattttgaatagggattaaaaatatcgttcataattttttgaaattctgaaggggcattcttcagtccgaatggcatcacgttccattcatattgcccgaaaggtacagtaaacgttgttttgtacttatctgattcttggatttggatctgccaaaatctatatttcatatcaaattttgaaaatatctttgcagaatttaatctgttaagcaaatcttttttgtttggaataggatatctaatccattgtaatgcttgatttagtggtttgtaatttatgactaaacggggtgttccacgctcaatctcagattgtttgttgacataaaaagccgcacaagaccatgggcttttgcttttccggattaggcctttatcaagcaaatccttgatttctttttgacagtattggagaagttcttcattcatttggattggtcttacttttgtgggaatttgtttttccctaaagtctttctcataagggagat

SEQ ID NO: 8579 - DNA, 1079 bp, Glycine max
  Gm_smallRNAprecursor_1412
gaaaaatggaatgtaaaaaataatttaaaaaatattcatataactgttggtccttataataatttaaaaaataagcttaattatgaatattatattagggattctaattggaatgtatgttaggagactccttgtccttataatattctttgccttaattggtcaatagtgttttatataacgaaatactcgagtcatttctaatgcaagagaccacatttatagttgttaatctggattatctccactcatttaattttgcttattatgagttatcatatttttaggttgggccgaattgaggcaatttaataatgggtgttgctaggtgcacccagcattattgttggtgcacccagcacttaaggtaaaatgatgaaaatatccttgatccgtaagccatttaagttgatccgtaaaagccttacggatcaacttgatccgtagaaaccttacggatcaacttgatctgtaagtcttttacggaacaatacgaatcaacatgatccgtaagctttttacggatcaacttgatctgtaagacttttacggatcatgttgatccgtattattccgtaaaaggcttacggatcaagttgatccgtatcaatcttacggatcaccctcacacacacccatcacaaatgcaaaaaaagtgtaggggcagttttggtattttaattaaatgctgggtgcacctagcaccactctttaataatagtctataaattttctagtcctatacagctcttggcaagccacaagcccaacggattgatgtattgcctactcacttttgtaaaatataaaaaattatcaaaataaattcacctttatatagcaagttaaccaaaaaaaattcaaccactgtaaagtaaaataaaaatatatgtttccatttgtactataaaataaaaaaatataatgtaataataaaaataaaataaggtgcatcaattgtaacaataaacaagtgttagaaattaaaaataaaactcaatgtacataaaatattaactttaaaatggacaatggcaacatatgtagtattaaataaaatatattgtaattttaccaat

SEQ ID NO: 8580 - DNA, 1080 bp, Glycine max
  Gm_smallRNAprecursor_1413
gaaaaatggaatgtaaaaaataatttaaaaaatattcatataactgttggtccttataataatttaaaaaataagcttaattatgaatattatattagggattctaattggaatgtatgttaggagactccttgtccttataatattctttgccttaattggtcaatagtgttttatataacgaaatactcgagtcatttctaatgcaagagaccacatttatagttgttaatctggattatctccactcatttaattttgcttattatgagttatcatatttttaggttgggccgaattgaggcaatttaataatgggtgttgctaggtgcacccagcattattgttggtgcacccagcacttaaggtaaaatgatgaaaatatccttgatccgtaagccatttaagttgatccgtaaaagccttacggatcaacttgatccgtagaaaccttacggatcaacttgatctgtaagtcttttacggaacaatacgaatcaacatgatccgtaagctttttacggatcaacttgatctgtaagacttttacggatcatgttgatccgtattattccgtaaaaggcttacggatcaagttgatccgtatcaatcttacggatcaccctcacacacacccatcacaaatgcaaaaaaagtgtaggggcagttttggtattttaattaaatgctgggtgcacctagcaccactctttaataatagtctataaattttctagtcctatacagctcttggcaagccacaagcccaacggattgatgtattgcctactcacttttgtaaaatataaaaaattatcaaaataaattcacctttatatagcaagttaaccaaaaaaaattcaaccactgtaaagtaaaataaaaatatatgtttccatttgtactataaaataaaaaaatataatgtaataataaaaataaaataaggtgcatcaattgtaacaataaacaagtgttagaaattaaaaataaaactcaatgtacataaaatattaactttaaaatggacaatggcaacatatgtagtattaaataaaatatattgtaattttaccaatt

SEQ ID NO: 8581 - DNA, 1185 bp, Glycine max
  Gm_smallRNAprecursor_1414
ctacattgattgacaccattttgttcatcagcaacacaatgtacaaccaccagtcggtatactcgaggttggcatgaccttcgatgacaaagcacagtgtattcgagcaatcaaagaatacaacatcagaaatcattttgattgcagaacaatttactctgaccagagaaggctaaactttatctgcaagttacatgaaaatggttgtacatggagcttgggcacatgcaattcaaagaggcataacaaatggattatcaagagtatcaggggtcatcacacttgtctcgtgccgatgctcagacaagatcatcgccaactcgacaaacacgtcatagcacagatcatccaaccaattgtcaaaacaaacccaaccgtctccatcaagacgttgattgcagagatcaaaacgttcatgaattataccccatcctataagaagacatggttagcaaagtaaagagcgttgaagatgattcatggaaattgggaagaatcatatgccaaactgccaaaactttttggagctttgcaatcttgtgttcccgagactgtggtcgctgctcaaacagaatccttgtacgaggggggagaaatagtaccggacaaaagattgtttaaaggtgtcttttgttcatttggtccatgcattaatggttttgcatatagcaaacccatagtacaagtagatggtacatggctttacgggaagtatactggcacactgatggagcaaaccatatcttcatgattgcctatgccattgtagaaggggagacaacttcagcttgggggttttttctaaagaatttgagaagacatgttactccacaaattaacatttctcttattcaagaccgacacccctcaattataagtgcctacaacaacccaagtaacttatgggtccaggccacatcccatttcttttgcttgcgccacattgcacaaaactttcttcgcggtaactcaaattgcaaacatttaataggataccccttgcctcaaagcatgaccacacaagcactcatatccatttcctcctcttaataggataccccatacaactcataacaaatactcccaatccatcgagtcatacaccttctcaaaatcaactttaaacataatcaactccctccgatctcctagcctcttccaccaactcattagagatcattacac

SEQ ID NO: 8582 - DNA, 1092 bp, Glycine max
  Gm_smallRNAprecursor_1415
ttgacttgcagtgcttcaggatgtgaaagaaattggagtgtgtttgagcaagtaattgtgacaaaactctaactatagtttttaattttatttaattttgatgatcaagttttatttggagtatatttgagattgaaatcaacatttattttttatgttgtagattcattccaaaaaaagaaataggcttgagcacaagaggttgcatgatttggtgtttgtcaaatacaaccaacaattgaagcaaagatataatgcaagagatgaaattgatccaatttttcttaatgatattgatgtgtgcaatgaatggctcgtgcgagagatggatcaagatgatgataatgatgctggaaatgatttggtatttgaagatgatgatgctctaaattgggcaactgtgtatcaggcttcgggggttggagagtgtaggatgtatactaggcggaaaaagcaaaaaacaacaagtgttgttgctgcccaaacttctaaaaaacaggcaatggttgttggatcttcatcaaggaagcaaaaagcagtccaagaaaatgatgaagatctagattttgaggagaatattgatcttgaatctgaagaagaagaaatcatggtcaattttgaggcgtctgatggggaagagggagagggagatgctccattaccatatgataacaacgaagatgattatgttgggattggagaaaatgattagagcctcaaccttcccttttcactttgcattatgtttttatcattttcttattttgaactcttcaatgagtttatatatatgtttttttttttgtccgtcatgacatccgccattttccgctacgtcatccgccatatttttatggcggatttttgactttccgccatgaaccgccatctgccattaacaactttcacatcatgcttagactattaagatgctggctttacatttgtttgaaggtgtttgccccagtagaaataagcttcttgctttattaggttccaaatttcagttcctgagttatgagaactgcatcattgattacatattttccgaatagagctattgaatctaattttgttcaggaaactaaacaa

SEQ ID NO: 8583 - DNA, 1092 bp, Glycine max; identical to SEQ ID NO: 8582
  Gm_smallRNAprecursor_1416

SEQ ID NO: 8584 - DNA, 1166 bp, Glycine max
  Gm_smallRNAprecursor_1417
tttactgtttttttttcttatatggtaaatataaatcagataaggttatgccatagggacatggtcatttttacccctaacaatcttagaagtaaatatagaccatgtttttacgccatacccttataccatttatatttacatattagcaaaaagaaacagtaaaatcttaaggacaaatagttaagaaacttgttcattagctgcaaatatctttccctcctcaagtgcaaacttcttgcgtagccgctcttggtgctcagaaaatcccaaaaacaaatccctcttatgactagctattttgaattctttagttcctgaatgtacaaccttcaaattgttgctcattcccctctttgagaatgaggaggatcttcataggacttcatccagctgatgtttgtcggcagtttcatcatccaccacccttttcttctgtgccttttcacgttcattgttgttaaacccatatttatgccttcttcccttcatgtcttgtttgatcacaactttagctgaatctcccatcttcagcatagttgaatctcctgtcttattgtccaatgccaaattttgatggcctgtatctcttttgttcgtatgttctactgcttcagcttcacaatgcatagagcaatcagaattttcgagtcatcaccaaaggcttctgcatcagcgttgacactctccaccctctttggtttatgcttctgtgttttcttccatgcttccaccttataattctcagatttattggaggtcccactagaaggatcaacaccaatccgtgcctgttcctcctctaccagctcaatatctttcctttcaccttagcttttgaaaactacactgtaatttacaaaacaaaagttgaaaggaaagatattgacatgatagacgaggaagaagcacagattggtagtgatcgttctagtgcaacctcgaataaagctgagatttataacgaggaggcacggaagaaaacacagaagcataaaccaaagagggtggagagtgtcaatgagcttccctttattgttggaaaactttgtcgtgcagtaagtagcaacttcatggtccttgaatacaatttctttcatgttcatggtcggtcattttttatagttttcatttatatgtgcctagtgttggcaacatggttaatt

SEQ ID NO: 8585 - DNA, 1188 bp, Glycine max
  Gm_smallRNAprecursor_1418
gccgtctttgcattttgtgggtcaacaaacatctttgtctttcgcctataccagaccatgtagtccgagttaaagctcaataggccttcttgtcggggataagcgtcgaccctaaatgcatgacgattattccactgatgaatcattggggcgaacaatttcccccaattttcgtcatgtttcccttttaatgttatgccatgaatgtttaagggttgtgaaggagactctggaattggttgttgcatcccaaattgtctcaacactctgtccggttggtgccactcaataacttggaaacaaattagtggcaccaccgcgtaccacgcgagacttccgactaaacaaacgggaggcaacagtgatataacggttgatgggtacgactcccacacaaactgcatataacaacatagttgtgaacattttagtaaaataacacatataattttttattttacaaatacaatagcatgttcgtacctcatgacgtttcataatatccaacttgcgacgaaaaactctcacatcatcattgccgatatgttggtttccacgtcgcagccacctacaaagattaaaatttaatatatgctaaaaccatttattctattgaaatgaaagacgctgttaaaaatgactaacctgtgccccagtggtgtattttctacttgggaaggagtcctctttggagccaaggttggacatcgttcccatgcccacatttgtagtaagatgcacatacctccgattgatttagttttataatcggtggcattgcacatctctctgtatagaaaaccaagtacggcggctccccatgcatatctgccacattcttcaaagtcacgtaaaaattgaaggtaccttagcgaaactttgttactgcttttgtcaacgaacaagacacctccaatgaatctcagtatccatgcacgggcaaaccttcgtacttgttcttcgtcgtcgttatttatttgtgcaaaatggtgagccaaccaacttaatttaaccacactacctctaatttcatcttcttgtggtctgactcccaataattcctcacataaatcagcccaatcaagatttgttggaccgattaatggtaaaccatccacacttatacctaacaatacaaagacgtcttggagagtaatagtacattctccgcatctcatgtgaaaggta

SEQ ID NO: 8586 - DNA, 1103 bp, Glycine max
  Gm_smallRNAprecursor_1419
tttaacttgtatgatctcttattttctggtttaaacttctactatttgtcgtgtgaacaatttagttgtgttttagcaaggtatgatagtttcttttgaaaagattgcaactgccactaaaattcctttattctttactcaccgtaagaatgtgtatatatatttatccttatggatttggattttaattattacagataaaactgtatacttttcagcattttgtgtggtgggtgtgtgacattttgcaattttggttcagctggaaatggatctgattgagtctcaaggaaggtttttttttttaatttgattatacttcattcccctcaaaagtacttctttcatttttttatacttcaaacttcaaaccacaggatcataggtgtagctacatacctagctaggttctctctttattttaaaggatctctctacacacacatgtcataggtgtggttcagaacttgagatgtttccttgcaaaggtgaggttgagaggaatgttgtctggctcgaggtcatggaggaggaggagagtactgagatgagtgaaagtttccaatggaaatttaccctcttaacacaaaaaaaaattgattctcggaccaggcttcattccccacacccaacttttgttttttattcctttcagtttctttctctccattttcatatctgtcttgcatgcctttatggtaaggctttctctttgttgcatctttctctcaatttgcacacacacacaataacatttactcacttagacctgaagggatcaactttgtaacaggatatgaatcttctaggcatcatgtaggcaaaactatcaaagtttaagtgtaatcatcaaaagaaacaatttctttacaaaaatataggacctcaagaataattctagtccattcaaacatttatatctaccatattaaactttaggatcaagttgaagaattgaatgagggtataaataaactaataaataaaacatatcataataaaaatacatactctttgttatcaagcttcacctcaattcccccatattcaggcaaaataacagtatcacctttcttaacagccacaagaattagcttcccatt

SEQ ID NO: 8587 - DNA, 1103 bp, Glycine max; identical to SEQ ID NO: 8586
  Gm_smallRNAprecursor_1420

SEQ ID NO: 8588 - DNA, 1103 bp, Glycine max; identical to SEQ ID NO: 8586
  Gm_smallRNAprecursor_1421

SEQ ID NO: 8589 - DNA, 1104 bp, Glycine max
  Gm_smallRNAprecursor_1422
tttaacttgtatgatctcttattttctggtttaaacttctactatttgtcgtgtgaacaatttagttgtgttttagcaaggtatgatagtttcttttgaaaagattgcaactgccactaaaattcctttattctttactcaccgtaagaatgtgtatatatatttatccttatggatttggattttaattattacagataaaactgtatacttttcagcattttgtgtggtgggtgtgtgacattttgcaattttggttcagctggaaatggatctgattgagtctcaaggaaggtttttttttttaatttgattatacttcattcccctcaaaagtacttctttcatttttttatacttcaaacttcaaaccacaggatcataggtgtagctacatacctagctaggttctctctttattttaaaggatctctctacacacacatgtcataggtgtggttcagaacttgagatgtttccttgcaaaggtgaggttgagaggaatgttgtctggctcgaggtcatggaggaggaggagagtactgagatgagtgaaagtttccaatggaaatttaccctcttaacacaaaaaaaaattgattctcggaccaggcttcattccccacacccaacttttgttttttattcctttcagtttctttctctccattttcatatctgtcttgcatgcctttatggtaaggctttctctttgttgcatctttctctcaatttgcacacacacacaataacatttactcacttagacctgaagggatcaactttgtaacaggatatgaatcttctaggcatcatgtaggcaaaactatcaaagtttaagtgtaatcatcaaaagaaacaatttctttacaaaaatataggacctcaagaataattctagtccattcaaacatttatatctaccatattaaactttaggatcaagttgaagaattgaatgagggtataaataaactaataaataaaacatatcataataaaaatacatactctttgttatcaagcttcacctcaattcccccatattcaggcaaaataacagtatcacctttcttaacagccacaagaattagcttcccattg

SEQ ID NO: 8590 - DNA, 1104 bp, Glycine max; identical to SEQ ID NO: 8589
  Gm_smallRNAprecursor_1423

SEQ ID NO: 8591 - DNA, 1104 bp, Glycine max; identical to SEQ ID NO: 8589
  Gm_smallRNAprecursor_1424

SEQ ID NO: 8592 - DNA, 1105 bp, Glycine max
  Gm_smallRNAprecursor_1425
tttaacttgtatgatctcttattttctggtttaaacttctactatttgtcgtgtgaacaatttagttgtgttttagcaaggtatgatagtttcttttgaaaagattgcaactgccactaaaattcctttattctttactcaccgtaagaatgtgtatatatatttatccttatggatttggattttaattattacagataaaactgtatacttttcagcattttgtgtggtgggtgtgtgacattttgcaattttggttcagctggaaatggatctgattgagtctcaaggaaggtttttttttttaatttgattatacttcattcccctcaaaagtacttctttcatttttttatacttcaaacttcaaaccacaggatcataggtgtagctacatacctagctaggttctctctttattttaaaggatctctctacacacacatgtcataggtgtggttcagaacttgagatgtttccttgcaaaggtgaggttgagaggaatgttgtctggctcgaggtcatggaggaggaggagagtactgagatgagtgaaagtttccaatggaaatttaccctcttaacacaaaaaaaaattgattctcggaccaggcttcattccccacacccaacttttgttttttattcctttcagtttctttctctccattttcatatctgtcttgcatgcctttatggtaaggctttctctttgttgcatctttctctcaatttgcacacacacacaataacatttactcacttagacctgaagggatcaactttgtaacaggatatgaatcttctaggcatcatgtaggcaaaactatcaaagtttaagtgtaatcatcaaaagaaacaatttctttacaaaaatataggacctcaagaataattctagtccattcaaacatttatatctaccatattaaactttaggatcaagttgaagaattgaatgagggtataaataaactaataaataaaacatatcataataaaaatacatactctttgttatcaagcttcacctcaattcccccatattcaggcaaaataacagtatcacctttcttaacagccacaagaattagcttcccattgg

SEQ ID NO: 8593 - DNA, 1105 bp, Glycine max; identical to SEQ ID NO: 8592
  Gm_smallRNAprecursor_1426

SEQ ID NO: 8594 - DNA, 1105 bp, Glycine max; identical to SEQ ID NO: 8592
  Gm_smallRNAprecursor_1427

SEQ ID NO: 8595 - DNA, 1037 bp, Glycine max
  Gm_smallRNAprecursor_1428
ttagtggggcagacacttaacaccttccttgcttggccaacacatcttgtgaagcatttatcagaacaagtattttactctaattatatgtttatttttttccattaatttgttcactgtaatcaaaacttgctaattaactatgttttattaacatgcagctgtgtctccagcaaaatctccagaaagcccggatgaagaggtcgatgatcccctgtacctgatgacattgaccatcccacaactgtttttgaagccgctccaggttatgtgggatgctaccatattcggggtgtttaatcaaaacttcttgttgtatataaagcacgaagatctctctgaaattgcacacggtggtcaatgtctcagcatatctgttatacagttttggattctgtaagtcattttagattactattaattaccaaagtaattattttaaattcatacataattaactttgacttaacaacacagtcatctgactgagacaagtgtgcgagcggggaattctgatgtgtatggattcctcgagccacagtccattcagagatctgggcaatcacaatttgaatccgaaagttacatcaagagttggatacagagttcaaaacgagatgtttaccttggagcctacctgaatgggtaagtgaaacacaataattgaatttaaataatctatactactacaataacccatattcgtctctactacagcagacactggcaaatggtcgtcattctgcctaaggaaaacatagttgtctggttttgttctttacataacaggccagacaactaccttaagggaataattaacagattagtattattttcaatacattttcattggcataactcaacaacatcaatattttaatgttcctcatattcaacactagtgctttgaaaggacttgatgatactccacaaccgaaatccaaggctgctgctaggtagattgttgttaaggtacgtgatttaaataaaagttctacttatatatattttatgtgtgtgtacactaattgtagtta

SEQ ID NO: 8596 - DNA, 1071 bp, Glycine max
  Gm_smallRNAprecursor_1429
ggtaggattgcattagaatgacccagcctgggttggtgacctagaagatactgaagatgcttttttggtagtcggctctggaagagccagtttgaaaccttttcctgagcttcagcctcctctcagggaggtccctactgccttaggaggcatcaccgtttttctgtaagaattcacgggtaagatatttaggcagagagtttgaggtgcccttgatatattctatttcaaaatcaaagacacttaaaatttcttgccatcttgcaaaaatttgttttgaggcaagattttttacatccttttgtaaaatatctttggttgatttacaatcaacccttattaaaaaaatttgatttaataaatctgattgaaatttggaaatgcacaaaacaatttctaaaacttcctttttaacagttgaatactttaattgtgcagagttccaatgctttgatgtgtatgcaatgacatgttcttggccatggactctttgtttgaggatgccaccataacctatgtctgatgcatcaatttcgacaattttgaatgcgtgtaggatagggaggtacagacattttatggattggactttgagtttgatatctttgacagtttgagtatggaggtcagaccaagaaggcgggtttttcttcagcctatcatgcagtggtttgacaatgttgtttcaatatggaacaaattcacctacataattcagacagccgagaaatctttgtaactgggttttgtctaagatttgattagggaatttgctagcaaattctatagatttgtctattgggatgattgtaccttgatatatgttatgaccaaggaacctaattctagttttaaaaagattgattttggatttagagactgctaaaccattatgtttgatgatatggatgaaagtctgaagatgtttaaaatgttggtcaatgttttgggaaaagactaaaacatcatctatgtagacgatgacaaattttgagtaaggattgaaaatatcattcataattttttgaaattctgaaggggcattcttcagtccgaatggcattacattcc

SEQ ID NO: 8597 - DNA, 1098 bp, Glycine max
  Gm_smallRNAprecursor_1430
ctttttttctgagagcatcatgccatgctggttggctatctcaaagaattgattcaacaattttttatgagaggcaatatcttttgagagaaggaggatgtcatctatgtagacaagagtgttttctagaataggttcaaagattttgatcatggctttctggaagagagagggtgctacttttagaccaaaaggtaggactgacaattgatacagagcatttggaatacaaaaggttgttttataccggtcttctggttttaggccaagttgccaaaatcctgattttaaatcaaacttggaaagtaagtttgattctctgatcaaggttgggagagatgaggcctttgggattggaaacttatcatctttgagaaaatgattgagaggcttatagtcaatgactaaccttttctttccccttaatttttcagctcttttttctacgtaaaaagcttggcatgcccggtttgaatgggttggctcaatcagaccttgcctcagtagatcttggcattcttgtcttgctgcttgtagatctgaaggtgtcatccctggatgggttgcttttgttggattgatatcttcatttaatctgaatggtagatcaacaaagtattcttttttttttccataaaggatatggattgttgaaatcttcatgactgtttgcgcatagggaggaaatattttgtttaaactctccaacttctggcgagacttctgctaaagagaaaaaccttgtaatttctaaagaaggcttgaattctcttttgaatttgatcctagtagaatgtatttggagtttatcagcagcagtatagacatccatccctataaggaggtctctatcaggaaatttgcttctaatgactttggtccagatgatacaatcaggaaaaaactcgatgcctattggagcatgcgttactaagtcagttatgaaaactttcccattagctgctacaaaataggctacttcatttttccaatattcttggggaagaatatctggatccatcatcgtcctttgagctccagtgtctatgaaagaaataactttgatagttttttcaaactttttttggcaatacttga

SEQ ID NO: 8598 - DNA, 1208 bp, Glycine max
  Gm_smallRNAprecursor_1431
ctaaggcatcaggaatctccctaaggggaggatgaagtacaggcaaaggatcaagactggctcttccagagccaaccactaagaaatcatcaacctcttctgggtcaccaacccaggctgggtcatccacccagaaaaccaatttagaagggtcataaacccagattacctcaatcaaactggagccatccactcaggaatctcccaaaccggcaaccgccaaacaaacatcggccgactatgcatggccaattgaaacccttcaggcccttcaagacatgggtctaaccaaacatccaaaaataatcaaaaaatcttgggcagacattggctcagaatctgatgatgattctgaatcaaatttacaaacaatgatccaaaatgcatcaatgaccaaaacagctaccaatcctaaagggaaactacctttagccaaagcacaaacaccacccaccaaacaaataaacaactatatttataaaaataaatttttaactgttttgcagatggaacctgaattttgggacaaaaatcccttcaaggcgacgaccaaggctttcccatcaggatttcactacaaaccaaccaccatcctgaagacaagaactttttatgaattgattttggtagattcaaattcagtatctatcaaacatttcaaagacccaaaagaccaaacattaaacacccactccacaatccaaatactaaaagttcttcaaccaagacactttggttcggacttgaacaaaggaaagagattttcagttccatttgatctggtaggttatacctattgggattatgttgattcttagactaaggtgttttggcaccaaaatacccgctttaagcattcatggctgatatatttcaagaccaatacaatttacaattttcccaattggtttttacaatggtgggatttctttggaccaattctagagatattcctagaaacagtccaacaaggatttgcccaatttgaaagacaatacaattcgcaggaatcacgaattccagcagatcttaaatacttctcaagttttgcactgtcatggatcttctcatggcaatatcgttacaacaagactgaaaagacaaaccaatatccataactacaaagacatgcatttgtaaaatggtggacacaatttgactcatccaaagcagatccagagcatgtaaaactctggttccaatcccat

SEQ ID NO: 8599 - DNA, 1208 bp, Glycine max; identical to SEQ ID NO: 8598
  Gm_smallRNAprecursor_1432

SEQ ID NO: 8600 - DNA, 1211 bp, Glycine max
  Gm_smallRNAprecursor_1433
ctaaggcatcaggaatctccctaaggggaggatgaagtacaggcaaaggatcaagactggctcttccagagccaaccactaagaaatcatcaacctcttctgggtcaccaacccaggctgggtcatccacccagaaaaccaatttagaagggtcataaacccagattacctcaatcaaactggagccatccactcaggaatctcccaaaccggcaaccgccaaacaaacatcggccgactatgcatggccaattgaaacccttcaggcccttcaagacatgggtctaaccaaacatccaaaaataatcaaaaaatcttgggcagacattggctcagaatctgatgatgattctgaatcaaatttacaaacaatgatccaaaatgcatcaatgaccaaaacagctaccaatcctaaagggaaactacctttagccaaagcacaaacaccacccaccaaacaaataaacaactatatttataaaaataaatttttaactgttttgcagatggaacctgaattttgggacaaaaatcccttcaaggcgacgaccaaggctttcccatcaggatttcactacaaaccaaccaccatcctgaagacaagaactttttatgaattgattttggtagattcaaattcagtatctatcaaacatttcaaagacccaaaagaccaaacattaaacacccactccacaatccaaatactaaaagttcttcaaccaagacactttggttcggacttgaacaaaggaaagagattttcagttccatttgatctggtaggttatacctattgggattatgttgattcttagactaaggtgttttggcaccaaaatacccgctttaagcattcatggctgatatatttcaagaccaatacaatttacaattttcccaattggtttttacaatggtgggatttctttggaccaattctagagatattcctagaaacagtccaacaaggatttgcccaatttgaaagacaatacaattcgcaggaatcacgaattccagcagatcttaaatacttctcaagttttgcactgtcatggatcttctcatggcaatatcgttacaacaagactgaaaagacaaaccaatatccataactacaaagacatgcatttgtaaaatggtggacacaatttgactcatccaaagcagatccagagcatgtaaaactctggttccaatcccatcca

SEQ ID NO: 8601 - DNA, 1098 bp, Glycine max
  Gm_smallRNAprecursor_1434
ggaatctccctaaggggaggatgaagtacaggcaaaggatcaagactggctcttccagagccaaccactaagaaatcatcaacctcttctgggtcaccaacccaggctgggtcatccacccagaaaaccaatttagaagggtcataaacccagattacctcaatcaaactggagccatccactcaggaatctcccaaaccggcaaccgccaaacaaacatcggccgactatgcatggccaattgaaacccttcaggcccttcaagacatgggtctaaccaaacatccaaaaataatcaaaaaatcttgggcagacattggctcagaatctgatgatgattctgaatcaaatttacaaacaatgatccaaaatgcatcaatgaccaaaacagctaccaatcctaaagggaaactacctttagccaaagcacaaacaccacccaccaaacaaataaacaactatatttataaaaataaatttttaactgttttgcagatggaacctgaattttgggacaaaaatcccttcaaggcgacgaccaaggctttcccatcaggatttcactacaaaccaaccaccatcctgaagacaagaactttttatgaattgattttggtagattcaaattcagtatctatcaaacatttcaaagacccaaaagaccaaacattaaacacccactccacaatccaaatactaaaagttcttcaaccaagacactttggttcggacttgaacaaaggaaagagattttcagttccatttgatctggtaggttatacctattgggattatgttgattcttagactaaggtgttttggcaccaaaatacccgctttaagcattcatggctgatatatttcaagaccaatacaatttacaattttcccaattggtttttacaatggtgggatttctttggaccaattctagagatattcctagaaacagtccaacaaggatttgcccaatttgaaagacaatacaattcgcaggaatcacgaattccagcagatcttaaatacttctcaagttttgcactgtcatggatcttctcatggcaatatcgttacaacaagactgaaaagacaaaccaa

SEQ ID NO: 8602 - DNA, 1190 bp, Glycine max
  Gm_smallRNAprecursor_1435
acaggcaaaggatcaagactggctcttccagagccaaccactaagaaatcatcaacctcttctgggtcaccaacccaggctgggtcatccacccagaaaaccaatttagaagggtcataaacccagattacctcaatcaaactggagccatccactcaggaatctcccaaaccggcaaccgccaaacaaacatcggccgactatgcatggccaattgaaacccttcaggcccttcaagacatgggtctaaccaaacatccaaaaataatcaaaaaatcttgggcagacattggctcagaatctgatgatgattctgaatcaaatttacaaacaatgatccaaaatgcatcaatgaccaaaacagctaccaatcctaaagggaaactacctttagccaaagcacaaacaccacccaccaaacaaataaacaactatatttataaaaataaatttttaactgttttgcagatggaacctgaattttgggacaaaaatcccttcaaggcgacgaccaaggctttcccatcaggatttcactacaaaccaaccaccatcctgaagacaagaactttttatgaattgattttggtagattcaaattcagtatctatcaaacatttcaaagacccaaaagaccaaacattaaacacccactccacaatccaaatactaaaagttcttcaaccaagacactttggttcggacttgaacaaaggaaagagattttcagttccatttgatctggtaggttatacctattgggattatgttgattcttagactaaggtgttttggcaccaaaatacccgctttaagcattcatggctgatatatttcaagaccaatacaatttacaattttcccaattggtttttacaatggtgggatttctttggaccaattctagagatattcctagaaacagtccaacaaggatttgcccaatttgaaagacaatacaattcgcaggaatcacgaattccagcagatcttaaatacttctcaagttttgcactgtcatggatcttctcatggcaatatcgttacaacaagactgaaaagacaaaccaatatccataactacaaagacatgcatttgtaaaatggtggacacaatttgactcatccaaagcagatccagagcatgtaaaactctggttccaatcccatccagaattcctcaaagcagc

SEQ ID NO: 8603 - DNA, 1082 bp, Glycine max
  Gm_smallRNAprecursor_1436
atccacccagaaaaccaatttagaagggtcataaacccagattacctcaatcaaactggagccatccactcaggaatctcccaaaccggcaaccgccaaacaaacatcggccgactatgcatggccaattgaaacccttcaggcccttcaagacatgggtctaaccaaacatccaaaaataatcaaaaaatcttgggcagacattggctcagaatctgatgatgattctgaatcaaatttacaaacaatgatccaaaatgcatcaatgaccaaaacagctaccaatcctaaagggaaactacctttagccaaagcacaaacaccacccaccaaacaaataaacaactatatttataaaaataaatttttaactgttttgcagatggaacctgaattttgggacaaaaatcccttcaaggcgacgaccaaggctttcccatcaggatttcactacaaaccaaccaccatcctgaagacaagaactttttatgaattgattttggtagattcaaattcagtatctatcaaacatttcaaagacccaaaagaccaaacattaaacacccactccacaatccaaatactaaaagttcttcaaccaagacactttggttcggacttgaacaaaggaaagagattttcagttccatttgatctggtaggttatacctattgggattatgttgattcttagactaaggtgttttggcaccaaaatacccgctttaagcattcatggctgatatatttcaagaccaatacaatttacaattttcccaattggtttttacaatggtgggatttctttggaccaattctagagatattcctagaaacagtccaacaaggatttgcccaatttgaaagacaatacaattcgcaggaatcacgaattccagcagatcttaaatacttctcaagttttgcactgtcatggatcttctcatggcaatatcgttacaacaagactgaaaagacaaaccaatatccataactacaaagacatgcatttgtaaaatggtggacacaatttgactcatccaaagcagatccagagcatgtaaaactctggttccaatccc

SEQ ID NO: 8604 - DNA, 1082 bp, Glycine max; identical to SEQ ID NO: 8603
  Gm_smallRNAprecursor_1437

SEQ ID NO: 8605 - DNA, 1084 bp, Glycine max
  Gm_smallRNAprecursor_1438
atccacccagaaaaccaatttagaagggtcataaacccagattacctcaatcaaactggagccatccactcaggaatctcccaaaccggcaaccgccaaacaaacatcggccgactatgcatggccaattgaaacccttcaggcccttcaagacatgggtctaaccaaacatccaaaaataatcaaaaaatcttgggcagacattggctcagaatctgatgatgattctgaatcaaatttacaaacaatgatccaaaatgcatcaatgaccaaaacagctaccaatcctaaagggaaactacctttagccaaagcacaaacaccacccaccaaacaaataaacaactatatttataaaaataaatttttaactgttttgcagatggaacctgaattttgggacaaaaatcccttcaaggcgacgaccaaggctttcccatcaggatttcactacaaaccaaccaccatcctgaagacaagaactttttatgaattgattttggtagattcaaattcagtatctatcaaacatttcaaagacccaaaagaccaaacattaaacacccactccacaatccaaatactaaaagttcttcaaccaagacactttggttcggacttgaacaaaggaaagagattttcagttccatttgatctggtaggttatacctattgggattatgttgattcttagactaaggtgttttggcaccaaaatacccgctttaagcattcatggctgatatatttcaagaccaatacaatttacaattttcccaattggtttttacaatggtgggatttctttggaccaattctagagatattcctagaaacagtccaacaaggatttgcccaatttgaaagacaatacaattcgcaggaatcacgaattccagcagatcttaaatacttctcaagttttgcactgtcatggatcttctcatggcaatatcgttacaacaagactgaaaagacaaaccaatatccataactacaaagacatgcatttgtaaaatggtggacacaatttgactcatccaaagcagatccagagcatgtaaaactctggttccaatcccat

SEQ ID NO: 8606 - DNA, 1084 bp, Glycine max; identical to SEQ ID NO: 8605
  Gm_smallRNAprecursor_1439

SEQ ID NO: 8607 - DNA, 1171 bp, Glycine max
  Gm_smallRNAprecursor_1440
tcccaaaccggcaaccgccaaacaaacatcggccgactatgcatggccaattgaaacccttcaggcccttcaagacatgggtctaaccaaacatccaaaaataatcaaaaaatcttgggcagacattggctcagaatctgatgatgattctgaatcaaatttacaaacaatgatccaaaatgcatcaatgaccaaaacagctaccaatcctaaagggaaactacctttagccaaagcacaaacaccacccaccaaacaaataaacaactatatttataaaaataaatttttaactgttttgcagatggaacctgaattttgggacaaaaatcccttcaaggcgacgaccaaggctttcccatcaggatttcactacaaaccaaccaccatcctgaagacaagaactttttatgaattgattttggtagattcaaattcagtatctatcaaacatttcaaagacccaaaagaccaaacattaaacacccactccacaatccaaatactaaaagttcttcaaccaagacactttggttcggacttgaacaaaggaaagagattttcagttccatttgatctggtaggttatacctattgggattatgttgattcttagactaaggtgttttggcaccaaaatacccgctttaagcattcatggctgatatatttcaagaccaatacaatttacaattttcccaattggtttttacaatggtgggatttctttggaccaattctagagatattcctagaaacagtccaacaaggatttgcccaatttgaaagacaatacaattcgcaggaatcacgaattccagcagatcttaaatacttctcaagttttgcactgtcatggatcttctcatggcaatatcgttacaacaagactgaaaagacaaaccaatatccataactacaaagacatgcatttgtaaaatggtggacacaatttgactcatccaaagcagatccagagcatgtaaaactctggttccaatcccatccagaattcctcaaagcagctgatccagaaacttctgtgttcttgaaccaaaagtcacatctggcagcatttttagcaagatcaaagtcaaaggagatcctaactaagaatctaaaggaatttttgcaaatgttatagcaggaagaagaaggttcatcctcaaag

SEQ ID NO: 8608 - DNA, 1166 bp, Glycine max
  Gm_smallRNAprecursor_1441
ccaaaccggcaaccgccaaacaaacatcggccgactatgcatggccaattgaaacccttcaggcccttcaagacatgggtctaaccaaacatccaaaaataatcaaaaaatcttgggcagacattggctcagaatctgatgatgattctgaatcaaatttacaaacaatgatccaaaatgcatcaatgaccaaaacagctaccaatcctaaagggaaactacctttagccaaagcacaaacaccacccaccaaacaaataaacaactatatttataaaaataaatttttaactgttttgcagatggaacctgaattttgggacaaaaatcccttcaaggcgacgaccaaggctttcccatcaggatttcactacaaaccaaccaccatcctgaagacaagaactttttatgaattgattttggtagattcaaattcagtatctatcaaacatttcaaagacccaaaagaccaaacattaaacacccactccacaatccaaatactaaaagttcttcaaccaagacactttggttcggacttgaacaaaggaaagagattttcagttccatttgatctggtaggttatacctattgggattatgttgattcttagactaaggtgttttggcaccaaaatacccgctttaagcattcatggctgatatatttcaagaccaatacaatttacaattttcccaattggtttttacaatggtgggatttctttggaccaattctagagatattcctagaaacagtccaacaaggatttgcccaatttgaaagacaatacaattcgcaggaatcacgaattccagcagatcttaaatacttctcaagttttgcactgtcatggatcttctcatggcaatatcgttacaacaagactgaaaagacaaaccaatatccataactacaaagacatgcatttgtaaaatggtggacacaatttgactcatccaaagcagatccagagcatgtaaaactctggttccaatcccatccagaattcctcaaagcagctgatccagaaacttctgtgttcttgaaccaaaagtcacatctggcagcatttttagcaagatcaaagtcaaaggagatcctaactaagaatctaaaggaatttttgcaaatgttatagcaggaagaagaaggttcatcctca

SEQ ID NO: 8609 - DNA, 1169 bp, Glycine max
  Gm_smallRNAprecursor_1442
ccaaaccggcaaccgccaaacaaacatcggccgactatgcatggccaattgaaacccttcaggcccttcaagacatgggtctaaccaaacatccaaaaataatcaaaaaatcttgggcagacattggctcagaatctgatgatgattctgaatcaaatttacaaacaatgatccaaaatgcatcaatgaccaaaacagctaccaatcctaaagggaaactacctttagccaaagcacaaacaccacccaccaaacaaataaacaactatatttataaaaataaatttttaactgttttgcagatggaacctgaattttgggacaaaaatcccttcaaggcgacgaccaaggctttcccatcaggatttcactacaaaccaaccaccatcctgaagacaagaactttttatgaattgattttggtagattcaaattcagtatctatcaaacatttcaaagacccaaaagaccaaacattaaacacccactccacaatccaaatactaaaagttcttcaaccaagacactttggttcggacttgaacaaaggaaagagattttcagttccatttgatctggtaggttatacctattgggattatgttgattcttagactaaggtgttttggcaccaaaatacccgctttaagcattcatggctgatatatttcaagaccaatacaatttacaattttcccaattggtttttacaatggtgggatttctttggaccaattctagagatattcctagaaacagtccaacaaggatttgcccaatttgaaagacaatacaattcgcaggaatcacgaattccagcagatcttaaatacttctcaagttttgcactgtcatggatcttctcatggcaatatcgttacaacaagactgaaaagacaaaccaatatccataactacaaagacatgcatttgtaaaatggtggacacaatttgactcatccaaagcagatccagagcatgtaaaactctggttccaatcccatccagaattcctcaaagcagctgatccagaaacttctgtgttcttgaaccaaaagtcacatctggcagcatttttagcaagatcaaagtcaaaggagatcctaactaagaatctaaaggaatttttgcaaatgttatagcaggaagaagaaggttcatcctcaaag

SEQ ID NO: 8610 - DNA, 1146 bp, Glycine max
  Gm_smallRNAprecursor_1443
aatgatccaaaatgcatcaatgaccaaaacagctaccaatcctaaagggaaactacctttagccaaagcacaaacaccacccaccaaacaaataaacaactatatttataaaaataaatttttaactgttttgcagatggaacctgaattttgggacaaaaatcccttcaaggcgacgaccaaggctttcccatcaggatttcactacaaaccaaccaccatcctgaagacaagaactttttatgaattgattttggtagattcaaattcagtatctatcaaacatttcaaagacccaaaagaccaaacattaaacacccactccacaatccaaatactaaaagttcttcaaccaagacactttggttcggacttgaacaaaggaaagagattttcagttccatttgatctggtaggttatacctattgggattatgttgattcttagactaaggtgttttggcaccaaaatacccgctttaagcattcatggctgatatatttcaagaccaatacaatttacaattttcccaattggtttttacaatggtgggatttctttggaccaattctagagatattcctagaaacagtccaacaaggatttgcccaatttgaaagacaatacaattcgcaggaatcacgaattccagcagatcttaaatacttctcaagttttgcactgtcatggatcttctcatggcaatatcgttacaacaagactgaaaagacaaaccaatatccataactacaaagacatgcatttgtaaaatggtggacacaatttgactcatccaaagcagatccagagcatgtaaaactctggttccaatcccatccagaattcctcaaagcagctgatccagaaacttctgtgttcttgaaccaaaagtcacatctggcagcatttttagcaagatcaaagtcaaaggagatcctaactaagaatctaaaggaatttttgcaaatgttatagcaggaagaagaaggttcatcctcaaagaaggaggaaacaagctctgctgaagaagaagaagaagaagacctcttttaccagaacgaagatgattgttttggtatctgtttagattaaatttaattttggtcacaaaaccgtctgtatgtaattaatttgtaattttggac

SEQ ID NO: 8611 - DNA, 1144 bp, Glycine max
  Gm_smallRNAprecursor_1444
tgatccaaaatgcatcaatgaccaaaacagctaccaatcctaaagggaaactacctttagccaaagcacaaacaccacccaccaaacaaataaacaactatatttataaaaataaatttttaactgttttgcagatggaacctgaattttgggacaaaaatcccttcaaggcgacgaccaaggctttcccatcaggatttcactacaaaccaaccaccatcctgaagacaagaactttttatgaattgattttggtagattcaaattcagtatctatcaaacatttcaaagacccaaaagaccaaacattaaacacccactccacaatccaaatactaaaagttcttcaaccaagacactttggttcggacttgaacaaaggaaagagattttcagttccatttgatctggtaggttatacctattgggattatgttgattcttagactaaggtgttttggcaccaaaatacccgctttaagcattcatggctgatatatttcaagaccaatacaatttacaattttcccaattggtttttacaatggtgggatttctttggaccaattctagagatattcctagaaacagtccaacaaggatttgcccaatttgaaagacaatacaattcgcaggaatcacgaattccagcagatcttaaatacttctcaagttttgcactgtcatggatcttctcatggcaatatcgttacaacaagactgaaaagacaaaccaatatccataactacaaagacatgcatttgtaaaatggtggacacaatttgactcatccaaagcagatccagagcatgtaaaactctggttccaatcccatccagaattcctcaaagcagctgatccagaaacttctgtgttcttgaaccaaaagtcacatctggcagcatttttagcaagatcaaagtcaaaggagatcctaactaagaatctaaaggaatttttgcaaatgttatagcaggaagaagaaggttcatcctcaaagaaggaggaaacaagctctgctgaagaagaagaagaagaagacctcttttaccagaacgaagatgattgttttggtatctgtttagattaaatttaattttggtcacaaaaccgtctgtatgtaattaatttgtaattttggac

SEQ ID NO: 8612 - DNA, 1080 bp, Glycine max
  Gm_smallRNAprecursor_1445
gattcaaattcagtatctatcaaacatttcaaagacccaaaagaccaaacattaaacacccactccacaatccaaatactaaaagttcttcaaccaagacactttggttcggacttgaacaaaggaaagagattttcagttccatttgatctggtaggttatacctattgggattatgttgattcttagactaaggtgttttggcaccaaaatacccgctttaagcattcatggctgatatatttcaagaccaatacaatttacaattttcccaattggtttttacaatggtgggatttctttggaccaattctagagatattcctagaaacagtccaacaaggatttgcccaatttgaaagacaatacaattcgcaggaatcacgaattccagcagatcttaaatacttctcaagttttgcactgtcatggatcttctcatggcaatatcgttacaacaagactgaaaagacaaaccaatatccataactacaaagacatgcatttgtaaaatggtggacacaatttgactcatccaaagcagatccagagcatgtaaaactctggttccaatcccatccagaattcctcaaagcagctgatccagaaacttctgtgttcttgaaccaaaagtcacatctggcagcatttttagcaagatcaaagtcaaaggagatcctaactaagaatctaaaggaatttttgcaaatgttatagcaggaagaagaaggttcatcctcaaagaaggaggaaacaagctctgctgaagaagaagaagaagaagacctcttttaccagaacgaagatgattgttttggtatctgtttagattaaatttaattttggtcacaaaaccgtctgtatgtaattaatttgtaattttggacaatactacatgtcctgtagccattaaagtcccgatcaaaactacttgtcttgtaacaaacagccaaatagttccggtcaaaactaccggcaactactggtctcaaatttttggctatataaggagtcctcaactatgttgtgaggcaccctttcatttggccatttttcaggtttctgaagagaggtgctctg

SEQ ID NO: 8613 - DNA, 1078 bp, Glycine max
  Gm_smallRNAprecursor_1446
attcaaattcagtatctatcaaacatttcaaagacccaaaagaccaaacattaaacacccactccacaatccaaatactaaaagttcttcaaccaagacactttggttcggacttgaacaaaggaaagagattttcagttccatttgatctggtaggttatacctattgggattatgttgattcttagactaaggtgttttggcaccaaaatacccgctttaagcattcatggctgatatatttcaagaccaatacaatttacaattttcccaattggtttttacaatggtgggatttctttggaccaattctagagatattcctagaaacagtccaacaaggatttgcccaatttgaaagacaatacaattcgcaggaatcacgaattccagcagatcttaaatacttctcaagttttgcactgtcatggatcttctcatggcaatatcgttacaacaagactgaaaagacaaaccaatatccataactacaaagacatgcatttgtaaaatggtggacacaatttgactcatccaaagcagatccagagcatgtaaaactctggttccaatcccatccagaattcctcaaagcagctgatccagaaacttctgtgttcttgaaccaaaagtcacatctggcagcatttttagcaagatcaaagtcaaaggagatcctaactaagaatctaaaggaatttttgcaaatgttatagcaggaagaagaaggttcatcctcaaagaaggaggaaacaagctctgctgaagaagaagaagaagaagacctcttttaccagaacgaagatgattgttttggtatctgtttagattaaatttaattttggtcacaaaaccgtctgtatgtaattaatttgtaattttggacaatactacatgtcctgtagccattaaagtcccgatcaaaactacttgtcttgtaacaaacagccaaatagttccggtcaaaactaccggcaactactggtctcaaatttttggctatataaggagtcctcaactatgttgtgaggcaccctttcatttggccatttttcaggtttctgaagagaggtgctct

SEQ ID NO: 8614 - DNA, 1079 bp, Glycine max
  Gm_smallRNAprecursor_1447
attcaaattcagtatctatcaaacatttcaaagacccaaaagaccaaacattaaacacccactccacaatccaaatactaaaagttcttcaaccaagacactttggttcggacttgaacaaaggaaagagattttcagttccatttgatctggtaggttatacctattgggattatgttgattcttagactaaggtgttttggcaccaaaatacccgctttaagcattcatggctgatatatttcaagaccaatacaatttacaattttcccaattggtttttacaatggtgggatttctttggaccaattctagagatattcctagaaacagtccaacaaggatttgcccaatttgaaagacaatacaattcgcaggaatcacgaattccagcagatcttaaatacttctcaagttttgcactgtcatggatcttctcatggcaatatcgttacaacaagactgaaaagacaaaccaatatccataactacaaagacatgcatttgtaaaatggtggacacaatttgactcatccaaagcagatccagagcatgtaaaactctggttccaatcccatccagaattcctcaaagcagctgatccagaaacttctgtgttcttgaaccaaaagtcacatctggcagcatttttagcaagatcaaagtcaaaggagatcctaactaagaatctaaaggaatttttgcaaatgttatagcaggaagaagaaggttcatcctcaaagaaggaggaaacaagctctgctgaagaagaagaagaagaagacctcttttaccagaacgaagatgattgttttggtatctgtttagattaaatttaattttggtcacaaaaccgtctgtatgtaattaatttgtaattttggacaatactacatgtcctgtagccattaaagtcccgatcaaaactacttgtcttgtaacaaacagccaaatagttccggtcaaaactaccggcaactactggtctcaaatttttggctatataaggagtcctcaactatgttgtgaggcaccctttcatttggccatttttcaggtttctgaagagaggtgctctg

SEQ ID NO: 8615 - DNA, 1218 bp, Glycine max
  Gm_smallRNAprecursor_1448
tcttcaaccaagacactttggttcggacttgaacaaaggaaagagattttcagttccatttgatctggtaggttatacctattgggattatgttgattcttagactaaggtgttttggcaccaaaatacccgctttaagcattcatggctgatatatttcaagaccaatacaatttacaattttcccaattggtttttacaatggtgggatttctttggaccaattctagagatattcctagaaacagtccaacaaggatttgcccaatttgaaagacaatacaattcgcaggaatcacgaattccagcagatcttaaatacttctcaagttttgcactgtcatggatcttctcatggcaatatcgttacaacaagactgaaaagacaaaccaatatccataactacaaagacatgcatttgtaaaatggtggacacaatttgactcatccaaagcagatccagagcatgtaaaactctggttccaatcccatccagaattcctcaaagcagctgatccagaaacttctgtgttcttgaaccaaaagtcacatctggcagcatttttagcaagatcaaagtcaaaggagatcctaactaagaatctaaaggaatttttgcaaatgttatagcaggaagaagaaggttcatcctcaaagaaggaggaaacaagctctgctgaagaagaagaagaagaagacctcttttaccagaacgaagatgattgttttggtatctgtttagattaaatttaattttggtcacaaaaccgtctgtatgtaattaatttgtaattttggacaatactacatgtcctgtagccattaaagtcccgatcaaaactacttgtcttgtaacaaacagccaaatagttccggtcaaaactaccggcaactactggtctcaaatttttggctatataaggagtcctcaactatgttgtgaggcaccctttcatttggccatttttcaggtttctgaagagaggtgctctgaaagaaaacttttgtaagcgcttatgtcaagtttcaataaatttctattttccatctcttttctctctccctccaccgatcctgtgcggctctgccgccgcttcggtttctttatttatgaaaacctgggatttgtaagccggtctccggtgtgcccttgatatatgtttttaaaagcttatatttcgatttctgtttatatcccatccagaattcagacaaac

SEQ ID NO: 8616 - DNA, 1219 bp, Glycine max
  Gm_smallRNAprecursor_1449
tcttcaaccaagacactttggttcggacttgaacaaaggaaagagattttcagttccatttgatctggtaggttatacctattgggattatgttgattcttagactaaggtgttttggcaccaaaatacccgctttaagcattcatggctgatatatttcaagaccaatacaatttacaattttcccaattggtttttacaatggtgggatttctttggaccaattctagagatattcctagaaacagtccaacaaggatttgcccaatttgaaagacaatacaattcgcaggaatcacgaattccagcagatcttaaatacttctcaagttttgcactgtcatggatcttctcatggcaatatcgttacaacaagactgaaaagacaaaccaatatccataactacaaagacatgcatttgtaaaatggtggacacaatttgactcatccaaagcagatccagagcatgtaaaactctggttccaatcccatccagaattcctcaaagcagctgatccagaaacttctgtgttcttgaaccaaaagtcacatctggcagcatttttagcaagatcaaagtcaaaggagatcctaactaagaatctaaaggaatttttgcaaatgttatagcaggaagaagaaggttcatcctcaaagaaggaggaaacaagctctgctgaagaagaagaagaagaagacctcttttaccagaacgaagatgattgttttggtatctgtttagattaaatttaattttggtcacaaaaccgtctgtatgtaattaatttgtaattttggacaatactacatgtcctgtagccattaaagtcccgatcaaaactacttgtcttgtaacaaacagccaaatagttccggtcaaaactaccggcaactactggtctcaaatttttggctatataaggagtcctcaactatgttgtgaggcaccctttcatttggccatttttcaggtttctgaagagaggtgctctgaaagaaaacttttgtaagcgcttatgtcaagtttcaataaatttctattttccatctcttttctctctccctccaccgatcctgtgcggctctgccgccgcttcggtttctttatttatgaaaacctgggatttgtaagccggtctccggtgtgcccttgatatatgtttttaaaagcttatatttcgatttctgtttatatcccatccagaattcagacaaaca

SEQ ID NO: 8617 - DNA, 1118 bp, Glycine max
  Gm_smallRNAprecursor_1450
tggaccaattctagagatattcctagaaacagtccaacaaggatttgcccaatttgaaagacaatacaattcgcaggaatcacgaattccagcagatcttaaatacttctcaagttttgcactgtcatggatcttctcatggcaatatcgttacaacaagactgaaaagacaaaccaatatccataactacaaagacatgcatttgtaaaatggtggacacaatttgactcatccaaagcagatccagagcatgtaaaactctggttccaatcccatccagaattcctcaaagcagctgatccagaaacttctgtgttcttgaaccaaaagtcacatctggcagcatttttagcaagatcaaagtcaaaggagatcctaactaagaatctaaaggaatttttgcaaatgttatagcaggaagaagaaggttcatcctcaaagaaggaggaaacaagctctgctgaagaagaagaagaagaagacctcttttaccagaacgaagatgattgttttggtatctgtttagattaaatttaattttggtcacaaaaccgtctgtatgtaattaatttgtaattttggacaatactacatgtcctgtagccattaaagtcccgatcaaaactacttgtcttgtaacaaacagccaaatagttccggtcaaaactaccggcaactactggtctcaaatttttggctatataaggagtcctcaactatgttgtgaggcaccctttcatttggccatttttcaggtttctgaagagaggtgctctgaaagaaaacttttgtaagcgcttatgtcaagtttcaataaatttctattttccatctcttttctctctccctccaccgatcctgtgcggctctgccgccgcttcggtttctttatttatgaaaacctgggatttgtaagccggtctccggtgtgcccttgatatatgtttttaaaagcttatatttcgatttctgtttatatcccatccagaattcagacaaacacgacaatatatatatatatatatatatatatatatatatatatatatatatatatatatatatcgcatcccattcgtcaaaacataattttctcctgaaaaaccatcatgcatat

SEQ ID NO: 8618 - DNA, 1117 bp, Glycine max
  Gm_smallRNAprecursor_1451
ggaccaattctagagatattcctagaaacagtccaacaaggatttgcccaatttgaaagacaatacaattcgcaggaatcacgaattccagcagatcttaaatacttctcaagttttgcactgtcatggatcttctcatggcaatatcgttacaacaagactgaaaagacaaaccaatatccataactacaaagacatgcatttgtaaaatggtggacacaatttgactcatccaaagcagatccagagcatgtaaaactctggttccaatcccatccagaattcctcaaagcagctgatccagaaacttctgtgttcttgaaccaaaagtcacatctggcagcatttttagcaagatcaaagtcaaaggagatcctaactaagaatctaaaggaatttttgcaaatgttatagcaggaagaagaaggttcatcctcaaagaaggaggaaacaagctctgctgaagaagaagaagaagaagacctcttttaccagaacgaagatgattgttttggtatctgtttagattaaatttaattttggtcacaaaaccgtctgtatgtaattaatttgtaattttggacaatactacatgtcctgtagccattaaagtcccgatcaaaactacttgtcttgtaacaaacagccaaatagttccggtcaaaactaccggcaactactggtctcaaatttttggctatataaggagtcctcaactatgttgtgaggcaccctttcatttggccatttttcaggtttctgaagagaggtgctctgaaagaaaacttttgtaagcgcttatgtcaagtttcaataaatttctattttccatctcttttctctctccctccaccgatcctgtgcggctctgccgccgcttcggtttctttatttatgaaaacctgggatttgtaagccggtctccggtgtgcccttgatatatgtttttaaaagcttatatttcgatttctgtttatatcccatccagaattcagacaaacacgacaatatatatatatatatatatatatatatatatatatatatatatatatatatatatatcgcatcccattcgtcaaaacataattttctcctgaaaaaccatcatgcatat

SEQ ID NO: 8619 - DNA, 1117 bp, Glycine max; identical to SEQ ID NO: 8618
  Gm_smallRNAprecursor_1452

SEQ ID NO: 8620 - DNA, 1116 bp, Glycine max
  Gm_smallRNAprecursor_1453
gaccaattctagagatattcctagaaacagtccaacaaggatttgcccaatttgaaagacaatacaattcgcaggaatcacgaattccagcagatcttaaatacttctcaagttttgcactgtcatggatcttctcatggcaatatcgttacaacaagactgaaaagacaaaccaatatccataactacaaagacatgcatttgtaaaatggtggacacaatttgactcatccaaagcagatccagagcatgtaaaactctggttccaatcccatccagaattcctcaaagcagctgatccagaaacttctgtgttcttgaaccaaaagtcacatctggcagcatttttagcaagatcaaagtcaaaggagatcctaactaagaatctaaaggaatttttgcaaatgttatagcaggaagaagaaggttcatcctcaaagaaggaggaaacaagctctgctgaagaagaagaagaagaagacctcttttaccagaacgaagatgattgttttggtatctgtttagattaaatttaattttggtcacaaaaccgtctgtatgtaattaatttgtaattttggacaatactacatgtcctgtagccattaaagtcccgatcaaaactacttgtcttgtaacaaacagccaaatagttccggtcaaaactaccggcaactactggtctcaaatttttggctatataaggagtcctcaactatgttgtgaggcaccctttcatttggccatttttcaggtttctgaagagaggtgctctgaaagaaaacttttgtaagcgcttatgtcaagtttcaataaatttctattttccatctcttttctctctccctccaccgatcctgtgcggctctgccgccgcttcggtttctttatttatgaaaacctgggatttgtaagccggtctccggtgtgcccttgatatatgtttttaaaagcttatatttcgatttctgtttatatcccatccagaattcagacaaacacgacaatatatatatatatatatatatatatatatatatatatatatatatatatatatatatcgcatcccattcgtcaaaacataattttctcctgaaaaaccatcatgcatat

SEQ ID NO: 8621 - DNA, 1116 bp, Glycine max; identical to SEQ ID NO: 8620
  Gm_smallRNAprecursor_1454

SEQ ID NO: 8622 - DNA, 1158 bp, Glycine max
  Gm_smallRNAprecursor_1455
cagttatcaagggcacaccggaatccggcttaaaaacccaggtttttgaaaacaaagaaaccaaagcggcggcagagccgcacaggatcggtgaagggagaagggagatgtgaaaaatagaactttgaatttattgaaatcgaaagaaaagcttacaaagaggttttccctaggcagagcttctctctctaaaacctggttttgagactatctgaaagggtgcgtcacaaagggaacgagggctcctttaaatagacccaatgttttactgtttcaacagtatcgataatgtttaccggaactgttacaaaactttttcaaattacattattatcgggaaccgaataattacttacaataattcatgattactacaactaatcatcgtctaacgatataccaaaacagtcatcctcattctggtagaatggatcatcttcttggtcatcattattcgcggatgattcgacttccttcttggggggttcttcttcttcttcctgttgaagtagctggagaacttccttaagattctgagcaagactttctttagattttgagcttgctaagaatgctgcaagttgagacttttgatttagaaacaatgatgtctctggatcagcaggcttgagaaactcagggttgctctgaaacctgttcttgacttgttctggagcagcctttgaggtatcaaattgtgaccaccactttacaaaggcatgtctctgcaatggtggatattgtttgttgttttcggtttttccatatctgtattgccatgaaaaaatccatgacaaggcaaaacagacgatgattctgaatcaaacctacaaaaacaaatccaaaagaccaaacagaccaaaactgtctgtaaccaaaaaccaagccaaccgttgactcaacaagaatcaacaccacaacccagcaatagctatatttcaaaaaacaaatttttcaatgttttacaaatggaaccagaatactgggacaaaaatcctttcaaggcaaccgccaaagtattccccccaagattccattataggccaacggccacaaataaaaccagaaaattctacgaattcatcctattagatacaaactcaatatctattaaacacttcaaagaccccaaagatccaaacctaaatacccattcca

SEQ ID NO: 8623 - DNA, 1046 bp, Glycine max
  Gm_smallRNAprecursor_1456
tctgtagctgtcaacaccaacgggcgaggtctgcataaccattcttttttcctctttttttttttacttcaattaccatcaatgtatcattctgggttctgatttttgtgtgttttgaataggaagagaaaaaaccagaggaaaacaaaagtggaggagaaaaaagcaaatgaagaagaaaataaagaagaagagaaaaaaaccagagaaatcaaaatatgacaaggaatccaaggaggaatctgcgctgccagaaatcgtgctaggcacaacctttgcaatgcatggacactttaagcattatttctggcatcttttaagttagggactatatttacaacacttatgcaaaagatagggattattttgaatttttcattaagttaaggactaatatgcaataggggtacaaagtcagggactaaattacctatttactcgttttgttatcatcaaatgacatggcatcaggcacgtccacgtgtcatgccacgtcatcctttagtgccacgtggatagtccacgtggcactaaaattgacctcactaacggcgttactttaaaatttaacggaaggactattttgcaacacttatgcaaagatagagactattttgaatttaatattaagttagggactaatatgtaaaatgggtacaatctcagggactaaattgcctattcactcggaatatatgtgcaaatcaattttcctttatatattcaaaacactatttttttatgaatagtactttttacatgtctgataaaaccatctgcttgattttgtggttgcgaaaatgggaaatgagtatacatatgattaacaaatgacttcaaaagcagcaagtgctacctagaatttcttggattcatgatttcaaggataaaacaatcaaattggatattctataagcttaaaaatataatcatccaatcgagtgacttaaaataattatacaactcaggctaaaaagatgtgttacatggggggtaaaattctatccccaggatgataaaggacagaattcttgtggcatgcattt

SEQ ID NO: 8624 - DNA, 1132 bp, Glycine max
  Gm_smallRNAprecursor_1457
cactttggttctgactttgcaatggttcaaaggaaaactcattctcctagtaagaaacttttaccatatgacaaatacaaataccatactatttttttatgtattagtgttataattcagaattctaagttatgctcttggttggtaattggtattgcagcatattggtggcgaatgtttgggtcacaaactccaaatttgcagaagttagctattaaaattttgagtttgaattgcagtgcttcaggatgtgaaagaaattggagtgtgtttgagcaagtaattgtgacaaaactctagctatactttttaattttatttaattttgatgatcaagttttatttggagtatatttgagattgaaattaacatttatttgttatgttgtagattattccaaaaaaagaaataggcttgagcacaagaggttgcatgatttggtgtttgtcaaatacaaccaacaattgaagcaaagatataatgcaagagatgaaattgatccaatttctcttaatgatattgatgtgtgcaatgaatggctcgtgggagaaatggatcaagatgatgataatgatgttggaaatgatttggtatttgaagatgatgatgctctaaattgggcaactgtgtatcaggcttcgggggttggagagtgtatgatgtatactaggcgaaaaaagcaaaaacaacaagtgttgctgttacccaaacttctaaaaaacaggcaatggttgttggatcttcatcaaggaagcaaagagcagtccaagaaaatgttgaggatctagattttgaggagaatattgatcttgaatctgaagaagaagaaatcatggtcaattttgaggtgtctgatggggaagagggagagagacatactccattaccatatgataacaacgaagatgattatgttgggattagagaagatgattagagcattaaccttcactttgcactttgcattatgtttttatcattttcttattttgaactctttaatgagtttatttggtgttggtacttgattattgtatgaactcatgaaacttttttagtttatttgaatgcaatcctttgtttttttcaatttcaatgagtttatatatatgtttttttttttccaccatg

SEQ ID NO: 8625 - DNA, 1092 bp, Glycine max
  Gm_smallRNAprecursor_1458
gtttgaattgcagtgcttcaggatgtgaaagaaattggagtgtgtttgagcaagtaattgtgacaaaactctagctatactttttaattttatttaattttgatgatcaagttttatttggagtatatttgagattgaaattaacatttatttgttatgttgtagattattccaaaaaaagaaataggcttgagcacaagaggttgcatgatttggtgtttgtcaaatacaaccaacaattgaagcaaagatataatgcaagagatgaaattgatccaatttctcttaatgatattgatgtgtgcaatgaatggctcgtgggagaaatggatcaagatgatgataatgatgttggaaatgatttggtatttgaagatgatgatgctctaaattgggcaactgtgtatcaggcttcgggggttggagagtgtatgatgtatactaggcgaaaaaagcaaaaacaacaagtgttgctgttacccaaacttctaaaaaacaggcaatggttgttggatcttcatcaaggaagcaaagagcagtccaagaaaatgttgaggatctagattttgaggagaatattgatcttgaatctgaagaagaagaaatcatggtcaattttgaggtgtctgatggggaagagggagagagacatactccattaccatatgataacaacgaagatgattatgttgggattagagaagatgattagagcattaaccttcactttgcactttgcattatgtttttatcattttcttattttgaactctttaatgagtttatttggtgttggtacttgattattgtatgaactcatgaaacttttttagtttatttgaatgcaatcctttgtttttttcaatttcaatgagtttatatatatgtttttttttttccaccatgacatccgtcatttttcgctacgctatccgccatatttttatggcgaatttttagctttccgccatgaaccgccattcgccattaacaactttgcttgtaccaaatattgagaatgtcataatgtatactttcctggagaatagtttaacaatccttaaaataaatgtaaccatagagcttaggaaa

SEQ ID NO: 8626 - DNA, 1092 bp, Glycine max; identical to SEQ ID NO: 8625
  Gm_smallRNAprecursor_1459

SEQ ID NO: 8627 - DNA, 1157 bp, Glycine max
  Gm_smallRNAprecursor_1460
atagtggtccgtaagggcatatgttaactgaacttatggatctgaaccatgtacagtaattttaatttaaacagtatgtgtttgaacagtattttctggaagcacagcagtctgatattttagttgaatgatattgtagcagtaagtcccgtggttgagaaagggcagtaaggctaaggtgtattgttcaaataaaatattgagacataatatactggtggctataggagtaatgttcaaactatattgtctgtattaaagaaaaaaatctttttcatttattcagatccaagaagttctgtaacatatagccttatggaaagatttctatgaaaccaaatgaaggcaaagatattagagaatgttttaatcatgtctagattattgcgatctttctcccgtatctcttttcgctcaaattcctcctcttcatcttcttcaagaaacaccaatctattaaatgatcaggataaccagacccaagaggtcgccccaaaacacaatctcttcgatgaggaagtccgattcgaagatatcaatcaaaacatggatgactggaacattccagaaatccctcaggatcaactatacgttcctgaaacaattaaggacaaacacaactttgattacataatcaaaacagtagaaaaaaatattcctctaggacaagatataggggaagaatttcatttactctcaaaaaattcaatttatgaacatagtcgtaagtataaatatttacacatcggttgtgtacaagtagccatcaagcccttaattgatatgggcatagatgcagcacttttaatgtgtctaagagatattaggcataatcaatttgaagactccctaattggaacagtcgaaaccagcctaggacaaggtccaatatattttaattgttatccaaacaaaacagtgagtctgatggacagaaacattcttgactctctgttcttaaacatccactttcatggccttgacatgaaagaaggatcaatcccagcagccttaatttataggattcagtacaaggtcatgaatacttgtgcatctagagtcctgttaaaacctcaaaaaggagaaacaactttgtttatcactgatatgacaaaggctaacgtttctctcccgagaaaaataaaatgggatgaagt

SEQ ID NO: 8628 - DNA, 1040 bp, Glycine max
  Gm_smallRNAprecursor_1461
agttgagaatattggcattaacaaagtgctcatagatggaggagcggctgttaacttaatgcctcgatctatgctccacaagatcgggaaacatgacactgatctatctgcccataacattgtgctttcgaattatgagggtaaaactggctattctttgggagccattcaagtagatgttgctgtaggtagtatagttcgaccaactctattcctggtgatacagtctaaggctaattttaacttgctattaggaagggaatggattcatggagttggggctgtgccatctaccctccaccagaaactcattatctggagggaagatgggattgttgaaaatatagaggcagatcaaagcttctataagtcagaggttgataatgttactgcacaaacctttgacaaaaagttggctaacatagcaccttgtggtgacaaggaggctgttttcgaatcaagtgacaatgttatccactctgtcaaactccatcctacctatgggtttatatgggagagggaggaaattgatgctgttccctctgaagatggagtcattccaccaactgggtggaatatatatgaagattaatatgactgaggccactgcatgggccagaattacggcttatatggccgaaaatagactaaatacggcctttgaggctgaatctcaacaaaatatggcagttgaagccaagatcgaagatcatgaaaacaaagaaacaaaggatcgaagactggattgcatttatgacgatgagccgctgggttttgagaaaaatcccataagtgaggtgccaaagatgcaggctcaagatcctttggaggagatcgacattggaaatggctcgataaaaaggccaacctatatcagtgccaatatcacctcaagtctaaaagaaaagctggtgcctcttcttagagaatttaaagactgttttgcttgggattaccacgaaatgcctgggttaagcagagaaatggtcgaaatgaaattaccgattaaggagggaaaaagaccagtaaaacaactacca

SEQ ID NO: 8629 - DNA, 1157 bp, Glycine max
  Gm_smallRNAprecursor_1462
aagaccagtaaaacaactaccaagaagattcgcaccagaaatcatgtccaaaattaaggaagagatcgaaaggctgctgaggtgtaaattcatcagatctgccaggtatgtcgaatggttagcaaatatagtccctgtcattaaaaagaatggaactcttagagtatgcatagattttagggatttaaataatgctacacctaaagatgaatatgctatgccagtagcggaaatgttggtagattcggcagctggcttcgaatttttaagcatgttagatggttattctggttataaccaaatatttattgctgaaagtgatgtgtcgaaaacagcatttcgatgccctggtgctttaggcacttatgaatgggtggttatgccctttgggttgaaaaatgctggggccacttatcaaagggccatgaattccatgtttcatgattttattgacacatttatgcaaatttatattgatgatataatcatcaaatcctcctcagaagatagccatttggattatcttaggcaatctttcgaacgaatgaggaaacatggattaaaaatgaatccattaaagtgtgctttttgtgtgcgtgcaggagatttccttggttttgtggtgcataaaaaaggcattgagataaatcaaaataagacaaaggctattcttgagacgaagcctccttcgaccaaaaaacagcttcagtctttgctaggaaaaatcaacttcttgaggcgattcatttcgaatctaagtggcaaagctcaaattttttcgccattacttcgactcaagaaagatgaaccattcaaatggaatgaagagcatcaaaaggctttcgatgaaattaaagaatatctgatcaagcctcctgtgttaatgcctcctagtcgaaacaagactatgaagttgtatattgctgcatctgacaagaccattggtagcatgttggctcaggaagatgatgatggcatagagcatgcaatttattatcttagtcgtgtactaaatgatgcagaaactagatatactgccatagaaaaactttgtctttgtttgtatttctcttgtgcaaaacttaagcaatatataaagcctgttgatgtttatgtatattctcattatgatattattaagcacatgttgtcaaaac

SEQ ID NO: 8630 - DNA, 1175 bp, Glycine max
  Gm_smallRNAprecursor_1463
aagagatcgaaaggctgctgaggtgtaaattcatcagatctgccaggtatgtcgaatggttagcaaatatagtccctgtcattaaaaagaatggaactcttagagtatgcatagattttagggatttaaataatgctacacctaaagatgaatatgctatgccagtagcggaaatgttggtagattcggcagctggcttcgaatttttaagcatgttagatggttattctggttataaccaaatatttattgctgaaagtgatgtgtcgaaaacagcatttcgatgccctggtgctttaggcacttatgaatgggtggttatgccctttgggttgaaaaatgctggggccacttatcaaagggccatgaattccatgtttcatgattttattgacacatttatgcaaatttatattgatgatataatcatcaaatcctcctcagaagatagccatttggattatcttaggcaatctttcgaacgaatgaggaaacatggattaaaaatgaatccattaaagtgtgctttttgtgtgcgtgcaggagatttccttggttttgtggtgcataaaaaaggcattgagataaatcaaaataagacaaaggctattcttgagacgaagcctccttcgaccaaaaaacagcttcagtctttgctaggaaaaatcaacttcttgaggcgattcatttcgaatctaagtggcaaagctcaaattttttcgccattacttcgactcaagaaagatgaaccattcaaatggaatgaagagcatcaaaaggctttcgatgaaattaaagaatatctgatcaagcctcctgtgttaatgcctcctagtcgaaacaagactatgaagttgtatattgctgcatctgacaagaccattggtagcatgttggctcaggaagatgatgatggcatagagcatgcaatttattatcttagtcgtgtactaaatgatgcagaaactagatatactgccatagaaaaactttgtctttgtttgtatttctcttgtgcaaaacttaagcaatatataaagcctgttgatgtttatgtatattctcattatgatattattaagcacatgttgtcaaaacctattctacacagtagaattggaaaatgggctttagcattaacagaatattctttaacgtacaagcctttgaaatct

SEQ ID NO: 8631 - DNA, 1110 bp, Glycine max
  Gm_smallRNAprecursor_1464
tattgtagatcactcagtggtcgaaatgccgcaagactatgtcgatacagagccttggattttgtatttcgatggttcgaaacataaacatggaactggaattggaattttaataatatcccccaataaagttccaactaaattcaaatttaaaatcaaaggactttgttctaataatgaggctgagtatgaggctctaattacaggccttgaaattttaattagtctgggggcaagaaatgtaaacataaggggtgattcagaattagtgttgaagcaattgacacaagaatacaaatgtgttaatgagcacttagcaaaatattttgttatggcgagttctcttctgaatcatttcgattacattaacattgagcatatacctcgacaagaaaaccaagaagcaaatgatttagcccaaatagcttcagggtataaaatgtcgaaggaaaaattaactcagttgatcaaaataaaagataaactggtattaccagagccattaagcactaaattgccaatgccaaaacttgtgggggcaagtataccacaaaataatgaagatgaaagcatggatgatctccagggaaaaattcaaattttggccattgacaatatgttagataatgattggagaaagtccattgttgaatatttggaaaatccaataggcaatgtggctcgaaaggtcaaatatagggctttaaattacgtggttatgggaaatgatttgtttaaaaagactgcagaaggagtgttgttaaaatgtctaagtgaatcagaagcatacttagcagtttcccatgttcacagtggggcttgtggatcacatcaagcaggccataaaatgaaatggcttttatttcgacaaggtttgtattggccttcaatgttaaaagactgcatagaatttgctaaaggctgtcaggaatgccaaaagcatgcagggatacagcatgtacctgctagtgagttacactccataatcaaaccttggcctttcagaggatgggctttggacttaattggtgaaatcaagcccgcttcttctaagaaccagcgttatattatagttggtatcgattactttacaaaatggatcgaagcagt

SEQ ID NO: 8632 - DNA, 1082 bp, Glycine max
  Gm_smallRNAprecursor_1465
cagtggtcgaaatgccgcaagactatgtcgatacagagccttggattttgtatttcgatggttcgaaacataaacatggaactggaattggaattttaataatatcccccaataaagttccaactaaattcaaatttaaaatcaaaggactttgttctaataatgaggctgagtatgaggctctaattacaggccttgaaattttaattagtctgggggcaagaaatgtaaacataaggggtgattcagaattagtgttgaagcaattgacacaagaatacaaatgtgttaatgagcacttagcaaaatattttgttatggcgagttctcttctgaatcatttcgattacattaacattgagcatatacctcgacaagaaaaccaagaagcaaatgatttagcccaaatagcttcagggtataaaatgtcgaaggaaaaattaactcagttgatcaaaataaaagataaactggtattaccagagccattaagcactaaattgccaatgccaaaacttgtgggggcaagtataccacaaaataatgaagatgaaagcatggatgatctccagggaaaaattcaaattttggccattgacaatatgttagataatgattggagaaagtccattgttgaatatttggaaaatccaataggcaatgtggctcgaaaggtcaaatatagggctttaaattacgtggttatgggaaatgatttgtttaaaaagactgcagaaggagtgttgttaaaatgtctaagtgaatcagaagcatacttagcagtttcccatgttcacagtggggcttgtggatcacatcaagcaggccataaaatgaaatggcttttatttcgacaaggtttgtattggccttcaatgttaaaagactgcatagaatttgctaaaggctgtcaggaatgccaaaagcatgcagggatacagcatgtacctgctagtgagttacactccataatcaaaccttggcctttcagaggatgggctttggacttaattggtgaaatcaagcccgcttcttctaagaaccagcgttatattatagttggtatcgattactttacaaaa

SEQ ID NO: 8633 - DNA, 1137 bp, Glycine max
  Gm_smallRNAprecursor_1466
ataggcaatgtggctcgaaaggtcaaatatagggctttaaattacgtggttatgggaaatgatttgtttaaaaagactgcagaaggagtgttgttaaaatgtctaagtgaatcagaagcatacttagcagtttcccatgttcacagtggggcttgtggatcacatcaagcaggccataaaatgaaatggcttttatttcgacaaggtttgtattggccttcaatgttaaaagactgcatagaatttgctaaaggctgtcaggaatgccaaaagcatgcagggatacagcatgtacctgctagtgagttacactccataatcaaaccttggcctttcagaggatgggctttggacttaattggtgaaatcaagcccgcttcttctaagaaccagcgttatattatagttggtatcgattactttacaaaatggatcgaagcagtccctttgccaaatgttgatcaggaagcagtaattaatttcattcaaaatcatattatttataggtatggtattcctgaaacaattaccactgatcaaggttcagtttttactggacgaaaaatgcaagaatttgcccaaaaaactggctttcgattattaacctcaacaccatattacgcgcaagcaaatggtcaggtcgaagcagccaataagattgtaattaacttgattaaaaaacacattgccctaaagccaagaaattggaataaaacgttagatcaagttctatgggcatgtagaaattctcctaaggaatcaactaatactaccccatttcgactgacttatgggcatgatgctgtacttccggtcgaaatacatttgcaatcagccagggtacaaaaacaaatggacattccaatcgaccattattggaaaatgatgtcagatgagttagttgatttagatgaggagagattaagagcattagaagttttgactaaacaaaaagaaagagttgctaaagcttataataagaaagtgaagtcaaaaacttttaatgttggagatttagtttggaaggttatcctgcccatagatagtaaggatcgagccttgggcaaatggtccccaaattgggaaggaccgtataaaataattcagatctattcgaatggtgcttatgagttagag

SEQ ID NO: 8634 - DNA, 1086 bp, Glycine max
  Gm_smallRNAprecursor_1467
gtttctgaatcgaattagcggccttctcctggagttctttgcatttggcctgctctgttacaattttctgccttagatcatcgacctgagacagcaaattcgtaatagttgcctcccaggaggagatgttatcatcacaggctttgatctcagaagatccttctttcgcctctttggtgagacattcgacttcatgttgagcagctcgggctttctcgagcagaaggatatgtgcctgtttctgggcatccagtctggcgccattttcgcgttttttctgcacagtacttgcaaattggtcaatgatggcctcgatttggataactttgcctagaatctcatcagaggtaagggggttgtgcaatttcttcaaaaagttcaggtgcccaaaggcagcagaggggttctcttcaatggatttaagcacatcttcccgtgcgtattccatggataacttcaagagcagagaatcttggcgtactgaagagtttatttcggcatcagatgaggacgaagcaccaggaatcttttcacttgaggtgttggcttgacttgtgttcagcaggagtcgaagggctgcagcagggtcttcgtcttgcatttgaatgaatgtatcttctgcaatccctatgctagcggaaagcttagatgttgaagacgccgggtaaatgtccgaacctccagcttcagcctcttttatggcctcttcatcggaaaagttttcttcagatgaacttttctgactcgatccatgaggactgctggatccaatgccttgaccttcaccctgttcctcaacattcactgcatccgtctcaggagcgggagatgttcgagcatgtgagggtatttcttctacagaaacattttgttgtacctgattcgaattatcatggaaaaaggttaacaaatagtttcgtataagctatgatttaaaacacattaagaggatgatacctcgacggcaggttgttcttgtggtgagtccggttgatcgacagggttgcccatctcagcaatagaaggagtagcctctacctcagtgccgtcaatatcggtcgaaggtggttggacgtcaacaggttg

SEQ ID NO: 8635 - DNA, 1157 bp, Glycine max
  Gm_smallRNAprecursor_1468
ggaatagtgtccataagggcatatgttaactgaacttatggatctgaaccatgtacaataattttaatttaaacaatatgtgtttgaacaatattttctggaagcacagcagtttgatattttagttgaatgatactgtagcagtaagtcccgtggttgagaaagggcagtaaggctaaggtgtattgttcaaataaaatattgagacataatatactggtggctataggagtaatgttcaaactatattgtctgttaaaaaaaattctttttcattttttcagatccaagaagttctgtaacatatatagcgttatggaaatatttctatggaaccaaatgaaggcaaagatattagagaatgatataatcatgtctagactattgcgatctttttcccatatctcttttcgctcaaattcctcctcatcatcttcttcaagaaactccaatctattaaatgatcaagataaccagacccaagaggtcaccccaaaacacaatctcttcgatgaggaagtccgattcgaagatatcaatcaaaacatggatgactagaacattccagaaatccctcaggatcaactatacgttcctgaaacaataaagaacaaacacaactttgattacataatcaaaacagtagaaaacaatattcctctaggacaagatataggggaagaatttcatttactttcaaaaaattcaatttatgaacatagccgtaagtataaatatctacacatcgattgtgtacaagtagccatcaagcccttaatcgatatgggcatagatgcagcagttttaatgtgtctaagagatattaggcataatcaatttgaagactccctaattggaacagttgaaaccagcctaggacaaggtccaatatatattttaattgttatccaaacaaaacagtgagtctgatggacagaaacattcttgactctctgttcttaaacatccactttcatggccttgacatgaaagaaggatcaatcccagcagccttaatttataggatccagtacaaggtcatgaatacttgtgcatctagagtcctgttaaaacctcaaaaaggagaaacaactttgtttatcactgatatgacaaaggctaacgtttctctcccgagaaaaataaaatgggatgaa

SEQ ID NO: 8636 - DNA, 1033 bp, Glycine max
  Gm_smallRNAprecursor_1469
aaggctaaggtgtattgttcaaataaaatattgagacataatatactggtggctataggagtaatgttcaaactatattgtctgttaaaaaaaattctttttcattttttcagatccaagaagttctgtaacatatatagcgttatggaaatatttctatggaaccaaatgaaggcaaagatattagagaatgatataatcatgtctagactattgcgatctttttcccatatctcttttcgctcaaattcctcctcatcatcttcttcaagaaactccaatctattaaatgatcaagataaccagacccaagaggtcaccccaaaacacaatctcttcgatgaggaagtccgattcgaagatatcaatcaaaacatggatgactagaacattccagaaatccctcaggatcaactatacgttcctgaaacaataaagaacaaacacaactttgattacataatcaaaacagtagaaaacaatattcctctaggacaagatataggggaagaatttcatttactttcaaaaaattcaatttatgaacatagccgtaagtataaatatctacacatcgattgtgtacaagtagccatcaagcccttaatcgatatgggcatagatgcagcagttttaatgtgtctaagagatattaggcataatcaatttgaagactccctaattggaacagttgaaaccagcctaggacaaggtccaatatatattttaattgttatccaaacaaaacagtgagtctgatggacagaaacattcttgactctctgttcttaaacatccactttcatggccttgacatgaaagaaggatcaatcccagcagccttaatttataggatccagtacaaggtcatgaatacttgtgcatctagagtcctgttaaaacctcaaaaaggagaaacaactttgtttatcactgatatgacaaaggctaacgtttctctcccgagaaaaataaaatgggatgaagtaactcttcccaaaagatgggttatggataaggccacaccgtttgt

SEQ ID NO: 8637 - DNA, 1047 bp, Glycine max
  Gm_smallRNAprecursor_1470
gagacataatatactggtggctataggagtaatgttcaaactatattgtctgttaaaaaaaattctttttcattttttcagatccaagaagttctgtaacatatatagcgttatggaaatatttctatggaaccaaatgaaggcaaagatattagagaatgatataatcatgtctagactattgcgatctttttcccatatctcttttcgctcaaattcctcctcatcatcttcttcaagaaactccaatctattaaatgatcaagataaccagacccaagaggtcaccccaaaacacaatctcttcgatgaggaagtccgattcgaagatatcaatcaaaacatggatgactagaacattccagaaatccctcaggatcaactatacgttcctgaaacaataaagaacaaacacaactttgattacataatcaaaacagtagaaaacaatattcctctaggacaagatataggggaagaatttcatttactttcaaaaaattcaatttatgaacatagccgtaagtataaatatctacacatcgattgtgtacaagtagccatcaagcccttaatcgatatgggcatagatgcagcagttttaatgtgtctaagagatattaggcataatcaatttgaagactccctaattggaacagttgaaaccagcctaggacaaggtccaatatatattttaattgttatccaaacaaaacagtgagtctgatggacagaaacattcttgactctctgttcttaaacatccactttcatggccttgacatgaaagaaggatcaatcccagcagccttaatttataggatccagtacaaggtcatgaatacttgtgcatctagagtcctgttaaaacctcaaaaaggagaaacaactttgtttatcactgatatgacaaaggctaacgtttctctcccgagaaaaataaaatgggatgaagtaactcttcccaaaagatgggttatggataaggccacaccgtttgttccccgacccgctccaaccatagagcatattaagcaagataactcc

SEQ ID NO: 8638 - DNA, 1126 bp, Glycine max
  Gm_smallRNAprecursor_1471
aagattaacacaaactttcttctggtaaaaaaccttgagaatgaagtaatcttaggaacacccttcattagagccctgtttcccatccaaatatctaatgaaggaataaccacaaattatttaggaagaaaaattatatttaatttttctactaaaccaattaccagaaatataaatcttatagaaaataagattaatcaaattaacttcttaaaagaagaagtatcttttaataatattcagatacaactgggaaaaccccaagtaaaagaaaaaaatcaatctttattaaatcatatagaatcgaccgtctgttctgaattgccacatgcattttgggacagaaagaaacatattgttgatctcccttatgagaaagactttagggaaaaacaaattcccaccaaagccagaccaatccaaatgaatgaagaacttcttcaatactgtcaaaaggaaatcaagtatttgcttgataaaggcctaatccggaaaagcaaaagcccatggtcttgtgcggctttttatgtcaacaaacaatctgagattgagcgtggaacaccccgcttagtcataaactacaaaccactaaatcaagcgttacaatggattagatatcctattccaaacaaaaaagatttgcttaatagattaaattctgcaaagatattttcaaaatttgatatgaaatctggattttggcaaatccaaatccaagaatcagataggtacaaaacagcatttactgtacctttcgggcaatatgaatggaatgtgatgccattcggactgaagaatgccccttcagaatttcaaaaaattatgaatgatatttttaatccctattcaaaatttgtcattgtctacatagatgatgttttaatcttttcccaaaacattgaccaacatttcaaacatctccagaccttcatccatatcatcaaacagaatggtttggcagtctccaaatcaaaaatcaatcttttccaaactcgaattcgattccttggtcacaatatatatcaaggtacaatcattccaatcgaaaggtcaatagagtttactagcaaatttcccaaccaaatcttagacaaaacccagttacaaagatttctaggttgtctaa

SEQ ID NO: 8639 - DNA, 1168 bp, Glycine max
  Gm_smallRNAprecursor_1472
atggtcttgtgcggctttttatgtcaacaaacaatctgagattgagcgtggaacaccccgcttagtcataaactacaaaccactaaatcaagcgttacaatggattagatatcctattccaaacaaaaaagatttgcttaatagattaaattctgcaaagatattttcaaaatttgatatgaaatctggattttggcaaatccaaatccaagaatcagataggtacaaaacagcatttactgtacctttcgggcaatatgaatggaatgtgatgccattcggactgaagaatgccccttcagaatttcaaaaaattatgaatgatatttttaatccctattcaaaatttgtcattgtctacatagatgatgttttaatcttttcccaaaacattgaccaacatttcaaacatctccagaccttcatccatatcatcaaacagaatggtttggcagtctccaaatcaaaaatcaatcttttccaaactcgaattcgattccttggtcacaatatatatcaaggtacaatcattccaatcgaaaggtcaatagagtttactagcaaatttcccaaccaaatcttagacaaaacccagttacaaagatttctaggttgtctaaattacgtaggagaatttgtcccctatttaaacaatattgtcaagccattgcatgataggctgaagaaaaatccgcctccttggtctgacctccatacacaaacagttaaagaaatcaaagtcaaagtccaatccataaaatgtctgtatcttcatattccacaggcatttaaaattgtcgaaactaatgcttcagacataggttatggtggcatcctcaaacaaagagtccatggccaagatcatgtcattgcatatacatcaaaacattggaatcctgcacaattaaaatactcaactgttaaaaaggaagttttagcaattgttttatgcatttccaaatttcaatcggatttattaaaccaaaattttttaatcagggttgattgtaaatcagccaaagatattttacaaaaagatgttaaaaaccttgcctcaaaacaaatttttgcaagatgacaagcaattctaagtgtctttgattttgacatagaatacatcaagggcgcctcaaattcattacctgactaccttacccgtgaattctta

SEQ ID NO: 8640 - DNA, 1035 bp, Glycine max
  Gm_smallRNAprecursor_1473
attgtctacatagatgatgttttaatcttttcccaaaacattgaccaacatttcaaacatctccagaccttcatccatatcatcaaacagaatggtttggcagtctccaaatcaaaaatcaatcttttccaaactcgaattcgattccttggtcacaatatatatcaaggtacaatcattccaatcgaaaggtcaatagagtttactagcaaatttcccaaccaaatcttagacaaaacccagttacaaagatttctaggttgtctaaattacgtaggagaatttgtcccctatttaaacaatattgtcaagccattgcatgataggctgaagaaaaatccgcctccttggtctgacctccatacacaaacagttaaagaaatcaaagtcaaagtccaatccataaaatgtctgtatcttcatattccacaggcatttaaaattgtcgaaactaatgcttcagacataggttatggtggcatcctcaaacaaagagtccatggccaagatcatgtcattgcatatacatcaaaacattggaatcctgcacaattaaaatactcaactgttaaaaaggaagttttagcaattgttttatgcatttccaaatttcaatcggatttattaaaccaaaattttttaatcagggttgattgtaaatcagccaaagatattttacaaaaagatgttaaaaaccttgcctcaaaacaaatttttgcaagatgacaagcaattctaagtgtctttgattttgacatagaatacatcaagggcgcctcaaattcattacctgactaccttacccgtgaattcttacagaaaagtggtaatgcctcctacggcatcgggaatctccctaaggggaggaaggagtacaggcaaaggagccagactggctcttccagagccaaccatcaagaaatcatcaacctcttctgggtcaccaacccaggctgggtcatctacccagaaaaccaatttagaagggtcatcaacccagattgcctcattcaaacctgagccatccactcagga

SEQ ID NO: 8641 - DNA, 1035 bp, Glycine max; identical to SEQ ID NO: 8640
  Gm_smallRNAprecursor_1474

SEQ ID NO: 8642 - DNA, 1113 bp, Glycine max
  Gm_smallRNAprecursor_1475
attgtctacatagatgatgttttaatcttttcccaaaacattgaccaacatttcaaacatctccagaccttcatccatatcatcaaacagaatggtttggcagtctccaaatcaaaaatcaatcttttccaaactcgaattcgattccttggtcacaatatatatcaaggtacaatcattccaatcgaaaggtcaatagagtttactagcaaatttcccaaccaaatcttagacaaaacccagttacaaagatttctaggttgtctaaattacgtaggagaatttgtcccctatttaaacaatattgtcaagccattgcatgataggctgaagaaaaatccgcctccttggtctgacctccatacacaaacagttaaagaaatcaaagtcaaagtccaatccataaaatgtctgtatcttcatattccacaggcatttaaaattgtcgaaactaatgcttcagacataggttatggtggcatcctcaaacaaagagtccatggccaagatcatgtcattgcatatacatcaaaacattggaatcctgcacaattaaaatactcaactgttaaaaaggaagttttagcaattgttttatgcatttccaaatttcaatcggatttattaaaccaaaattttttaatcagggttgattgtaaatcagccaaagatattttacaaaaagatgttaaaaaccttgcctcaaaacaaatttttgcaagatgacaagcaattctaagtgtctttgattttgacatagaatacatcaagggcgcctcaaattcattacctgactaccttacccgtgaattcttacagaaaagtggtaatgcctcctacggcatcgggaatctccctaaggggaggaaggagtacaggcaaaggagccagactggctcttccagagccaaccatcaagaaatcatcaacctcttctgggtcaccaacccaggctgggtcatctacccagaaaaccaatttagaagggtcatcaacccagattgcctcattcaaacctgagccatccactcaggaatctcccaaaccggcaaccgccaaacaaacatcggccgactatgcatggccaattgaaacccttcaggcccttcaaga

SEQ ID NO: 8643 - DNA, 1113 bp, Glycine max; identical to SEQ ID NO: 8642
  Gm_smallRNAprecursor_1476

SEQ ID NO: 8644 - DNA, 1114 bp, Glycine max
  Gm_smallRNAprecursor_1477
attgtctacatagatgatgttttaatcttttcccaaaacattgaccaacatttcaaacatctccagaccttcatccatatcatcaaacagaatggtttggcagtctccaaatcaaaaatcaatcttttccaaactcgaattcgattccttggtcacaatatatatcaaggtacaatcattccaatcgaaaggtcaatagagtttactagcaaatttcccaaccaaatcttagacaaaacccagttacaaagatttctaggttgtctaaattacgtaggagaatttgtcccctatttaaacaatattgtcaagccattgcatgataggctgaagaaaaatccgcctccttggtctgacctccatacacaaacagttaaagaaatcaaagtcaaagtccaatccataaaatgtctgtatcttcatattccacaggcatttaaaattgtcgaaactaatgcttcagacataggttatggtggcatcctcaaacaaagagtccatggccaagatcatgtcattgcatatacatcaaaacattggaatcctgcacaattaaaatactcaactgttaaaaaggaagttttagcaattgttttatgcatttccaaatttcaatcggatttattaaaccaaaattttttaatcagggttgattgtaaatcagccaaagatattttacaaaaagatgttaaaaaccttgcctcaaaacaaatttttgcaagatgacaagcaattctaagtgtctttgattttgacatagaatacatcaagggcgcctcaaattcattacctgactaccttacccgtgaattcttacagaaaagtggtaatgcctcctacggcatcgggaatctccctaaggggaggaaggagtacaggcaaaggagccagactggctcttccagagccaaccatcaagaaatcatcaacctcttctgggtcaccaacccaggctgggtcatctacccagaaaaccaatttagaagggtcatcaacccagattgcctcattcaaacctgagccatccactcaggaatctcccaaaccggcaaccgccaaacaaacatcggccgactatgcatggccaattgaaacccttcaggcccttcaagac

SEQ ID NO: 8645 - DNA, 1114 bp, Glycine max; identical to SEQ ID NO: 8644
  Gm_smallRNAprecursor_1478

SEQ ID NO: 8646 - DNA, 1037 bp, Glycine max
  Gm_smallRNAprecursor_1479
aaacattgaccaacatttcaaacatctccagaccttcatccatatcatcaaacagaatggtttggcagtctccaaatcaaaaatcaatcttttccaaactcgaattcgattccttggtcacaatatatatcaaggtacaatcattccaatcgaaaggtcaatagagtttactagcaaatttcccaaccaaatcttagacaaaacccagttacaaagatttctaggttgtctaaattacgtaggagaatttgtcccctatttaaacaatattgtcaagccattgcatgataggctgaagaaaaatccgcctccttggtctgacctccatacacaaacagttaaagaaatcaaagtcaaagtccaatccataaaatgtctgtatcttcatattccacaggcatttaaaattgtcgaaactaatgcttcagacataggttatggtggcatcctcaaacaaagagtccatggccaagatcatgtcattgcatatacatcaaaacattggaatcctgcacaattaaaatactcaactgttaaaaaggaagttttagcaattgttttatgcatttccaaatttcaatcggatttattaaaccaaaattttttaatcagggttgattgtaaatcagccaaagatattttacaaaaagatgttaaaaaccttgcctcaaaacaaatttttgcaagatgacaagcaattctaagtgtctttgattttgacatagaatacatcaagggcgcctcaaattcattacctgactaccttacccgtgaattcttacagaaaagtggtaatgcctcctacggcatcgggaatctccctaaggggaggaaggagtacaggcaaaggagccagactggctcttccagagccaaccatcaagaaatcatcaacctcttctgggtcaccaacccaggctgggtcatctacccagaaaaccaatttagaagggtcatcaacccagattgcctcattcaaacctgagccatccactcaggaatctcccaaaccggcaaccgccaaacaaacatcggcc

SEQ ID NO: 8647 - DNA, 1099 bp, Glycine max
  Gm_smallRNAprecursor_1480
gtaatgcctcctacggcatcgggaatctccctaaggggaggaaggagtacaggcaaaggagccagactggctcttccagagccaaccatcaagaaatcatcaacctcttctgggtcaccaacccaggctgggtcatctacccagaaaaccaatttagaagggtcatcaacccagattgcctcattcaaacctgagccatccactcaggaatctcccaaaccggcaaccgccaaacaaacatcggccgactatgcatggccaattgaaacccttcaggcccttcaagacatgggtctgaccaaatttccaaaaataatcaaaaaatcttgggcagacattacctcagaatctgatgatgaatctgaatcaaatttacaaacaatgatccaaaatgcgtcaatgaccaaaaccgccaccaatactaaaggaaaactacctttagccaaagctcaaacaccacctaccaaacaaactaacaattatatttataaaaataaattgttaactgttttgcagatggaacctgagttttgggacaaaaatcccttcaaggcgacggccaaggctttcccaccaggatttcactacaaaccaaccaccatcctgaagacaagaactttttatgaattgattttggtagattcaaactcagtatctatcaaacatttcaaagatcccaaagaccaaacattaaacacccactcgacaatccaaatactaaaagttcttcaaccaagacactttggttcggacttgaacaaaggaaagagattttcagttccatttgatccggtaggttatacctattgggattacgttgatgcttggactaaggtgttttggcaccaaaatacccgcttcaagcattcatggctgatatatttcaagaccaatacaaccaattggtttttgcaatggtgggacttctttggaccaatcccagagatattcccagaaacggtccaacaaggatttgcccaatttaagaaataatacaattcgcaggaatcacgaattctagcagatcttaaatacttttcaagctttgcactgtcatggatattctcatgacaatatcgttacagcaagactgaaaaga

SEQ ID NO: 8648 - DNA, 1190 bp, Glycine max
  Gm_smallRNAprecursor_1481
acaggcaaaggagccagactggctcttccagagccaaccatcaagaaatcatcaacctcttctgggtcaccaacccaggctgggtcatctacccagaaaaccaatttagaagggtcatcaacccagattgcctcattcaaacctgagccatccactcaggaatctcccaaaccggcaaccgccaaacaaacatcggccgactatgcatggccaattgaaacccttcaggcccttcaagacatgggtctgaccaaatttccaaaaataatcaaaaaatcttgggcagacattacctcagaatctgatgatgaatctgaatcaaatttacaaacaatgatccaaaatgcgtcaatgaccaaaaccgccaccaatactaaaggaaaactacctttagccaaagctcaaacaccacctaccaaacaaactaacaattatatttataaaaataaattgttaactgttttgcagatggaacctgagttttgggacaaaaatcccttcaaggcgacggccaaggctttcccaccaggatttcactacaaaccaaccaccatcctgaagacaagaactttttatgaattgattttggtagattcaaactcagtatctatcaaacatttcaaagatcccaaagaccaaacattaaacacccactcgacaatccaaatactaaaagttcttcaaccaagacactttggttcggacttgaacaaaggaaagagattttcagttccatttgatccggtaggttatacctattgggattacgttgatgcttggactaaggtgttttggcaccaaaatacccgcttcaagcattcatggctgatatatttcaagaccaatacaaccaattggtttttgcaatggtgggacttctttggaccaatcccagagatattcccagaaacggtccaacaaggatttgcccaatttaagaaataatacaattcgcaggaatcacgaattctagcagatcttaaatacttttcaagctttgcactgtcatggatattctcatgacaatatcgttacagcaagactgaaaagacaaaccaatatccatcactacaaagacacgcatttgtaaaatggtggacacaatttgactcatccaaagcggatccagaacaagtaaaactctggttccaatcccatccagaattcctcaaagcagctgatccagaaac

SEQ ID NO: 8649 - DNA, 1107 bp, Glycine max
  Gm_smallRNAprecursor_1482
aaccggcaaccgccaaacaaacatcggccgactatgcatggccaattgaaacccttcaggcccttcaagacatgggtctgaccaaatttccaaaaataatcaaaaaatcttgggcagacattacctcagaatctgatgatgaatctgaatcaaatttacaaacaatgatccaaaatgcgtcaatgaccaaaaccgccaccaatactaaaggaaaactacctttagccaaagctcaaacaccacctaccaaacaaactaacaattatatttataaaaataaattgttaactgttttgcagatggaacctgagttttgggacaaaaatcccttcaaggcgacggccaaggctttcccaccaggatttcactacaaaccaaccaccatcctgaagacaagaactttttatgaattgattttggtagattcaaactcagtatctatcaaacatttcaaagatcccaaagaccaaacattaaacacccactcgacaatccaaatactaaaagttcttcaaccaagacactttggttcggacttgaacaaaggaaagagattttcagttccatttgatccggtaggttatacctattgggattacgttgatgcttggactaaggtgttttggcaccaaaatacccgcttcaagcattcatggctgatatatttcaagaccaatacaaccaattggtttttgcaatggtgggacttctttggaccaatcccagagatattcccagaaacggtccaacaaggatttgcccaatttaagaaataatacaattcgcaggaatcacgaattctagcagatcttaaatacttttcaagctttgcactgtcatggatattctcatgacaatatcgttacagcaagactgaaaagacaaaccaatatccatcactacaaagacacgcatttgtaaaatggtggacacaatttgactcatccaaagcggatccagaacaagtaaaactctggttccaatcccatccagaattcctcaaagcagctgatccagaaacttctgtgtttttgaaccaaaagtctcatttggcagcatttttagcaggatcgacatcaaaggaggtcttagctaaaaatctgaagg

SEQ ID NO: 8650 - DNA, 1107 bp, Glycine max; identical to SEQ ID NO: 8649
  Gm_smallRNAprecursor_1483

SEQ ID NO: 8651 - DNA, 1108 bp, Glycine max
  Gm_smallRNAprecursor_1484
aaccggcaaccgccaaacaaacatcggccgactatgcatggccaattgaaacccttcaggcccttcaagacatgggtctgaccaaatttccaaaaataatcaaaaaatcttgggcagacattacctcagaatctgatgatgaatctgaatcaaatttacaaacaatgatccaaaatgcgtcaatgaccaaaaccgccaccaatactaaaggaaaactacctttagccaaagctcaaacaccacctaccaaacaaactaacaattatatttataaaaataaattgttaactgttttgcagatggaacctgagttttgggacaaaaatcccttcaaggcgacggccaaggctttcccaccaggatttcactacaaaccaaccaccatcctgaagacaagaactttttatgaattgattttggtagattcaaactcagtatctatcaaacatttcaaagatcccaaagaccaaacattaaacacccactcgacaatccaaatactaaaagttcttcaaccaagacactttggttcggacttgaacaaaggaaagagattttcagttccatttgatccggtaggttatacctattgggattacgttgatgcttggactaaggtgttttggcaccaaaatacccgcttcaagcattcatggctgatatatttcaagaccaatacaaccaattggtttttgcaatggtgggacttctttggaccaatcccagagatattcccagaaacggtccaacaaggatttgcccaatttaagaaataatacaattcgcaggaatcacgaattctagcagatcttaaatacttttcaagctttgcactgtcatggatattctcatgacaatatcgttacagcaagactgaaaagacaaaccaatatccatcactacaaagacacgcatttgtaaaatggtggacacaatttgactcatccaaagcggatccagaacaagtaaaactctggttccaatcccatccagaattcctcaaagcagctgatccagaaacttctgtgtttttgaaccaaaagtctcatttggcagcatttttagcaggatcgacatcaaaggaggtcttagctaaaaatctgaagga

SEQ ID NO: 8652 - DNA, 1108 bp, Glycine max; identical to SEQ ID NO: 8651
  Gm_smallRNAprecursor_1485

SEQ ID NO: 8653 - DNA, 1102 bp, Glycine max
  Gm_smallRNAprecursor_1486
cggcaaccgccaaacaaacatcggccgactatgcatggccaattgaaacccttcaggcccttcaagacatgggtctgaccaaatttccaaaaataatcaaaaaatcttgggcagacattacctcagaatctgatgatgaatctgaatcaaatttacaaacaatgatccaaaatgcgtcaatgaccaaaaccgccaccaatactaaaggaaaactacctttagccaaagctcaaacaccacctaccaaacaaactaacaattatatttataaaaataaattgttaactgttttgcagatggaacctgagttttgggacaaaaatcccttcaaggcgacggccaaggctttcccaccaggatttcactacaaaccaaccaccatcctgaagacaagaactttttatgaattgattttggtagattcaaactcagtatctatcaaacatttcaaagatcccaaagaccaaacattaaacacccactcgacaatccaaatactaaaagttcttcaaccaagacactttggttcggacttgaacaaaggaaagagattttcagttccatttgatccggtaggttatacctattgggattacgttgatgcttggactaaggtgttttggcaccaaaatacccgcttcaagcattcatggctgatatatttcaagaccaatacaaccaattggtttttgcaatggtgggacttctttggaccaatcccagagatattcccagaaacggtccaacaaggatttgcccaatttaagaaataatacaattcgcaggaatcacgaattctagcagatcttaaatacttttcaagctttgcactgtcatggatattctcatgacaatatcgttacagcaagactgaaaagacaaaccaatatccatcactacaaagacacgcatttgtaaaatggtggacacaatttgactcatccaaagcggatccagaacaagtaaaactctggttccaatcccatccagaattcctcaaagcagctgatccagaaacttctgtgtttttgaaccaaaagtctcatttggcagcatttttagcaggatcgacatcaaaggaggtcttagctaaaaatctgaa

SEQ ID NO: 8654 - DNA, 1131 bp, Glycine max
  Gm_smallRNAprecursor_1487
atcccttcaaggcgacggccaaggctttcccaccaggatttcactacaaaccaaccaccatcctgaagacaagaactttttatgaattgattttggtagattcaaactcagtatctatcaaacatttcaaagatcccaaagaccaaacattaaacacccactcgacaatccaaatactaaaagttcttcaaccaagacactttggttcggacttgaacaaaggaaagagattttcagttccatttgatccggtaggttatacctattgggattacgttgatgcttggactaaggtgttttggcaccaaaatacccgcttcaagcattcatggctgatatatttcaagaccaatacaaccaattggtttttgcaatggtgggacttctttggaccaatcccagagatattcccagaaacggtccaacaaggatttgcccaatttaagaaataatacaattcgcaggaatcacgaattctagcagatcttaaatacttttcaagctttgcactgtcatggatattctcatgacaatatcgttacagcaagactgaaaagacaaaccaatatccatcactacaaagacacgcatttgtaaaatggtggacacaatttgactcatccaaagcggatccagaacaagtaaaactctggttccaatcccatccagaattcctcaaagcagctgatccagaaacttctgtgtttttgaaccaaaagtctcatttggcagcatttttagcaggatcgacatcaaaggaggtcttagctaaaaatctgaaggaagttctgcaaatgttacaacaggaagaagaagcttcatcctcaaagaaggaagaaacaagttctgctgaagaagaagaagaagatcccttttaccaaaacgaagatgattgttttggtatctgtttagattaaatttaatttcggtcacaaagtcgtttgtctgtaattaatgtgtaattaatgctggacaatactacctgtcctgtagccattaaagtcccgatcaaaactacttgtcttgtaacaaacagtcaaatagtcccggtcaaaactaccggcaactaccggtcttagatttttggctatataaggagtcctcaagtatgttgtgaggcaccctttcatt

SEQ ID NO: 8655 - DNA, 1169 bp, Glycine max
  Gm_smallRNAprecursor_1488
atcccttcaaggcgacggccaaggctttcccaccaggatttcactacaaaccaaccaccatcctgaagacaagaactttttatgaattgattttggtagattcaaactcagtatctatcaaacatttcaaagatcccaaagaccaaacattaaacacccactcgacaatccaaatactaaaagttcttcaaccaagacactttggttcggacttgaacaaaggaaagagattttcagttccatttgatccggtaggttatacctattgggattacgttgatgcttggactaaggtgttttggcaccaaaatacccgcttcaagcattcatggctgatatatttcaagaccaatacaaccaattggtttttgcaatggtgggacttctttggaccaatcccagagatattcccagaaacggtccaacaaggatttgcccaatttaagaaataatacaattcgcaggaatcacgaattctagcagatcttaaatacttttcaagctttgcactgtcatggatattctcatgacaatatcgttacagcaagactgaaaagacaaaccaatatccatcactacaaagacacgcatttgtaaaatggtggacacaatttgactcatccaaagcggatccagaacaagtaaaactctggttccaatcccatccagaattcctcaaagcagctgatccagaaacttctgtgtttttgaaccaaaagtctcatttggcagcatttttagcaggatcgacatcaaaggaggtcttagctaaaaatctgaaggaagttctgcaaatgttacaacaggaagaagaagcttcatcctcaaagaaggaagaaacaagttctgctgaagaagaagaagaagatcccttttaccaaaacgaagatgattgttttggtatctgtttagattaaatttaatttcggtcacaaagtcgtttgtctgtaattaatgtgtaattaatgctggacaatactacctgtcctgtagccattaaagtcccgatcaaaactacttgtcttgtaacaaacagtcaaatagtcccggtcaaaactaccggcaactaccggtcttagatttttggctatataaggagtcctcaagtatgttgtgaggcaccctttcatttggccaattttcaggtttctgaagagaggtgctctgaa

SEQ ID NO: 8656 - DNA, 1173 bp, Glycine max
  Gm_smallRNAprecursor_1489
atcccttcaaggcgacggccaaggctttcccaccaggatttcactacaaaccaaccaccatcctgaagacaagaactttttatgaattgattttggtagattcaaactcagtatctatcaaacatttcaaagatcccaaagaccaaacattaaacacccactcgacaatccaaatactaaaagttcttcaaccaagacactttggttcggacttgaacaaaggaaagagattttcagttccatttgatccggtaggttatacctattgggattacgttgatgcttggactaaggtgttttggcaccaaaatacccgcttcaagcattcatggctgatatatttcaagaccaatacaaccaattggtttttgcaatggtgggacttctttggaccaatcccagagatattcccagaaacggtccaacaaggatttgcccaatttaagaaataatacaattcgcaggaatcacgaattctagcagatcttaaatacttttcaagctttgcactgtcatggatattctcatgacaatatcgttacagcaagactgaaaagacaaaccaatatccatcactacaaagacacgcatttgtaaaatggtggacacaatttgactcatccaaagcggatccagaacaagtaaaactctggttccaatcccatccagaattcctcaaagcagctgatccagaaacttctgtgtttttgaaccaaaagtctcatttggcagcatttttagcaggatcgacatcaaaggaggtcttagctaaaaatctgaaggaagttctgcaaatgttacaacaggaagaagaagcttcatcctcaaagaaggaagaaacaagttctgctgaagaagaagaagaagatcccttttaccaaaacgaagatgattgttttggtatctgtttagattaaatttaatttcggtcacaaagtcgtttgtctgtaattaatgtgtaattaatgctggacaatactacctgtcctgtagccattaaagtcccgatcaaaactacttgtcttgtaacaaacagtcaaatagtcccggtcaaaactaccggcaactaccggtcttagatttttggctatataaggagtcctcaagtatgttgtgaggcaccctttcatttggccaattttcaggtttctgaagagaggtgctctgaaacaa

SEQ ID NO: 8657 - DNA, 1078 bp, Glycine max
  Gm_smallRNAprecursor_1490
tgattttggtagattcaaactcagtatctatcaaacatttcaaagatcccaaagaccaaacattaaacacccactcgacaatccaaatactaaaagttcttcaaccaagacactttggttcggacttgaacaaaggaaagagattttcagttccatttgatccggtaggttatacctattgggattacgttgatgcttggactaaggtgttttggcaccaaaatacccgcttcaagcattcatggctgatatatttcaagaccaatacaaccaattggtttttgcaatggtgggacttctttggaccaatcccagagatattcccagaaacggtccaacaaggatttgcccaatttaagaaataatacaattcgcaggaatcacgaattctagcagatcttaaatacttttcaagctttgcactgtcatggatattctcatgacaatatcgttacagcaagactgaaaagacaaaccaatatccatcactacaaagacacgcatttgtaaaatggtggacacaatttgactcatccaaagcggatccagaacaagtaaaactctggttccaatcccatccagaattcctcaaagcagctgatccagaaacttctgtgtttttgaaccaaaagtctcatttggcagcatttttagcaggatcgacatcaaaggaggtcttagctaaaaatctgaaggaagttctgcaaatgttacaacaggaagaagaagcttcatcctcaaagaaggaagaaacaagttctgctgaagaagaagaagaagatcccttttaccaaaacgaagatgattgttttggtatctgtttagattaaatttaatttcggtcacaaagtcgtttgtctgtaattaatgtgtaattaatgctggacaatactacctgtcctgtagccattaaagtcccgatcaaaactacttgtcttgtaacaaacagtcaaatagtcccggtcaaaactaccggcaactaccggtcttagatttttggctatataaggagtcctcaagtatgttgtgaggcaccctttcatttggccaattttcaggtttctgaagagaggtgctc

SEQ ID NO: 8658 - DNA, 1079 bp, Glycine max
  Gm_smallRNAprecursor_1491
tgattttggtagattcaaactcagtatctatcaaacatttcaaagatcccaaagaccaaacattaaacacccactcgacaatccaaatactaaaagttcttcaaccaagacactttggttcggacttgaacaaaggaaagagattttcagttccatttgatccggtaggttatacctattgggattacgttgatgcttggactaaggtgttttggcaccaaaatacccgcttcaagcattcatggctgatatatttcaagaccaatacaaccaattggtttttgcaatggtgggacttctttggaccaatcccagagatattcccagaaacggtccaacaaggatttgcccaatttaagaaataatacaattcgcaggaatcacgaattctagcagatcttaaatacttttcaagctttgcactgtcatggatattctcatgacaatatcgttacagcaagactgaaaagacaaaccaatatccatcactacaaagacacgcatttgtaaaatggtggacacaatttgactcatccaaagcggatccagaacaagtaaaactctggttccaatcccatccagaattcctcaaagcagctgatccagaaacttctgtgtttttgaaccaaaagtctcatttggcagcatttttagcaggatcgacatcaaaggaggtcttagctaaaaatctgaaggaagttctgcaaatgttacaacaggaagaagaagcttcatcctcaaagaaggaagaaacaagttctgctgaagaagaagaagaagatcccttttaccaaaacgaagatgattgttttggtatctgtttagattaaatttaatttcggtcacaaagtcgtttgtctgtaattaatgtgtaattaatgctggacaatactacctgtcctgtagccattaaagtcccgatcaaaactacttgtcttgtaacaaacagtcaaatagtcccggtcaaaactaccggcaactaccggtcttagatttttggctatataaggagtcctcaagtatgttgtgaggcaccctttcatttggccaattttcaggtttctgaagagaggtgctct

SEQ ID NO: 8659 - DNA, 1055 bp, Glycine max
  Gm_smallRNAprecursor_1492
aatactaaaagttcttcaaccaagacactttggttcggacttgaacaaaggaaagagattttcagttccatttgatccggtaggttatacctattgggattacgttgatgcttggactaaggtgttttggcaccaaaatacccgcttcaagcattcatggctgatatatttcaagaccaatacaaccaattggtttttgcaatggtgggacttctttggaccaatcccagagatattcccagaaacggtccaacaaggatttgcccaatttaagaaataatacaattcgcaggaatcacgaattctagcagatcttaaatacttttcaagctttgcactgtcatggatattctcatgacaatatcgttacagcaagactgaaaagacaaaccaatatccatcactacaaagacacgcatttgtaaaatggtggacacaatttgactcatccaaagcggatccagaacaagtaaaactctggttccaatcccatccagaattcctcaaagcagctgatccagaaacttctgtgtttttgaaccaaaagtctcatttggcagcatttttagcaggatcgacatcaaaggaggtcttagctaaaaatctgaaggaagttctgcaaatgttacaacaggaagaagaagcttcatcctcaaagaaggaagaaacaagttctgctgaagaagaagaagaagatcccttttaccaaaacgaagatgattgttttggtatctgtttagattaaatttaatttcggtcacaaagtcgtttgtctgtaattaatgtgtaattaatgctggacaatactacctgtcctgtagccattaaagtcccgatcaaaactacttgtcttgtaacaaacagtcaaatagtcccggtcaaaactaccggcaactaccggtcttagatttttggctatataaggagtcctcaagtatgttgtgaggcaccctttcatttggccaattttcaggtttctgaagagaggtgctctgaaacaagatttttgtaagcgctactttcaaaattcaataaatttctatttttcatccttc

SEQ ID NO: 8660 - DNA, 1215 bp, Glycine max
  Gm_smallRNAprecursor_1493
aatactaaaagttcttcaaccaagacactttggttcggacttgaacaaaggaaagagattttcagttccatttgatccggtaggttatacctattgggattacgttgatgcttggactaaggtgttttggcaccaaaatacccgcttcaagcattcatggctgatatatttcaagaccaatacaaccaattggtttttgcaatggtgggacttctttggaccaatcccagagatattcccagaaacggtccaacaaggatttgcccaatttaagaaataatacaattcgcaggaatcacgaattctagcagatcttaaatacttttcaagctttgcactgtcatggatattctcatgacaatatcgttacagcaagactgaaaagacaaaccaatatccatcactacaaagacacgcatttgtaaaatggtggacacaatttgactcatccaaagcggatccagaacaagtaaaactctggttccaatcccatccagaattcctcaaagcagctgatccagaaacttctgtgtttttgaaccaaaagtctcatttggcagcatttttagcaggatcgacatcaaaggaggtcttagctaaaaatctgaaggaagttctgcaaatgttacaacaggaagaagaagcttcatcctcaaagaaggaagaaacaagttctgctgaagaagaagaagaagatcccttttaccaaaacgaagatgattgttttggtatctgtttagattaaatttaatttcggtcacaaagtcgtttgtctgtaattaatgtgtaattaatgctggacaatactacctgtcctgtagccattaaagtcccgatcaaaactacttgtcttgtaacaaacagtcaaatagtcccggtcaaaactaccggcaactaccggtcttagatttttggctatataaggagtcctcaagtatgttgtgaggcaccctttcatttggccaattttcaggtttctgaagagaggtgctctgaaacaagatttttgtaagcgctactttcaaaattcaataaatttctatttttcatccttctctcttctcccttcaccgatcctgtgcggctctgccgccgcttcggtttctttgtttatgaaaacttggggtttgtaagccggtctccggtgtgcccttgatatctgtttttcaagtttatattttcatttcatttatcatactgtattcttacttccta

SEQ ID NO: 8661 - DNA, 1216 bp, Glycine max
  Gm_smallRNAprecursor_1494
aatactaaaagttcttcaaccaagacactttggttcggacttgaacaaaggaaagagattttcagttccatttgatccggtaggttatacctattgggattacgttgatgcttggactaaggtgttttggcaccaaaatacccgcttcaagcattcatggctgatatatttcaagaccaatacaaccaattggtttttgcaatggtgggacttctttggaccaatcccagagatattcccagaaacggtccaacaaggatttgcccaatttaagaaataatacaattcgcaggaatcacgaattctagcagatcttaaatacttttcaagctttgcactgtcatggatattctcatgacaatatcgttacagcaagactgaaaagacaaaccaatatccatcactacaaagacacgcatttgtaaaatggtggacacaatttgactcatccaaagcggatccagaacaagtaaaactctggttccaatcccatccagaattcctcaaagcagctgatccagaaacttctgtgtttttgaaccaaaagtctcatttggcagcatttttagcaggatcgacatcaaaggaggtcttagctaaaaatctgaaggaagttctgcaaatgttacaacaggaagaagaagcttcatcctcaaagaaggaagaaacaagttctgctgaagaagaagaagaagatcccttttaccaaaacgaagatgattgttttggtatctgtttagattaaatttaatttcggtcacaaagtcgtttgtctgtaattaatgtgtaattaatgctggacaatactacctgtcctgtagccattaaagtcccgatcaaaactacttgtcttgtaacaaacagtcaaatagtcccggtcaaaactaccggcaactaccggtcttagatttttggctatataaggagtcctcaagtatgttgtgaggcaccctttcatttggccaattttcaggtttctgaagagaggtgctctgaaacaagatttttgtaagcgctactttcaaaattcaataaatttctatttttcatccttctctcttctcccttcaccgatcctgtgcggctctgccgccgcttcggtttctttgtttatgaaaacttggggtttgtaagccggtctccggtgtgcccttgatatctgtttttcaagtttatattttcatttcatttatcatactgtattcttacttcctat

SEQ ID NO: 8662 - DNA, 1080 bp, Glycine max
  Gm_smallRNAprecursor_1495
aaaatacccgcttcaagcattcatggctgatatatttcaagaccaatacaaccaattggtttttgcaatggtgggacttctttggaccaatcccagagatattcccagaaacggtccaacaaggatttgcccaatttaagaaataatacaattcgcaggaatcacgaattctagcagatcttaaatacttttcaagctttgcactgtcatggatattctcatgacaatatcgttacagcaagactgaaaagacaaaccaatatccatcactacaaagacacgcatttgtaaaatggtggacacaatttgactcatccaaagcggatccagaacaagtaaaactctggttccaatcccatccagaattcctcaaagcagctgatccagaaacttctgtgtttttgaaccaaaagtctcatttggcagcatttttagcaggatcgacatcaaaggaggtcttagctaaaaatctgaaggaagttctgcaaatgttacaacaggaagaagaagcttcatcctcaaagaaggaagaaacaagttctgctgaagaagaagaagaagatcccttttaccaaaacgaagatgattgttttggtatctgtttagattaaatttaatttcggtcacaaagtcgtttgtctgtaattaatgtgtaattaatgctggacaatactacctgtcctgtagccattaaagtcccgatcaaaactacttgtcttgtaacaaacagtcaaatagtcccggtcaaaactaccggcaactaccggtcttagatttttggctatataaggagtcctcaagtatgttgtgaggcaccctttcatttggccaattttcaggtttctgaagagaggtgctctgaaacaagatttttgtaagcgctactttcaaaattcaataaatttctatttttcatccttctctcttctcccttcaccgatcctgtgcggctctgccgccgcttcggtttctttgtttatgaaaacttggggtttgtaagccggtctccggtgtgcccttgatatctgtttttcaagtttatattttcatttcatttatcatactgtattcttacttcct

SEQ ID NO: 8663 - DNA, 1081 bp, Glycine max
  Gm_smallRNAprecursor_1496
aaaatacccgcttcaagcattcatggctgatatatttcaagaccaatacaaccaattggtttttgcaatggtgggacttctttggaccaatcccagagatattcccagaaacggtccaacaaggatttgcccaatttaagaaataatacaattcgcaggaatcacgaattctagcagatcttaaatacttttcaagctttgcactgtcatggatattctcatgacaatatcgttacagcaagactgaaaagacaaaccaatatccatcactacaaagacacgcatttgtaaaatggtggacacaatttgactcatccaaagcggatccagaacaagtaaaactctggttccaatcccatccagaattcctcaaagcagctgatccagaaacttctgtgtttttgaaccaaaagtctcatttggcagcatttttagcaggatcgacatcaaaggaggtcttagctaaaaatctgaaggaagttctgcaaatgttacaacaggaagaagaagcttcatcctcaaagaaggaagaaacaagttctgctgaagaagaagaagaagatcccttttaccaaaacgaagatgattgttttggtatctgtttagattaaatttaatttcggtcacaaagtcgtttgtctgtaattaatgtgtaattaatgctggacaatactacctgtcctgtagccattaaagtcccgatcaaaactacttgtcttgtaacaaacagtcaaatagtcccggtcaaaactaccggcaactaccggtcttagatttttggctatataaggagtcctcaagtatgttgtgaggcaccctttcatttggccaattttcaggtttctgaagagaggtgctctgaaacaagatttttgtaagcgctactttcaaaattcaataaatttctatttttcatccttctctcttctcccttcaccgatcctgtgcggctctgccgccgcttcggtttctttgtttatgaaaacttggggtttgtaagccggtctccggtgtgcccttgatatctgtttttcaagtttatattttcatttcatttatcatactgtattcttacttccta

SEQ ID NO: 8664 - DNA, 1082 bp, Glycine max
  Gm_smallRNAprecursor_1497
aaaatacccgcttcaagcattcatggctgatatatttcaagaccaatacaaccaattggtttttgcaatggtgggacttctttggaccaatcccagagatattcccagaaacggtccaacaaggatttgcccaatttaagaaataatacaattcgcaggaatcacgaattctagcagatcttaaatacttttcaagctttgcactgtcatggatattctcatgacaatatcgttacagcaagactgaaaagacaaaccaatatccatcactacaaagacacgcatttgtaaaatggtggacacaatttgactcatccaaagcggatccagaacaagtaaaactctggttccaatcccatccagaattcctcaaagcagctgatccagaaacttctgtgtttttgaaccaaaagtctcatttggcagcatttttagcaggatcgacatcaaaggaggtcttagctaaaaatctgaaggaagttctgcaaatgttacaacaggaagaagaagcttcatcctcaaagaaggaagaaacaagttctgctgaagaagaagaagaagatcccttttaccaaaacgaagatgattgttttggtatctgtttagattaaatttaatttcggtcacaaagtcgtttgtctgtaattaatgtgtaattaatgctggacaatactacctgtcctgtagccattaaagtcccgatcaaaactacttgtcttgtaacaaacagtcaaatagtcccggtcaaaactaccggcaactaccggtcttagatttttggctatataaggagtcctcaagtatgttgtgaggcaccctttcatttggccaattttcaggtttctgaagagaggtgctctgaaacaagatttttgtaagcgctactttcaaaattcaataaatttctatttttcatccttctctcttctcccttcaccgatcctgtgcggctctgccgccgcttcggtttctttgtttatgaaaacttggggtttgtaagccggtctccggtgtgcccttgatatctgtttttcaagtttatattttcatttcatttatcatactgtattcttacttcctat

SEQ ID NO: 8665 - DNA, 1057 bp, Glycine max
  Gm_smallRNAprecursor_1498
catggctgatatatttcaagaccaatacaaccaattggtttttgcaatggtgggacttctttggaccaatcccagagatattcccagaaacggtccaacaaggatttgcccaatttaagaaataatacaattcgcaggaatcacgaattctagcagatcttaaatacttttcaagctttgcactgtcatggatattctcatgacaatatcgttacagcaagactgaaaagacaaaccaatatccatcactacaaagacacgcatttgtaaaatggtggacacaatttgactcatccaaagcggatccagaacaagtaaaactctggttccaatcccatccagaattcctcaaagcagctgatccagaaacttctgtgtttttgaaccaaaagtctcatttggcagcatttttagcaggatcgacatcaaaggaggtcttagctaaaaatctgaaggaagttctgcaaatgttacaacaggaagaagaagcttcatcctcaaagaaggaagaaacaagttctgctgaagaagaagaagaagatcccttttaccaaaacgaagatgattgttttggtatctgtttagattaaatttaatttcggtcacaaagtcgtttgtctgtaattaatgtgtaattaatgctggacaatactacctgtcctgtagccattaaagtcccgatcaaaactacttgtcttgtaacaaacagtcaaatagtcccggtcaaaactaccggcaactaccggtcttagatttttggctatataaggagtcctcaagtatgttgtgaggcaccctttcatttggccaattttcaggtttctgaagagaggtgctctgaaacaagatttttgtaagcgctactttcaaaattcaataaatttctatttttcatccttctctcttctcccttcaccgatcctgtgcggctctgccgccgcttcggtttctttgtttatgaaaacttggggtttgtaagccggtctccggtgtgcccttgatatctgtttttcaagtttatattttcatttcatttatcatactgtattcttacttc

SEQ ID NO: 8666 - DNA, 1064 bp, Glycine max
  Gm_smallRNAprecursor_1499
catggctgatatatttcaagaccaatacaaccaattggtttttgcaatggtgggacttctttggaccaatcccagagatattcccagaaacggtccaacaaggatttgcccaatttaagaaataatacaattcgcaggaatcacgaattctagcagatcttaaatacttttcaagctttgcactgtcatggatattctcatgacaatatcgttacagcaagactgaaaagacaaaccaatatccatcactacaaagacacgcatttgtaaaatggtggacacaatttgactcatccaaagcggatccagaacaagtaaaactctggttccaatcccatccagaattcctcaaagcagctgatccagaaacttctgtgtttttgaaccaaaagtctcatttggcagcatttttagcaggatcgacatcaaaggaggtcttagctaaaaatctgaaggaagttctgcaaatgttacaacaggaagaagaagcttcatcctcaaagaaggaagaaacaagttctgctgaagaagaagaagaagatcccttttaccaaaacgaagatgattgttttggtatctgtttagattaaatttaatttcggtcacaaagtcgtttgtctgtaattaatgtgtaattaatgctggacaatactacctgtcctgtagccattaaagtcccgatcaaaactacttgtcttgtaacaaacagtcaaatagtcccggtcaaaactaccggcaactaccggtcttagatttttggctatataaggagtcctcaagtatgttgtgaggcaccctttcatttggccaattttcaggtttctgaagagaggtgctctgaaacaagatttttgtaagcgctactttcaaaattcaataaatttctatttttcatccttctctcttctcccttcaccgatcctgtgcggctctgccgccgcttcggtttctttgtttatgaaaacttggggtttgtaagccggtctccggtgtgcccttgatatctgtttttcaagtttatattttcatttcatttatcatactgtattcttacttcctatcta

SEQ ID NO: 8667 - DNA, 1059 bp, Glycine max
  Gm_smallRNAprecursor_1500
atggctgatatatttcaagaccaatacaaccaattggtttttgcaatggtgggacttctttggaccaatcccagagatattcccagaaacggtccaacaaggatttgcccaatttaagaaataatacaattcgcaggaatcacgaattctagcagatcttaaatacttttcaagctttgcactgtcatggatattctcatgacaatatcgttacagcaagactgaaaagacaaaccaatatccatcactacaaagacacgcatttgtaaaatggtggacacaatttgactcatccaaagcggatccagaacaagtaaaactctggttccaatcccatccagaattcctcaaagcagctgatccagaaacttctgtgtttttgaaccaaaagtctcatttggcagcatttttagcaggatcgacatcaaaggaggtcttagctaaaaatctgaaggaagttctgcaaatgttacaacaggaagaagaagcttcatcctcaaagaaggaagaaacaagttctgctgaagaagaagaagaagatcccttttaccaaaacgaagatgattgttttggtatctgtttagattaaatttaatttcggtcacaaagtcgtttgtctgtaattaatgtgtaattaatgctggacaatactacctgtcctgtagccattaaagtcccgatcaaaactacttgtcttgtaacaaacagtcaaatagtcccggtcaaaactaccggcaactaccggtcttagatttttggctatataaggagtcctcaagtatgttgtgaggcaccctttcatttggccaattttcaggtttctgaagagaggtgctctgaaacaagatttttgtaagcgctactttcaaaattcaataaatttctatttttcatccttctctcttctcccttcaccgatcctgtgcggctctgccgccgcttcggtttctttgtttatgaaaacttggggtttgtaagccggtctccggtgtgcccttgatatctgtttttcaagtttatattttcatttcatttatcatactgtattcttacttccta

SEQ ID NO: 8668 - DNA, 1060 bp, Glycine max
  Gm_smallRNAprecursor_1501
atggctgatatatttcaagaccaatacaaccaattggtttttgcaatggtgggacttctttggaccaatcccagagatattcccagaaacggtccaacaaggatttgcccaatttaagaaataatacaattcgcaggaatcacgaattctagcagatcttaaatacttttcaagctttgcactgtcatggatattctcatgacaatatcgttacagcaagactgaaaagacaaaccaatatccatcactacaaagacacgcatttgtaaaatggtggacacaatttgactcatccaaagcggatccagaacaagtaaaactctggttccaatcccatccagaattcctcaaagcagctgatccagaaacttctgtgtttttgaaccaaaagtctcatttggcagcatttttagcaggatcgacatcaaaggaggtcttagctaaaaatctgaaggaagttctgcaaatgttacaacaggaagaagaagcttcatcctcaaagaaggaagaaacaagttctgctgaagaagaagaagaagatcccttttaccaaaacgaagatgattgttttggtatctgtttagattaaatttaatttcggtcacaaagtcgtttgtctgtaattaatgtgtaattaatgctggacaatactacctgtcctgtagccattaaagtcccgatcaaaactacttgtcttgtaacaaacagtcaaatagtcccggtcaaaactaccggcaactaccggtcttagatttttggctatataaggagtcctcaagtatgttgtgaggcaccctttcatttggccaattttcaggtttctgaagagaggtgctctgaaacaagatttttgtaagcgctactttcaaaattcaataaatttctatttttcatccttctctcttctcccttcaccgatcctgtgcggctctgccgccgcttcggtttctttgtttatgaaaacttggggtttgtaagccggtctccggtgtgcccttgatatctgtttttcaagtttatattttcatttcatttatcatactgtattcttacttcctat

SEQ ID NO: 8669 - DNA, 1060 bp, Glycine max; identical to SEQ ID NO: 8668
  Gm_smallRNAprecursor_1502

SEQ ID NO: 8670 - DNA, 1063 bp, Glycine max
  Gm_smallRNAprecursor_1503
atggctgatatatttcaagaccaatacaaccaattggtttttgcaatggtgggacttctttggaccaatcccagagatattcccagaaacggtccaacaaggatttgcccaatttaagaaataatacaattcgcaggaatcacgaattctagcagatcttaaatacttttcaagctttgcactgtcatggatattctcatgacaatatcgttacagcaagactgaaaagacaaaccaatatccatcactacaaagacacgcatttgtaaaatggtggacacaatttgactcatccaaagcggatccagaacaagtaaaactctggttccaatcccatccagaattcctcaaagcagctgatccagaaacttctgtgtttttgaaccaaaagtctcatttggcagcatttttagcaggatcgacatcaaaggaggtcttagctaaaaatctgaaggaagttctgcaaatgttacaacaggaagaagaagcttcatcctcaaagaaggaagaaacaagttctgctgaagaagaagaagaagatcccttttaccaaaacgaagatgattgttttggtatctgtttagattaaatttaatttcggtcacaaagtcgtttgtctgtaattaatgtgtaattaatgctggacaatactacctgtcctgtagccattaaagtcccgatcaaaactacttgtcttgtaacaaacagtcaaatagtcccggtcaaaactaccggcaactaccggtcttagatttttggctatataaggagtcctcaagtatgttgtgaggcaccctttcatttggccaattttcaggtttctgaagagaggtgctctgaaacaagatttttgtaagcgctactttcaaaattcaataaatttctatttttcatccttctctcttctcccttcaccgatcctgtgcggctctgccgccgcttcggtttctttgtttatgaaaacttggggtttgtaagccggtctccggtgtgcccttgatatctgtttttcaagtttatattttcatttcatttatcatactgtattcttacttcctatcta

SEQ ID NO: 8671 - DNA, 1056 bp, Glycine max
  Gm_smallRNAprecursor_1504
gctgatatatttcaagaccaatacaaccaattggtttttgcaatggtgggacttctttggaccaatcccagagatattcccagaaacggtccaacaaggatttgcccaatttaagaaataatacaattcgcaggaatcacgaattctagcagatcttaaatacttttcaagctttgcactgtcatggatattctcatgacaatatcgttacagcaagactgaaaagacaaaccaatatccatcactacaaagacacgcatttgtaaaatggtggacacaatttgactcatccaaagcggatccagaacaagtaaaactctggttccaatcccatccagaattcctcaaagcagctgatccagaaacttctgtgtttttgaaccaaaagtctcatttggcagcatttttagcaggatcgacatcaaaggaggtcttagctaaaaatctgaaggaagttctgcaaatgttacaacaggaagaagaagcttcatcctcaaagaaggaagaaacaagttctgctgaagaagaagaagaagatcccttttaccaaaacgaagatgattgttttggtatctgtttagattaaatttaatttcggtcacaaagtcgtttgtctgtaattaatgtgtaattaatgctggacaatactacctgtcctgtagccattaaagtcccgatcaaaactacttgtcttgtaacaaacagtcaaatagtcccggtcaaaactaccggcaactaccggtcttagatttttggctatataaggagtcctcaagtatgttgtgaggcaccctttcatttggccaattttcaggtttctgaagagaggtgctctgaaacaagatttttgtaagcgctactttcaaaattcaataaatttctatttttcatccttctctcttctcccttcaccgatcctgtgcggctctgccgccgcttcggtttctttgtttatgaaaacttggggtttgtaagccggtctccggtgtgcccttgatatctgtttttcaagtttatattttcatttcatttatcatactgtattcttacttccta

SEQ ID NO: 8672 - DNA, 1056 bp, Glycine max; identical to SEQ ID NO: 8671
  Gm_smallRNAprecursor_1505

SEQ ID NO: 8673 - DNA, 1057 bp, Glycine max
  Gm_smallRNAprecursor_1506
gctgatatatttcaagaccaatacaaccaattggtttttgcaatggtgggacttctttggaccaatcccagagatattcccagaaacggtccaacaaggatttgcccaatttaagaaataatacaattcgcaggaatcacgaattctagcagatcttaaatacttttcaagctttgcactgtcatggatattctcatgacaatatcgttacagcaagactgaaaagacaaaccaatatccatcactacaaagacacgcatttgtaaaatggtggacacaatttgactcatccaaagcggatccagaacaagtaaaactctggttccaatcccatccagaattcctcaaagcagctgatccagaaacttctgtgtttttgaaccaaaagtctcatttggcagcatttttagcaggatcgacatcaaaggaggtcttagctaaaaatctgaaggaagttctgcaaatgttacaacaggaagaagaagcttcatcctcaaagaaggaagaaacaagttctgctgaagaagaagaagaagatcccttttaccaaaacgaagatgattgttttggtatctgtttagattaaatttaatttcggtcacaaagtcgtttgtctgtaattaatgtgtaattaatgctggacaatactacctgtcctgtagccattaaagtcccgatcaaaactacttgtcttgtaacaaacagtcaaatagtcccggtcaaaactaccggcaactaccggtcttagatttttggctatataaggagtcctcaagtatgttgtgaggcaccctttcatttggccaattttcaggtttctgaagagaggtgctctgaaacaagatttttgtaagcgctactttcaaaattcaataaatttctatttttcatccttctctcttctcccttcaccgatcctgtgcggctctgccgccgcttcggtttctttgtttatgaaaacttggggtttgtaagccggtctccggtgtgcccttgatatctgtttttcaagtttatattttcatttcatttatcatactgtattcttacttcctat

SEQ ID NO: 8674 - DNA, 1057 bp, Glycine max; identical to SEQ ID NO: 8673
  Gm_smallRNAprecursor_1507

SEQ ID NO: 8675 - DNA, 1057 bp, Glycine max; identical to SEQ ID NO: 8673
  Gm_smallRNAprecursor_1508

SEQ ID NO: 8676 - DNA, 1057 bp, Glycine max; identical to SEQ ID NO: 8673
  Gm_smallRNAprecursor_1509

SEQ ID NO: 8677 - DNA, 1155 bp, Glycine max
  Gm_smallRNAprecursor_1510
tgggacttctttggaccaatcccagagatattcccagaaacggtccaacaaggatttgcccaatttaagaaataatacaattcgcaggaatcacgaattctagcagatcttaaatacttttcaagctttgcactgtcatggatattctcatgacaatatcgttacagcaagactgaaaagacaaaccaatatccatcactacaaagacacgcatttgtaaaatggtggacacaatttgactcatccaaagcggatccagaacaagtaaaactctggttccaatcccatccagaattcctcaaagcagctgatccagaaacttctgtgtttttgaaccaaaagtctcatttggcagcatttttagcaggatcgacatcaaaggaggtcttagctaaaaatctgaaggaagttctgcaaatgttacaacaggaagaagaagcttcatcctcaaagaaggaagaaacaagttctgctgaagaagaagaagaagatcccttttaccaaaacgaagatgattgttttggtatctgtttagattaaatttaatttcggtcacaaagtcgtttgtctgtaattaatgtgtaattaatgctggacaatactacctgtcctgtagccattaaagtcccgatcaaaactacttgtcttgtaacaaacagtcaaatagtcccggtcaaaactaccggcaactaccggtcttagatttttggctatataaggagtcctcaagtatgttgtgaggcaccctttcatttggccaattttcaggtttctgaagagaggtgctctgaaacaagatttttgtaagcgctactttcaaaattcaataaatttctatttttcatccttctctcttctcccttcaccgatcctgtgcggctctgccgccgcttcggtttctttgtttatgaaaacttggggtttgtaagccggtctccggtgtgcccttgatatctgtttttcaagtttatattttcatttcatttatcatactgtattcttacttcctatctatccgtctgtatcctttccgctgacttatatatatatatatcaagttatttttcatcttaatgattgatttttttgaatcaatgattaagattaactatttattataataattatattttaagaaaataaataatgaaaata

SEQ ID NO: 8678 - DNA, 1122 bp, Glycine max
  Gm_smallRNAprecursor_1511
ctttggaccaatcccagagatattcccagaaacggtccaacaaggatttgcccaatttaagaaataatacaattcgcaggaatcacgaattctagcagatcttaaatacttttcaagctttgcactgtcatggatattctcatgacaatatcgttacagcaagactgaaaagacaaaccaatatccatcactacaaagacacgcatttgtaaaatggtggacacaatttgactcatccaaagcggatccagaacaagtaaaactctggttccaatcccatccagaattcctcaaagcagctgatccagaaacttctgtgtttttgaaccaaaagtctcatttggcagcatttttagcaggatcgacatcaaaggaggtcttagctaaaaatctgaaggaagttctgcaaatgttacaacaggaagaagaagcttcatcctcaaagaaggaagaaacaagttctgctgaagaagaagaagaagatcccttttaccaaaacgaagatgattgttttggtatctgtttagattaaatttaatttcggtcacaaagtcgtttgtctgtaattaatgtgtaattaatgctggacaatactacctgtcctgtagccattaaagtcccgatcaaaactacttgtcttgtaacaaacagtcaaatagtcccggtcaaaactaccggcaactaccggtcttagatttttggctatataaggagtcctcaagtatgttgtgaggcaccctttcatttggccaattttcaggtttctgaagagaggtgctctgaaacaagatttttgtaagcgctactttcaaaattcaataaatttctatttttcatccttctctcttctcccttcaccgatcctgtgcggctctgccgccgcttcggtttctttgtttatgaaaacttggggtttgtaagccggtctccggtgtgcccttgatatctgtttttcaagtttatattttcatttcatttatcatactgtattcttacttcctatctatccgtctgtatcctttccgctgacttatatatatatatatcaagttatttttcatcttaatgattgatttttttgaatcaatgattaagattaactatttattataataattatat

SEQ ID NO: 8679 - DNA, 1121 bp, Glycine max
  Gm_smallRNAprecursor_1512
tttggaccaatcccagagatattcccagaaacggtccaacaaggatttgcccaatttaagaaataatacaattcgcaggaatcacgaattctagcagatcttaaatacttttcaagctttgcactgtcatggatattctcatgacaatatcgttacagcaagactgaaaagacaaaccaatatccatcactacaaagacacgcatttgtaaaatggtggacacaatttgactcatccaaagcggatccagaacaagtaaaactctggttccaatcccatccagaattcctcaaagcagctgatccagaaacttctgtgtttttgaaccaaaagtctcatttggcagcatttttagcaggatcgacatcaaaggaggtcttagctaaaaatctgaaggaagttctgcaaatgttacaacaggaagaagaagcttcatcctcaaagaaggaagaaacaagttctgctgaagaagaagaagaagatcccttttaccaaaacgaagatgattgttttggtatctgtttagattaaatttaatttcggtcacaaagtcgtttgtctgtaattaatgtgtaattaatgctggacaatactacctgtcctgtagccattaaagtcccgatcaaaactacttgtcttgtaacaaacagtcaaatagtcccggtcaaaactaccggcaactaccggtcttagatttttggctatataaggagtcctcaagtatgttgtgaggcaccctttcatttggccaattttcaggtttctgaagagaggtgctctgaaacaagatttttgtaagcgctactttcaaaattcaataaatttctatttttcatccttctctcttctcccttcaccgatcctgtgcggctctgccgccgcttcggtttctttgtttatgaaaacttggggtttgtaagccggtctccggtgtgcccttgatatctgtttttcaagtttatattttcatttcatttatcatactgtattcttacttcctatctatccgtctgtatcctttccgctgacttatatatatatatatcaagttatttttcatcttaatgattgatttttttgaatcaatgattaagattaactatttattataataattatat

SEQ ID NO: 8680 - DNA, 1121 bp, Glycine max; identical to SEQ ID NO: 8679
  Gm_smallRNAprecursor_1513

SEQ ID NO: 8681 - DNA, 1120 bp, Glycine max
  Gm_smallRNAprecursor_1514
ttggaccaatcccagagatattcccagaaacggtccaacaaggatttgcccaatttaagaaataatacaattcgcaggaatcacgaattctagcagatcttaaatacttttcaagctttgcactgtcatggatattctcatgacaatatcgttacagcaagactgaaaagacaaaccaatatccatcactacaaagacacgcatttgtaaaatggtggacacaatttgactcatccaaagcggatccagaacaagtaaaactctggttccaatcccatccagaattcctcaaagcagctgatccagaaacttctgtgtttttgaaccaaaagtctcatttggcagcatttttagcaggatcgacatcaaaggaggtcttagctaaaaatctgaaggaagttctgcaaatgttacaacaggaagaagaagcttcatcctcaaagaaggaagaaacaagttctgctgaagaagaagaagaagatcccttttaccaaaacgaagatgattgttttggtatctgtttagattaaatttaatttcggtcacaaagtcgtttgtctgtaattaatgtgtaattaatgctggacaatactacctgtcctgtagccattaaagtcccgatcaaaactacttgtcttgtaacaaacagtcaaatagtcccggtcaaaactaccggcaactaccggtcttagatttttggctatataaggagtcctcaagtatgttgtgaggcaccctttcatttggccaattttcaggtttctgaagagaggtgctctgaaacaagatttttgtaagcgctactttcaaaattcaataaatttctatttttcatccttctctcttctcccttcaccgatcctgtgcggctctgccgccgcttcggtttctttgtttatgaaaacttggggtttgtaagccggtctccggtgtgcccttgatatctgtttttcaagtttatattttcatttcatttatcatactgtattcttacttcctatctatccgtctgtatcctttccgctgacttatatatatatatatcaagttatttttcatcttaatgattgatttttttgaatcaatgattaagattaactatttattataataattatat

SEQ ID NO: 8682 - DNA, 1120 bp, Glycine max; identical to SEQ ID NO: 8681
  Gm_smallRNAprecursor_1515

SEQ ID NO: 8683 - DNA, 1142 bp, Glycine max
  Gm_smallRNAprecursor_1516
gaccaatcccagagatattcccagaaacggtccaacaaggatttgcccaatttaagaaataatacaattcgcaggaatcacgaattctagcagatcttaaatacttttcaagctttgcactgtcatggatattctcatgacaatatcgttacagcaagactgaaaagacaaaccaatatccatcactacaaagacacgcatttgtaaaatggtggacacaatttgactcatccaaagcggatccagaacaagtaaaactctggttccaatcccatccagaattcctcaaagcagctgatccagaaacttctgtgtttttgaaccaaaagtctcatttggcagcatttttagcaggatcgacatcaaaggaggtcttagctaaaaatctgaaggaagttctgcaaatgttacaacaggaagaagaagcttcatcctcaaagaaggaagaaacaagttctgctgaagaagaagaagaagatcccttttaccaaaacgaagatgattgttttggtatctgtttagattaaatttaatttcggtcacaaagtcgtttgtctgtaattaatgtgtaattaatgctggacaatactacctgtcctgtagccattaaagtcccgatcaaaactacttgtcttgtaacaaacagtcaaatagtcccggtcaaaactaccggcaactaccggtcttagatttttggctatataaggagtcctcaagtatgttgtgaggcaccctttcatttggccaattttcaggtttctgaagagaggtgctctgaaacaagatttttgtaagcgctactttcaaaattcaataaatttctatttttcatccttctctcttctcccttcaccgatcctgtgcggctctgccgccgcttcggtttctttgtttatgaaaacttggggtttgtaagccggtctccggtgtgcccttgatatctgtttttcaagtttatattttcatttcatttatcatactgtattcttacttcctatctatccgtctgtatcctttccgctgacttatatatatatatatcaagttatttttcatcttaatgattgatttttttgaatcaatgattaagattaactatttattataataattatattttaagaaaataaataatgaaaata

SEQ ID NO: 8684 - DNA, 1088 bp, Glycine max
  Gm_smallRNAprecursor_1517
aaaactctggttccaatcccatccagaattcctcaaagcagctgatccagaaacttctgtgtttttgaaccaaaagtctcatttggcagcatttttagcaggatcgacatcaaaggaggtcttagctaaaaatctgaaggaagttctgcaaatgttacaacaggaagaagaagcttcatcctcaaagaaggaagaaacaagttctgctgaagaagaagaagaagatcccttttaccaaaacgaagatgattgttttggtatctgtttagattaaatttaatttcggtcacaaagtcgtttgtctgtaattaatgtgtaattaatgctggacaatactacctgtcctgtagccattaaagtcccgatcaaaactacttgtcttgtaacaaacagtcaaatagtcccggtcaaaactaccggcaactaccggtcttagatttttggctatataaggagtcctcaagtatgttgtgaggcaccctttcatttggccaattttcaggtttctgaagagaggtgctctgaaacaagatttttgtaagcgctactttcaaaattcaataaatttctatttttcatccttctctcttctcccttcaccgatcctgtgcggctctgccgccgcttcggtttctttgtttatgaaaacttggggtttgtaagccggtctccggtgtgcccttgatatctgtttttcaagtttatattttcatttcatttatcatactgtattcttacttcctatctatccgtctgtatcctttccgctgacttatatatatatatatcaagttatttttcatcttaatgattgatttttttgaatcaatgattaagattaactatttattataataattatattttaagaaaataaataatgaaaataaaaaaaatattttaaaaaagattaactattcaataaccgtcttatcatgtgtctgtttttgaaggcagttttaagcacaaaaaccgccttagtataattgcctttctaagacggttattggtataaccatcttagaaacttttacatactaagacggtttggcataagaccatcttaaatttccatttagaaaaatgag

SEQ ID NO: 8685 - DNA, 1057 bp, Glycine max
  Gm_smallRNAprecursor_1518
agcaggggaatatgtcttttgctattgcctaaccaatttcagcacctctcaagaacttcagctacaagctttaaaaaaaataaggaaattaagttagtattatatatgacaagttagtattatatatatatatatatatatatatatatatatatatatatatatatatatatatatatatatatataccagagatcagcgaaaaggatacaaacggacagataggaagtaagagtaatgcaatatgacaaataaaaatgtaaaacagttatcaagggcacaccggaatccggcttacaaacccaggtttttgaaaacaaagaaaccgaagcgacggcagagccgcacaggatcggtgaagggagaagggagatgtgaaaaatagaactttgaatttattgaaatcgaaagaaaagcttacaaagagattttccctaggcagagcttctctctctaaaacctggttttgagactatctgaaagggtgcctcacaaagggaacgaggactcctttaaatagacccaatgttttactgtttcaacagtatcggtaatgtttaccggaactgttacaaaaactttttcaaattacattattatcgggaaccgaataattagttacaataattcatgattactacaactaaccatcgtctaacgatataccaaaacagtcatcctcattttggtagaatggatcatcttcttggtcatcattattctcggatgattcggcttccttcttgaggggttcttcttcttcttcctgttgaagtagctggagaacttccttaagattctgagcaagactttctttagattttgagcttgctaagaatgctgcaagttgagacttttgatttagaaacaatgatgtctctggatcagcaggcttgagaagctcagggttgctctgaaaccagttcttgacttgttctggagcagcctttgaggtatcaaattgtgaccaccactttacaaaggcatgtctctgcaatggtggatattgtttgctgttttcggtttttccatatctgtattgccatgaaaaaatcca

SEQ ID NO: 8686 - DNA, 1158 bp, Glycine max
  Gm_smallRNAprecursor_1519
agttatcaagggcacaccggaatccggcttacaaacccaggtttttgaaaacaaagaaaccgaagcgacggcagagccgcacaggatcggtgaagggagaagggagatgtgaaaaatagaactttgaatttattgaaatcgaaagaaaagcttacaaagagattttccctaggcagagcttctctctctaaaacctggttttgagactatctgaaagggtgcctcacaaagggaacgaggactcctttaaatagacccaatgttttactgtttcaacagtatcggtaatgtttaccggaactgttacaaaaactttttcaaattacattattatcgggaaccgaataattagttacaataattcatgattactacaactaaccatcgtctaacgatataccaaaacagtcatcctcattttggtagaatggatcatcttcttggtcatcattattctcggatgattcggcttccttcttgaggggttcttcttcttcttcctgttgaagtagctggagaacttccttaagattctgagcaagactttctttagattttgagcttgctaagaatgctgcaagttgagacttttgatttagaaacaatgatgtctctggatcagcaggcttgagaagctcagggttgctctgaaaccagttcttgacttgttctggagcagcctttgaggtatcaaattgtgaccaccactttacaaaggcatgtctctgcaatggtggatattgtttgctgttttcggtttttccatatctgtattgccatgaaaaaatccatgacaaggaaaaactggaaaagtactttaaatctgccggaattcttgattccttgctattgaagagcttggtgaattgttggaatccctgttggacttcttctggaaatatctgcggaattggtccgaagtagttccaccattggaggaaccaatttggaaaattatacacagtgttattcttgaagtaaattagccatgaatgcttaaatttactattttgatgccagaacatattggtccaggcgtcaatgtagtcccaataattatatcctgcaggatcaaaaggtgcagaaatttttttgggttggtttaagtttgagccataatgtcgtggctgcataacctttaggatttggattgtggaa

SEQ ID NO: 8687 - DNA, 1110 bp, Glycine max
  Gm_smallRNAprecursor_1520
gttttactgtttcaacagtatcggtaatgtttaccggaactgttacaaaaactttttcaaattacattattatcgggaaccgaataattagttacaataattcatgattactacaactaaccatcgtctaacgatataccaaaacagtcatcctcattttggtagaatggatcatcttcttggtcatcattattctcggatgattcggcttccttcttgaggggttcttcttcttcttcctgttgaagtagctggagaacttccttaagattctgagcaagactttctttagattttgagcttgctaagaatgctgcaagttgagacttttgatttagaaacaatgatgtctctggatcagcaggcttgagaagctcagggttgctctgaaaccagttcttgacttgttctggagcagcctttgaggtatcaaattgtgaccaccactttacaaaggcatgtctctgcaatggtggatattgtttgctgttttcggtttttccatatctgtattgccatgaaaaaatccatgacaaggaaaaactggaaaagtactttaaatctgccggaattcttgattccttgctattgaagagcttggtgaattgttggaatccctgttggacttcttctggaaatatctgcggaattggtccgaagtagttccaccattggaggaaccaatttggaaaattatacacagtgttattcttgaagtaaattagccatgaatgcttaaatttactattttgatgccagaacatattggtccaggcgtcaatgtagtcccaataattatatcctgcaggatcaaaaggtgcagaaatttttttgggttggtttaagtttgagccataatgtcgtggctgcataacctttaggatttggattgtggaatgggtatttagatttggatctttggggtctttgaagtgtttaatagatactgagtttgtatctattaggatgaattcgtagaattttctggttttatttgtggtcgttggcctataatggaatcatggggggaatactttggcggttgccttgaaaggattcttgtcccagtattctggttccatttgtaaaacattgaaaaatttgtttttt

SEQ ID NO: 8688 - DNA, 1070 bp, Glycine max
  Gm_smallRNAprecursor_1521
actacaactaaccatcgtctaacgatataccaaaacagtcatcctcattttggtagaatggatcatcttcttggtcatcattattctcggatgattcggcttccttcttgaggggttcttcttcttcttcctgttgaagtagctggagaacttccttaagattctgagcaagactttctttagattttgagcttgctaagaatgctgcaagttgagacttttgatttagaaacaatgatgtctctggatcagcaggcttgagaagctcagggttgctctgaaaccagttcttgacttgttctggagcagcctttgaggtatcaaattgtgaccaccactttacaaaggcatgtctctgcaatggtggatattgtttgctgttttcggtttttccatatctgtattgccatgaaaaaatccatgacaaggaaaaactggaaaagtactttaaatctgccggaattcttgattccttgctattgaagagcttggtgaattgttggaatccctgttggacttcttctggaaatatctgcggaattggtccgaagtagttccaccattggaggaaccaatttggaaaattatacacagtgttattcttgaagtaaattagccatgaatgcttaaatttactattttgatgccagaacatattggtccaggcgtcaatgtagtcccaataattatatcctgcaggatcaaaaggtgcagaaatttttttgggttggtttaagtttgagccataatgtcgtggctgcataacctttaggatttggattgtggaatgggtatttagatttggatctttggggtctttgaagtgtttaatagatactgagtttgtatctattaggatgaattcgtagaattttctggttttatttgtggtcgttggcctataatggaatcatggggggaatactttggcggttgccttgaaaggattcttgtcccagtattctggttccatttgtaaaacattgaaaaatttgttttttgagatatagctattgctgggttgtggtgttgattcttgttgagtcaacggttggcttggtttttggtta

SEQ ID NO: 8689 - DNA, 1109 bp, Glycine max
  Gm_smallRNAprecursor_1522
ccggaattcttgattccttgctattgaagagcttggtgaattgttggaatccctgttggacttcttctggaaatatctgcggaattggtccgaagtagttccaccattggaggaaccaatttggaaaattatacacagtgttattcttgaagtaaattagccatgaatgcttaaatttactattttgatgccagaacatattggtccaggcgtcaatgtagtcccaataattatatcctgcaggatcaaaaggtgcagaaatttttttgggttggtttaagtttgagccataatgtcgtggctgcataacctttaggatttggattgtggaatgggtatttagatttggatctttggggtctttgaagtgtttaatagatactgagtttgtatctattaggatgaattcgtagaattttctggttttatttgtggtcgttggcctataatggaatcatggggggaatactttggcggttgccttgaaaggattcttgtcccagtattctggttccatttgtaaaacattgaaaaatttgttttttgagatatagctattgctgggttgtggtgttgattcttgttgagtcaacggttggcttggtttttggttacagacagttttggtctgtttggccttttggatttgtttttgtaggtctgtttcagaatcatcgtctgattctaaggccatttctgcccaggtctttttggccaattttggtactctggtgaggcctatgtcttctaaggccaggagagtttgtattgaccaggcatagtcagccacagtctgttttgttgttgttggttttggggattcctgagttgatgactcaggttttatctgggtcaatgacccttcaagctttcctttatgggttgatgacccagtctgagtaggtgacccagaagatgatgtagttgtcttcttggttattggctctaccagagccaatataacatcttttcctttagtaccggatcttcctcctctgccggaggagctagacactttaggaggcatcgggaattttccgtaaaaattcacgggtgaggtagtcaggtagagagtttgaagagcccttgatatattctatgttaaaatc

SEQ ID NO: 8690 - DNA, 1121 bp, Glycine max
  Gm_smallRNAprecursor_1523
ttgttgttgttggttttggggattcctgagttgatgactcaggttttatctgggtcaatgacccttcaagctttcctttatgggttgatgacccagtctgagtaggtgacccagaagatgatgtagttgtcttcttggttattggctctaccagagccaatataacatcttttcctttagtaccggatcttcctcctctgccggaggagctagacactttaggaggcatcgggaattttccgtaaaaattcacgggtgaggtagtcaggtagagagtttgaagagcccttgatatattctatgttaaaatcaaagacgcttaaaattgcctgccatcttgcaaaaatttgttttgaggcaaggttttttacatccttttgtaaaatgtctttggctaatttgcagtcaacccttactaaaattttttgattcaataaatcagattgaaatttggaaatgcacaaaacaattgctaaaacttcctttttaacagttgaatattttaattgtgcaggattccaatgttttgaagtatatgcaataacatgttcttgaccgtgtattttttgtttaaggataccaccgtaaccgatgtctgatgcatcaatttcgacaattttgaatgcctgtggaatgggaagatacagacattttatggattggactttgactttgatttctttgactgtttgagtatggaggtcagaccaaggaggcggattctttttcagcctatcatgtaatggtttgacaatattgtttagataggggacaaattctcctacataatttaggcaccccagaaatcgttgtaactgggtcttgtctaagatttggttagggaatttgctggcaaactttattgatctttctattggaatgattgtgccttggtatatattgtgcccaaggaatcgtatccgtgtctggaaaagatttatctttgatttggagactgccaaaccattctgtttaatgatatggatgaaagtctggaggtgtttaaaatgttgatcaatatcttgggagaagattaaaacatcatcaatgtaaacaatgacgaattttgaataaggattgaaaatatcattcatgattttttgaaattctgaaggggcatt

SEQ ID NO: 8691 - DNA, 1121 bp, Glycine max; identical to SEQ ID NO: 8690
  Gm_smallRNAprecursor_1524

SEQ ID NO: 8692 - DNA, 1038 bp, Glycine max
  Gm_smallRNAprecursor_1525
cccagaagatgatgtagttgtcttcttggttattggctctaccagagccaatataacatcttttcctttagtaccggatcttcctcctctgccggaggagctagacactttaggaggcatcgggaattttccgtaaaaattcacgggtgaggtagtcaggtagagagtttgaagagcccttgatatattctatgttaaaatcaaagacgcttaaaattgcctgccatcttgcaaaaatttgttttgaggcaaggttttttacatccttttgtaaaatgtctttggctaatttgcagtcaacccttactaaaattttttgattcaataaatcagattgaaatttggaaatgcacaaaacaattgctaaaacttcctttttaacagttgaatattttaattgtgcaggattccaatgttttgaagtatatgcaataacatgttcttgaccgtgtattttttgtttaaggataccaccgtaaccgatgtctgatgcatcaatttcgacaattttgaatgcctgtggaatgggaagatacagacattttatggattggactttgactttgatttctttgactgtttgagtatggaggtcagaccaaggaggcggattctttttcagcctatcatgtaatggtttgacaatattgtttagataggggacaaattctcctacataatttaggcaccccagaaatcgttgtaactgggtcttgtctaagatttggttagggaatttgctggcaaactttattgatctttctattggaatgattgtgccttggtatatattgtgcccaaggaatcgtatccgtgtctggaaaagatttatctttgatttggagactgccaaaccattctgtttaatgatatggatgaaagtctggaggtgtttaaaatgttgatcaatatcttgggagaagattaaaacatcatcaatgtaaacaatgacgaattttgaataaggattgaaaatatcattcatgattttttgaaattctgaaggggcattcttcagtctgaatggcattacattcc

SEQ ID NO: 8693 - DNA, 1161 bp, Glycine max
  Gm_smallRNAprecursor_1526
gtgtctggaaaagatttatctttgatttggagactgccaaaccattctgtttaatgatatggatgaaagtctggaggtgtttaaaatgttgatcaatatcttgggagaagattaaaacatcatcaatgtaaacaatgacgaattttgaataaggattgaaaatatcattcatgattttttgaaattctgaaggggcattcttcagtctgaatggcattacattccactcatattgcccgaaaggtatagtaaacgttgttttgtacctatctgattcttggatttggatttgccagaatccggatttcatgtcaaattttgaaaatacctttgcaaaatttaatctgttaagtaggtcttttttgtttggaataggatacctgatccattgtaatgcttgatttaacggtttgtaatttatgactaagcggggtgttcctcgctcaatctcagattgtttgttgacgtaaaaagccgcacaagaccatggacttttacttttccgaattaaacctttatcaagtaaatctttaatttctttttggcaatattgaaggagttcttcattcatttggattggtctagcttttgtgggaatttgtttttccctaaaatatttctcataaggaagatcaacaatatgtttctttctgtcccaaaatgcatgtggcaattcagaacaaactgttgattctatatgacttaataaagattggattttctcctttatttggggttttcctagttgtatttggatattattgaacgatacttcttcttttaagaagttaatttgattaatcttattctctataaaatttatattattgattaatcttataatataatttttcttcctaaataacttgtagttattccttcattagatatttggatgggaaataaagctgttatgaagggagttcctaggattacttcattcttaaggttttttaccataagaaagtttgttttaatcctaagaccttggttttcaataattgcatttgataacttaaagttaatttttaattttgagtcgtttgctgtactaagtttctctgaggttttctcaaagaattttgtaggaattaatccatctaaaatacagtttgagtcagcccctatgtcgaatagggccattgtttctagaacaaaatc

SEQ ID NO: 8694 - DNA, 1051 bp, Glycine max
  Gm_smallRNAprecursor_1527
attgtagtttgtgtattgttggttcttcaagcaatgatgcgcacaagatgcttaacaaccatgttagcttcagtgcatctcctttacatgcatttttgggagagacttcccctaataactcgtcgcataactcattccaacgtaagaaattaggttcagccacaacacgatcatcgattctaatgcctaaatgcagtgcaacatctttgagtgcaacaatctttgctattagaggtcgacaagctcaggcaatgatcaactccgactcacaatattctgaagtcgtctatgaggcaatgaataacagtcaacaagaatcaaatacacacattgtaaatgaattcaacagacacaatcacacatttattataacaaagacccaaccatcacgtcaaacacacaggctacctggaaggtttagattaatgttacaatctcaaaagtgtgattgtggtgaatatcagactaaatacttaccgtgttctcacgttatggctacctgtaaatctgtcaatgttgatcctatgaactatgtgtcgtcgttattcactttacaacacattttgcacatctacgataactcctttgctttactatcacacgaatcaatgtggcaagaatatgaaggagatcagtggggtcctgatccaaggagaaacaggactgcaaatggttgtcccgtttcaactcgcattcttattgagatggacgaatacgaaaatgaatgataagatagtaaaaaatgtggaatttgctggcaacatgaccataacagaaacaattgtcctaacatgtcttcatcttaagtttttccttagccaaatgtaattgtttaagtatttgattgataatgtagtataatgtttttctataaataaattgttaaataaaaagaattatcatttttaaataaaaagaattaatttttatactaaaataaatatattattagacaaaattcaaattttttttaaaaaatattcacctaaaaatgtcctatgtaaattaaataatataagaaaaataattatatttaataatattattttct

SEQ ID NO: 8695 - DNA, 1052 bp, Glycine max
  Gm_smallRNAprecursor_1528
attgtagtttgtgtattgttggttcttcaagcaatgatgcgcacaagatgcttaacaaccatgttagcttcagtgcatctcctttacatgcatttttgggagagacttcccctaataactcgtcgcataactcattccaacgtaagaaattaggttcagccacaacacgatcatcgattctaatgcctaaatgcagtgcaacatctttgagtgcaacaatctttgctattagaggtcgacaagctcaggcaatgatcaactccgactcacaatattctgaagtcgtctatgaggcaatgaataacagtcaacaagaatcaaatacacacattgtaaatgaattcaacagacacaatcacacatttattataacaaagacccaaccatcacgtcaaacacacaggctacctggaaggtttagattaatgttacaatctcaaaagtgtgattgtggtgaatatcagactaaatacttaccgtgttctcacgttatggctacctgtaaatctgtcaatgttgatcctatgaactatgtgtcgtcgttattcactttacaacacattttgcacatctacgataactcctttgctttactatcacacgaatcaatgtggcaagaatatgaaggagatcagtggggtcctgatccaaggagaaacaggactgcaaatggttgtcccgtttcaactcgcattcttattgagatggacgaatacgaaaatgaatgataagatagtaaaaaatgtggaatttgctggcaacatgaccataacagaaacaattgtcctaacatgtcttcatcttaagtttttccttagccaaatgtaattgtttaagtatttgattgataatgtagtataatgtttttctataaataaattgttaaataaaaagaattatcatttttaaataaaaagaattaatttttatactaaaataaatatattattagacaaaattcaaattttttttaaaaaatattcacctaaaaatgtcctatgtaaattaaataatataagaaaaataattatatttaataatattattttctt

SEQ ID NO: 8696 - DNA, 1056 bp, Glycine max
  Gm_smallRNAprecursor_1529
ttctaaacatcagtccaatcctcagatttatctgactagttcatcatctgcttcccattatgtgattaatatgtcacggaacatacagcaagtgacaccttttgaggggcctgaccaaatcactattgataatggccaagacctcaacattaactccccaggtgtttccaccttttcctctccccttaatcctcagttttctcttactcttactaatttattatttgttccttctattactaagaatctcattagtgtcagtcagttttgcaaagataataatgtgttttttgagtttcactcatcattttgtcttgttaaatcacaggagtctaaactgttctactaaaaggatttgtggggagtgatgatctctatcagttccctccacttcttgactctatatgcccaagtgcaagcttccttcaaatgtttgcaattctgttaaagcttctgtacaaagtcctgttgtaaatacaatcactagtgacctataaagcaccgacacggacaccggacacgtagacacctgtaatgtccaaaatatagaacgtagtatgggtgtcgtgtcggtgtcagacactgacacggacgcgtgtcggataccggacacggcaagggactggagtgtccgtacttcatagctagtgactgattttcaatctgtttcatcaaataaagctgctgtagataagaatgttgtacatacagctactagtagtgttacttcttttgcaacatggcactctatgctcggtcaccctagtgttgctgctatgaaaattgtatttcaactttgtaatattccaaatattaataaagaaccaacagatttttgtaatcactattgtattggaaagtcacatagacttccttcttttctttctcatactgtctatgcaaaaccttttaatcttatctttactgatctttggggacctgccccatccccatctccttttagtttttggtattatgttacttttgttgatgctaataccagattcacttggttgtacttaagaataaatctgacactttagaaatctttaaaat

SEQ ID NO: 8697 - DNA, 1055 bp, Glycine max
  Gm_smallRNAprecursor_1530
tctaaacatcagtccaatcctcagatttatctgactagttcatcatctgcttcccattatgtgattaatatgtcacggaacatacagcaagtgacaccttttgaggggcctgaccaaatcactattgataatggccaagacctcaacattaactccccaggtgtttccaccttttcctctccccttaatcctcagttttctcttactcttactaatttattatttgttccttctattactaagaatctcattagtgtcagtcagttttgcaaagataataatgtgttttttgagtttcactcatcattttgtcttgttaaatcacaggagtctaaactgttctactaaaaggatttgtggggagtgatgatctctatcagttccctccacttcttgactctatatgcccaagtgcaagcttccttcaaatgtttgcaattctgttaaagcttctgtacaaagtcctgttgtaaatacaatcactagtgacctataaagcaccgacacggacaccggacacgtagacacctgtaatgtccaaaatatagaacgtagtatgggtgtcgtgtcggtgtcagacactgacacggacgcgtgtcggataccggacacggcaagggactggagtgtccgtacttcatagctagtgactgattttcaatctgtttcatcaaataaagctgctgtagataagaatgttgtacatacagctactagtagtgttacttcttttgcaacatggcactctatgctcggtcaccctagtgttgctgctatgaaaattgtatttcaactttgtaatattccaaatattaataaagaaccaacagatttttgtaatcactattgtattggaaagtcacatagacttccttcttttctttctcatactgtctatgcaaaaccttttaatcttatctttactgatctttggggacctgccccatccccatctccttttagtttttggtattatgttacttttgttgatgctaataccagattcacttggttgtacttaagaataaatctgacactttagaaatctttaaaat

SEQ ID NO: 8698 - DNA, 1096 bp, Glycine max
  Gm_smallRNAprecursor_1531
tctaaacatcagtccaatcctcagatttatctgactagttcatcatctgcttcccattatgtgattaatatgtcacggaacatacagcaagtgacaccttttgaggggcctgaccaaatcactattgataatggccaagacctcaacattaactccccaggtgtttccaccttttcctctccccttaatcctcagttttctcttactcttactaatttattatttgttccttctattactaagaatctcattagtgtcagtcagttttgcaaagataataatgtgttttttgagtttcactcatcattttgtcttgttaaatcacaggagtctaaactgttctactaaaaggatttgtggggagtgatgatctctatcagttccctccacttcttgactctatatgcccaagtgcaagcttccttcaaatgtttgcaattctgttaaagcttctgtacaaagtcctgttgtaaatacaatcactagtgacctataaagcaccgacacggacaccggacacgtagacacctgtaatgtccaaaatatagaacgtagtatgggtgtcgtgtcggtgtcagacactgacacggacgcgtgtcggataccggacacggcaagggactggagtgtccgtacttcatagctagtgactgattttcaatctgtttcatcaaataaagctgctgtagataagaatgttgtacatacagctactagtagtgttacttcttttgcaacatggcactctatgctcggtcaccctagtgttgctgctatgaaaattgtatttcaactttgtaatattccaaatattaataaagaaccaacagatttttgtaatcactattgtattggaaagtcacatagacttccttcttttctttctcatactgtctatgcaaaaccttttaatcttatctttactgatctttggggacctgccccatccccatctccttttagtttttggtattatgttacttttgttgatgctaataccagattcacttggttgtacttaagaataaatctgacactttagaaatctttaaaatgtttaaaactatggtttcaaatcagtttaatatgtctatca

SEQ ID NO: 8699 - DNA, 1064 bp, Glycine max
  Gm_smallRNAprecursor_1532
ttggttcaccggcattaccaggtcactcgcataggaaatctaacaaaattcctactttttaagcctactacactctgcattatgcatcatacacttatttttactactttatttgtataaaattacaaatagtagggactgaggggcctcttcccaatctcagtcttttgttttgtggggtggtgctgctgctgtctgctcaagtaaattggtttgttttagttttgtttatatatgagttttaatttatctttgaccatagcagttagtttaaatgcccttttgcacaagttaatttgggaacaaaaaacatctgaaatgggtggctaaaaagtgccattagtgtagtgtgagtcagtgctctctctctctctctctctctctctctctctctctctctctttgtctatatataagaagctataagcgggttagggttttcagagtgagagaggggacaaaccgcaaaacgttgagatgggttagtagaggtgttgaggggaatgttggctggctcgaggcttttcaaagaggaggttctcactggcaagaactataaggcttcggaccaggcttcattcccctcaaaaattgtgtttttgtgttacgggggcttcatttcttcttggatttgtgttcatcaagtgccaaaggttgtgttgtgttgggttttcatgttggaggctacatatgcattattatgtgtgtatatgtttggttacaagtgtgtaagctagccctgcaaatgttaggttgagaggaatgttgtctggctcgaggtcatgaagatatacatatgaaagtgttaacttttcagttaatttctaggataaattaatggaaattaatttataccctaaatgattctcggaccaggcttcattccccccagccaacatttgctactcaatatatatacagctacttaatttgcgtttaatttatgaagattctcatcttcataggattaattggtaaggctttctgtttaaattattttaattagtacatgttcttctgctaactatatatatgctgctttctagtttttcatcttgctatca

SEQ ID NO: 8700 - DNA, 1064 bp, Glycine max; identical to SEQ ID NO: 8699
  Gm_smallRNAprecursor_1533

SEQ ID NO: 8701 - DNA, 1065 bp, Glycine max
  Gm_smallRNAprecursor_1534
ttggttcaccggcattaccaggtcactcgcataggaaatctaacaaaattcctactttttaagcctactacactctgcattatgcatcatacacttatttttactactttatttgtataaaattacaaatagtagggactgaggggcctcttcccaatctcagtcttttgttttgtggggtggtgctgctgctgtctgctcaagtaaattggtttgttttagttttgtttatatatgagttttaatttatctttgaccatagcagttagtttaaatgcccttttgcacaagttaatttgggaacaaaaaacatctgaaatgggtggctaaaaagtgccattagtgtagtgtgagtcagtgctctctctctctctctctctctctctctctctctctctctctttgtctatatataagaagctataagcgggttagggttttcagagtgagagaggggacaaaccgcaaaacgttgagatgggttagtagaggtgttgaggggaatgttggctggctcgaggcttttcaaagaggaggttctcactggcaagaactataaggcttcggaccaggcttcattcccctcaaaaattgtgtttttgtgttacgggggcttcatttcttcttggatttgtgttcatcaagtgccaaaggttgtgttgtgttgggttttcatgttggaggctacatatgcattattatgtgtgtatatgtttggttacaagtgtgtaagctagccctgcaaatgttaggttgagaggaatgttgtctggctcgaggtcatgaagatatacatatgaaagtgttaacttttcagttaatttctaggataaattaatggaaattaatttataccctaaatgattctcggaccaggcttcattccccccagccaacatttgctactcaatatatatacagctacttaatttgcgtttaatttatgaagattctcatcttcataggattaattggtaaggctttctgtttaaattattttaattagtacatgttcttctgctaactatatatatgctgctttctagtttttcatcttgctatcag

SEQ ID NO: 8702 - DNA, 1065 bp, Glycine max; identical to SEQ ID NO: 8701
  Gm_smallRNAprecursor_1535

SEQ ID NO: 8703 - DNA, 1197 bp, Glycine max
  Gm_smallRNAprecursor_1536
cctactacactctgcattatgcatcatacacttatttttactactttatttgtataaaattacaaatagtagggactgaggggcctcttcccaatctcagtcttttgttttgtggggtggtgctgctgctgtctgctcaagtaaattggtttgttttagttttgtttatatatgagttttaatttatctttgaccatagcagttagtttaaatgcccttttgcacaagttaatttgggaacaaaaaacatctgaaatgggtggctaaaaagtgccattagtgtagtgtgagtcagtgctctctctctctctctctctctctctctctctctctctctctttgtctatatataagaagctataagcgggttagggttttcagagtgagagaggggacaaaccgcaaaacgttgagatgggttagtagaggtgttgaggggaatgttggctggctcgaggcttttcaaagaggaggttctcactggcaagaactataaggcttcggaccaggcttcattcccctcaaaaattgtgtttttgtgttacgggggcttcatttcttcttggatttgtgttcatcaagtgccaaaggttgtgttgtgttgggttttcatgttggaggctacatatgcattattatgtgtgtatatgtttggttacaagtgtgtaagctagccctgcaaatgttaggttgagaggaatgttgtctggctcgaggtcatgaagatatacatatgaaagtgttaacttttcagttaatttctaggataaattaatggaaattaatttataccctaaatgattctcggaccaggcttcattccccccagccaacatttgctactcaatatatatacagctacttaatttgcgtttaatttatgaagattctcatcttcataggattaattggtaaggctttctgtttaaattattttaattagtacatgttcttctgctaactatatatatgctgctttctagtttttcatcttgctatcagataccactgaagaagaaggctttttaatttttaactcttacaagattggagaatttccagaagtaaggttacttatataaactgtttgttataatttcctatgaagatatatatactatggtttaccccttttactgtctagccttgtttccattacacctgtaagtgaccttatgaaggctgcttcttcaaagt

SEQ ID NO: 8704 - DNA, 1197 bp, Glycine max; identical to SEQ ID NO: 8703
  Gm_smallRNAprecursor_1537

SEQ ID NO: 8705 - DNA, 1196 bp, Glycine max
  Gm_smallRNAprecursor_1538
ctactacactctgcattatgcatcatacacttatttttactactttatttgtataaaattacaaatagtagggactgaggggcctcttcccaatctcagtcttttgttttgtggggtggtgctgctgctgtctgctcaagtaaattggtttgttttagttttgtttatatatgagttttaatttatctttgaccatagcagttagtttaaatgcccttttgcacaagttaatttgggaacaaaaaacatctgaaatgggtggctaaaaagtgccattagtgtagtgtgagtcagtgctctctctctctctctctctctctctctctctctctctctctttgtctatatataagaagctataagcgggttagggttttcagagtgagagaggggacaaaccgcaaaacgttgagatgggttagtagaggtgttgaggggaatgttggctggctcgaggcttttcaaagaggaggttctcactggcaagaactataaggcttcggaccaggcttcattcccctcaaaaattgtgtttttgtgttacgggggcttcatttcttcttggatttgtgttcatcaagtgccaaaggttgtgttgtgttgggttttcatgttggaggctacatatgcattattatgtgtgtatatgtttggttacaagtgtgtaagctagccctgcaaatgttaggttgagaggaatgttgtctggctcgaggtcatgaagatatacatatgaaagtgttaacttttcagttaatttctaggataaattaatggaaattaatttataccctaaatgattctcggaccaggcttcattccccccagccaacatttgctactcaatatatatacagctacttaatttgcgtttaatttatgaagattctcatcttcataggattaattggtaaggctttctgtttaaattattttaattagtacatgttcttctgctaactatatatatgctgctttctagtttttcatcttgctatcagataccactgaagaagaaggctttttaatttttaactcttacaagattggagaatttccagaagtaaggttacttatataaactgtttgttataatttcctatgaagatatatatactatggtttaccccttttactgtctagccttgtttccattacacctgtaagtgaccttatgaaggctgcttcttcaaagt

SEQ ID NO: 8706 - DNA, 1196 bp, Glycine max; identical to SEQ ID NO: 8705
  Gm_smallRNAprecursor_1539

SEQ ID NO: 8707 - DNA, 1108 bp, Glycine max
  Gm_smallRNAprecursor_1540
tagcagttagtttaaatgcccttttgcacaagttaatttgggaacaaaaaacatctgaaatgggtggctaaaaagtgccattagtgtagtgtgagtcagtgctctctctctctctctctctctctctctctctctctctctctttgtctatatataagaagctataagcgggttagggttttcagagtgagagaggggacaaaccgcaaaacgttgagatgggttagtagaggtgttgaggggaatgttggctggctcgaggcttttcaaagaggaggttctcactggcaagaactataaggcttcggaccaggcttcattcccctcaaaaattgtgtttttgtgttacgggggcttcatttcttcttggatttgtgttcatcaagtgccaaaggttgtgttgtgttgggttttcatgttggaggctacatatgcattattatgtgtgtatatgtttggttacaagtgtgtaagctagccctgcaaatgttaggttgagaggaatgttgtctggctcgaggtcatgaagatatacatatgaaagtgttaacttttcagttaatttctaggataaattaatggaaattaatttataccctaaatgattctcggaccaggcttcattccccccagccaacatttgctactcaatatatatacagctacttaatttgcgtttaatttatgaagattctcatcttcataggattaattggtaaggctttctgtttaaattattttaattagtacatgttcttctgctaactatatatatgctgctttctagtttttcatcttgctatcagataccactgaagaagaaggctttttaatttttaactcttacaagattggagaatttccagaagtaaggttacttatataaactgtttgttataatttcctatgaagatatatatactatggtttaccccttttactgtctagccttgtttccattacacctgtaagtgaccttatgaaggctgcttcttcaaagtttcctgcttgaaaggacgactaaactaaaagcgagtgagttcatatgcattttttttgtacatggttgaatcatttgatttttttcttcttttgaataagaaaaata

SEQ ID NO: 8708 - DNA, 1108 bp, Glycine max; identical to SEQ ID NO: 8707
  Gm_smallRNAprecursor_1541

SEQ ID NO: 8709 - DNA, 1108 bp, Glycine max; identical to SEQ ID NO: 8707
  Gm_smallRNAprecursor_1542

SEQ ID NO: 8710 - DNA, 1109 bp, Glycine max
  Gm_smallRNAprecursor_1543
tagcagttagtttaaatgcccttttgcacaagttaatttgggaacaaaaaacatctgaaatgggtggctaaaaagtgccattagtgtagtgtgagtcagtgctctctctctctctctctctctctctctctctctctctctctttgtctatatataagaagctataagcgggttagggttttcagagtgagagaggggacaaaccgcaaaacgttgagatgggttagtagaggtgttgaggggaatgttggctggctcgaggcttttcaaagaggaggttctcactggcaagaactataaggcttcggaccaggcttcattcccctcaaaaattgtgtttttgtgttacgggggcttcatttcttcttggatttgtgttcatcaagtgccaaaggttgtgttgtgttgggttttcatgttggaggctacatatgcattattatgtgtgtatatgtttggttacaagtgtgtaagctagccctgcaaatgttaggttgagaggaatgttgtctggctcgaggtcatgaagatatacatatgaaagtgttaacttttcagttaatttctaggataaattaatggaaattaatttataccctaaatgattctcggaccaggcttcattccccccagccaacatttgctactcaatatatatacagctacttaatttgcgtttaatttatgaagattctcatcttcataggattaattggtaaggctttctgtttaaattattttaattagtacatgttcttctgctaactatatatatgctgctttctagtttttcatcttgctatcagataccactgaagaagaaggctttttaatttttaactcttacaagattggagaatttccagaagtaaggttacttatataaactgtttgttataatttcctatgaagatatatatactatggtttaccccttttactgtctagccttgtttccattacacctgtaagtgaccttatgaaggctgcttcttcaaagtttcctgcttgaaaggacgactaaactaaaagcgagtgagttcatatgcattttttttgtacatggttgaatcatttgatttttttcttcttttgaataagaaaaatac

SEQ ID NO: 8711 - DNA, 1109 bp, Glycine max; identical to SEQ ID NO: 8710
  Gm_smallRNAprecursor_1544

SEQ ID NO: 8712 - DNA, 1109 bp, Glycine max; identical to SEQ ID NO: 8710
  Gm_smallRNAprecursor_1545

SEQ ID NO: 8713 - DNA, 1110 bp, Glycine max
  Gm_smallRNAprecursor_1546
tagcagttagtttaaatgcccttttgcacaagttaatttgggaacaaaaaacatctgaaatgggtggctaaaaagtgccattagtgtagtgtgagtcagtgctctctctctctctctctctctctctctctctctctctctctttgtctatatataagaagctataagcgggttagggttttcagagtgagagaggggacaaaccgcaaaacgttgagatgggttagtagaggtgttgaggggaatgttggctggctcgaggcttttcaaagaggaggttctcactggcaagaactataaggcttcggaccaggcttcattcccctcaaaaattgtgtttttgtgttacgggggcttcatttcttcttggatttgtgttcatcaagtgccaaaggttgtgttgtgttgggttttcatgttggaggctacatatgcattattatgtgtgtatatgtttggttacaagtgtgtaagctagccctgcaaatgttaggttgagaggaatgttgtctggctcgaggtcatgaagatatacatatgaaagtgttaacttttcagttaatttctaggataaattaatggaaattaatttataccctaaatgattctcggaccaggcttcattccccccagccaacatttgctactcaatatatatacagctacttaatttgcgtttaatttatgaagattctcatcttcataggattaattggtaaggctttctgtttaaattattttaattagtacatgttcttctgctaactatatatatgctgctttctagtttttcatcttgctatcagataccactgaagaagaaggctttttaatttttaactcttacaagattggagaatttccagaagtaaggttacttatataaactgtttgttataatttcctatgaagatatatatactatggtttaccccttttactgtctagccttgtttccattacacctgtaagtgaccttatgaaggctgcttcttcaaagtttcctgcttgaaaggacgactaaactaaaagcgagtgagttcatatgcattttttttgtacatggttgaatcatttgatttttttcttcttttgaataagaaaaataca

SEQ ID NO: 8714 - DNA, 1110 bp, Glycine max; identical to SEQ ID NO: 8713
  Gm_smallRNAprecursor_1547

SEQ ID NO: 8715 - DNA, 1110 bp, Glycine max; identical to SEQ ID NO: 8713
  Gm_smallRNAprecursor_1548

SEQ ID NO: 8716 - DNA, 1042 bp, Glycine max
  Gm_smallRNAprecursor_1549
acttcaattttaaatcccattgataaaaaactttttcttattagttttttaaaacaaaaaaccaacatatattagtaaacaaacacagcatatagttctcttatttaaaataaaataaaatctcttacattttactttaaatttcatttattttcatatttgctttgtttgactactcggatctcttgatcaataattattcaagatttaaattgtgactcatgtataaagaaaatctaattggaaggaaatgtatctacttgtgaatgcaaacaaatccccaaagattaaaaatttcaattcctttgcaattacatataaaaaagacttaattattattttggtattttaatttgataaaattgtatttttggtccctcagtttatctctaattttagatttggtcccccgataatttaattcacgaatttggtcctcctaatttgtaaaatcgtgcaatgttggtcccctagaccacaattggacgttgaccgttaacaagtgatgttgactgtcacgtgtcacattcttattggatgatgactgtcacgtgtcatgttctgattgggaaatgaaaacaacaatgcatgtcattgttcctggatttgagagccaatcagaacatgacacttgacaatcatcatccaataagaacgtgacacgtgacagtcaacatcacttgttaacggtcaacgactaattgtgatctaagagaccaacattacacgattttacaaaataagagaaccaaattcgtgaattaaattactggggaaccaaatctaaaattggacataaattaggggactaaatttgcaatttttccttttaatttattttttaatttaatttgatcctcttatgtttttaaaatatcaattaagtttcttaatttatttattaggttaaattttatcctttatttttaaagttttaattaagccttttatattttagaatgaaatcaatttggttccatttaaaaccaaaattgattctattttttgaaaatgctaggaactcatggaacaaaaatgagat

SEQ ID NO: 8717 - DNA, 1158 bp, Glycine max
  Gm_smallRNAprecursor_1550
tcaattttaaatcccattgataaaaaactttttcttattagttttttaaaacaaaaaaccaacatatattagtaaacaaacacagcatatagttctcttatttaaaataaaataaaatctcttacattttactttaaatttcatttattttcatatttgctttgtttgactactcggatctcttgatcaataattattcaagatttaaattgtgactcatgtataaagaaaatctaattggaaggaaatgtatctacttgtgaatgcaaacaaatccccaaagattaaaaatttcaattcctttgcaattacatataaaaaagacttaattattattttggtattttaatttgataaaattgtatttttggtccctcagtttatctctaattttagatttggtcccccgataatttaattcacgaatttggtcctcctaatttgtaaaatcgtgcaatgttggtcccctagaccacaattggacgttgaccgttaacaagtgatgttgactgtcacgtgtcacattcttattggatgatgactgtcacgtgtcatgttctgattgggaaatgaaaacaacaatgcatgtcattgttcctggatttgagagccaatcagaacatgacacttgacaatcatcatccaataagaacgtgacacgtgacagtcaacatcacttgttaacggtcaacgactaattgtgatctaagagaccaacattacacgattttacaaaataagagaaccaaattcgtgaattaaattactggggaaccaaatctaaaattggacataaattaggggactaaatttgcaatttttccttttaatttattttttaatttaatttgatcctcttatgtttttaaaatatcaattaagtttcttaatttatttattaggttaaattttatcctttatttttaaagttttaattaagccttttatattttagaatgaaatcaatttggttccatttaaaaccaaaattgattctattttttgaaaatgctaggaactcatggaacaaaaatgagattgaatccattataaaactagccagacaactttaaaaataatagccatctcaaaatcaatatcgttctgtaaatatactttatcttctaaaataactcccattattttaaagaaatcaaa

SEQ ID NO: 8718 - DNA, 1133 bp, Glycine max
  Gm_smallRNAprecursor_1551
tagttttttaaaacaaaaaaccaacatatattagtaaacaaacacagcatatagttctcttatttaaaataaaataaaatctcttacattttactttaaatttcatttattttcatatttgctttgtttgactactcggatctcttgatcaataattattcaagatttaaattgtgactcatgtataaagaaaatctaattggaaggaaatgtatctacttgtgaatgcaaacaaatccccaaagattaaaaatttcaattcctttgcaattacatataaaaaagacttaattattattttggtattttaatttgataaaattgtatttttggtccctcagtttatctctaattttagatttggtcccccgataatttaattcacgaatttggtcctcctaatttgtaaaatcgtgcaatgttggtcccctagaccacaattggacgttgaccgttaacaagtgatgttgactgtcacgtgtcacattcttattggatgatgactgtcacgtgtcatgttctgattgggaaatgaaaacaacaatgcatgtcattgttcctggatttgagagccaatcagaacatgacacttgacaatcatcatccaataagaacgtgacacgtgacagtcaacatcacttgttaacggtcaacgactaattgtgatctaagagaccaacattacacgattttacaaaataagagaaccaaattcgtgaattaaattactggggaaccaaatctaaaattggacataaattaggggactaaatttgcaatttttccttttaatttattttttaatttaatttgatcctcttatgtttttaaaatatcaattaagtttcttaatttatttattaggttaaattttatcctttatttttaaagttttaattaagccttttatattttagaatgaaatcaatttggttccatttaaaaccaaaattgattctattttttgaaaatgctaggaactcatggaacaaaaatgagattgaatccattataaaactagccagacaactttaaaaataatagccatctcaaaatcaatatcgttctgtaaatatactttatcttctaaaataactcccattattttaaagaaatcaaatccttgcctttaa

SEQ ID NO: 8719 - DNA, 1133 bp, Glycine max; identical to SEQ ID NO: 8718
  Gm_smallRNAprecursor_1552

SEQ ID NO: 8720 - DNA, 1033 bp, Glycine max
  Gm_smallRNAprecursor_1553
tttcatttattttcatatttgctttgtttgactactcggatctcttgatcaataattattcaagatttaaattgtgactcatgtataaagaaaatctaattggaaggaaatgtatctacttgtgaatgcaaacaaatccccaaagattaaaaatttcaattcctttgcaattacatataaaaaagacttaattattattttggtattttaatttgataaaattgtatttttggtccctcagtttatctctaattttagatttggtcccccgataatttaattcacgaatttggtcctcctaatttgtaaaatcgtgcaatgttggtcccctagaccacaattggacgttgaccgttaacaagtgatgttgactgtcacgtgtcacattcttattggatgatgactgtcacgtgtcatgttctgattgggaaatgaaaacaacaatgcatgtcattgttcctggatttgagagccaatcagaacatgacacttgacaatcatcatccaataagaacgtgacacgtgacagtcaacatcacttgttaacggtcaacgactaattgtgatctaagagaccaacattacacgattttacaaaataagagaaccaaattcgtgaattaaattactggggaaccaaatctaaaattggacataaattaggggactaaatttgcaatttttccttttaatttattttttaatttaatttgatcctcttatgtttttaaaatatcaattaagtttcttaatttatttattaggttaaattttatcctttatttttaaagttttaattaagccttttatattttagaatgaaatcaatttggttccatttaaaaccaaaattgattctattttttgaaaatgctaggaactcatggaacaaaaatgagattgaatccattataaaactagccagacaactttaaaaataatagccatctcaaaatcaatatcgttctgtaaatatactttatcttctaaaataactcccattattttaaagaaatcaaatccttgcctttaa

SEQ ID NO: 8721 - DNA, 1102 bp, Glycine max
  Gm_smallRNAprecursor_1554
tttttcatcttcttgaaggcctttctattccattatactatttctttggcaaatatggagaaatctagacatatgatttcaatttcactagttccctgttaatacaaaggcagaaatcaaccacaatgtaagacttcaataaacgtttttagagaaatttgcataatataaagaaaaaagcaattatgatgtgaacatatgatagtcaaaaaaagataaatcaagataagaaaccaaatcattcatgagtctcactcaaggtgttgtcttccaaaacttgaattatagcttccctggttctcttggtgattcttgagtgacaatttttgtaaccatgtcctaaagtcgtgcaatgtacctctaccatctctaacctttatgagagattttttcagccaatatgtcaatactatttcacgttgtcaccataatgagcaccaagtatatcttcaacatttatcaacgcacaaatgtcaagcaaagcactatcaatgcatatcctttgaagcaacaagcaatgtcaagaaaagcaatataagtccatattctttgaagcaacaagcaatgtcaagaaaagcactcttctcttcttcttccaatgcatcaaagcttagtttaagtatctctaggatttgaatagtaagaatttgtttatattgtttgatgacagattttggttcttcttgtattttttccaaacaagttggaacctattacttccaaagccaatggaagtaattgctcgagcttgtcaacatcatctagaatcaagagaaccttctttcgctggagtctatgttgtatcattgaaactccttgttgctcacttgctaacttaattttcttctttccaagtatatatgaaagaaggatgctttggaaatgttgtagctcatgtttgtttgatttttcttacattttgaagaaaacatgaactatcaaaacagttagcaattaaattacagacagagcaagtgttgttttccctattccacccataccatggatccctgtcatgtggtggacaccatcatcagatccaacgtccaaaagcttcattacttttgacacttgtgactctagtccaaccaaataatccgca

SEQ ID NO: 8722 - DNA, 1080 bp, Glycine max
  Gm_smallRNAprecursor_1555
tttcatcttcttgaaggcctttctattccattatactatttctttggcaaatatggagaaatctagacatatgatttcaatttcactagttccctgttaatacaaaggcagaaatcaaccacaatgtaagacttcaataaacgtttttagagaaatttgcataatataaagaaaaaagcaattatgatgtgaacatatgatagtcaaaaaaagataaatcaagataagaaaccaaatcattcatgagtctcactcaaggtgttgtcttccaaaacttgaattatagcttccctggttctcttggtgattcttgagtgacaatttttgtaaccatgtcctaaagtcgtgcaatgtacctctaccatctctaacctttatgagagattttttcagccaatatgtcaatactatttcacgttgtcaccataatgagcaccaagtatatcttcaacatttatcaacgcacaaatgtcaagcaaagcactatcaatgcatatcctttgaagcaacaagcaatgtcaagaaaagcaatataagtccatattctttgaagcaacaagcaatgtcaagaaaagcactcttctcttcttcttccaatgcatcaaagcttagtttaagtatctctaggatttgaatagtaagaatttgtttatattgtttgatgacagattttggttcttcttgtattttttccaaacaagttggaacctattacttccaaagccaatggaagtaattgctcgagcttgtcaacatcatctagaatcaagagaaccttctttcgctggagtctatgttgtatcattgaaactccttgttgctcacttgctaacttaattttcttctttccaagtatatatgaaagaaggatgctttggaaatgttgtagctcatgtttgtttgatttttcttacattttgaagaaaacatgaactatcaaaacagttagcaattaaattacagacagagcaagtgttgttttccctattccacccataccatggatccctgtcatgtggtggacaccatcatcagatccaacgtccaaaagcttcattacttttgacacttgtgactcta

SEQ ID NO: 8723 - DNA, 1202 bp, Glycine max
  Gm_smallRNAprecursor_1556
tttcatcttcttgaaggcctttctattccattatactatttctttggcaaatatggagaaatctagacatatgatttcaatttcactagttccctgttaatacaaaggcagaaatcaaccacaatgtaagacttcaataaacgtttttagagaaatttgcataatataaagaaaaaagcaattatgatgtgaacatatgatagtcaaaaaaagataaatcaagataagaaaccaaatcattcatgagtctcactcaaggtgttgtcttccaaaacttgaattatagcttccctggttctcttggtgattcttgagtgacaatttttgtaaccatgtcctaaagtcgtgcaatgtacctctaccatctctaacctttatgagagattttttcagccaatatgtcaatactatttcacgttgtcaccataatgagcaccaagtatatcttcaacatttatcaacgcacaaatgtcaagcaaagcactatcaatgcatatcctttgaagcaacaagcaatgtcaagaaaagcaatataagtccatattctttgaagcaacaagcaatgtcaagaaaagcactcttctcttcttcttccaatgcatcaaagcttagtttaagtatctctaggatttgaatagtaagaatttgtttatattgtttgatgacagattttggttcttcttgtattttttccaaacaagttggaacctattacttccaaagccaatggaagtaattgctcgagcttgtcaacatcatctagaatcaagagaaccttctttcgctggagtctatgttgtatcattgaaactccttgttgctcacttgctaacttaattttcttctttccaagtatatatgaaagaaggatgctttggaaatgttgtagctcatgtttgtttgatttttcttacattttgaagaaaacatgaactatcaaaacagttagcaattaaattacagacagagcaagtgttgttttccctattccacccataccatggatccctgtcatgtggtggacaccatcatcagatccaacgtccaaaagcttcattacttttgacacttgtgactctagtccaaccaaataatccgcaacatgtaaacaagtgggattaatcttgcagcagacctgctcaaccatcctcccaatgaactcatattcatgtgcatatctgtttaaaacaaaaaagttttaa

SEQ ID NO: 8724 - DNA, 1117 bp, Glycine max
  Gm_smallRNAprecursor_1557
ctttctattccattatactatttctttggcaaatatggagaaatctagacatatgatttcaatttcactagttccctgttaatacaaaggcagaaatcaaccacaatgtaagacttcaataaacgtttttagagaaatttgcataatataaagaaaaaagcaattatgatgtgaacatatgatagtcaaaaaaagataaatcaagataagaaaccaaatcattcatgagtctcactcaaggtgttgtcttccaaaacttgaattatagcttccctggttctcttggtgattcttgagtgacaatttttgtaaccatgtcctaaagtcgtgcaatgtacctctaccatctctaacctttatgagagattttttcagccaatatgtcaatactatttcacgttgtcaccataatgagcaccaagtatatcttcaacatttatcaacgcacaaatgtcaagcaaagcactatcaatgcatatcctttgaagcaacaagcaatgtcaagaaaagcaatataagtccatattctttgaagcaacaagcaatgtcaagaaaagcactcttctcttcttcttccaatgcatcaaagcttagtttaagtatctctaggatttgaatagtaagaatttgtttatattgtttgatgacagattttggttcttcttgtattttttccaaacaagttggaacctattacttccaaagccaatggaagtaattgctcgagcttgtcaacatcatctagaatcaagagaaccttctttcgctggagtctatgttgtatcattgaaactccttgttgctcacttgctaacttaattttcttctttccaagtatatatgaaagaaggatgctttggaaatgttgtagctcatgtttgtttgatttttcttacattttgaagaaaacatgaactatcaaaacagttagcaattaaattacagacagagcaagtgttgttttccctattccacccataccatggatccctgtcatgtggtggacaccatcatcagatccaacgtccaaaagcttcattacttttgacacttgtgactctagtccaaccaaataatccgcaacatgtaaacaagtgggattaatcttgcagcagac

SEQ ID NO: 8725 - DNA, 1131 bp, Glycine max
  Gm_smallRNAprecursor_1558
ctttctattccattatactatttctttggcaaatatggagaaatctagacatatgatttcaatttcactagttccctgttaatacaaaggcagaaatcaaccacaatgtaagacttcaataaacgtttttagagaaatttgcataatataaagaaaaaagcaattatgatgtgaacatatgatagtcaaaaaaagataaatcaagataagaaaccaaatcattcatgagtctcactcaaggtgttgtcttccaaaacttgaattatagcttccctggttctcttggtgattcttgagtgacaatttttgtaaccatgtcctaaagtcgtgcaatgtacctctaccatctctaacctttatgagagattttttcagccaatatgtcaatactatttcacgttgtcaccataatgagcaccaagtatatcttcaacatttatcaacgcacaaatgtcaagcaaagcactatcaatgcatatcctttgaagcaacaagcaatgtcaagaaaagcaatataagtccatattctttgaagcaacaagcaatgtcaagaaaagcactcttctcttcttcttccaatgcatcaaagcttagtttaagtatctctaggatttgaatagtaagaatttgtttatattgtttgatgacagattttggttcttcttgtattttttccaaacaagttggaacctattacttccaaagccaatggaagtaattgctcgagcttgtcaacatcatctagaatcaagagaaccttctttcgctggagtctatgttgtatcattgaaactccttgttgctcacttgctaacttaattttcttctttccaagtatatatgaaagaaggatgctttggaaatgttgtagctcatgtttgtttgatttttcttacattttgaagaaaacatgaactatcaaaacagttagcaattaaattacagacagagcaagtgttgttttccctattccacccataccatggatccctgtcatgtggtggacaccatcatcagatccaacgtccaaaagcttcattacttttgacacttgtgactctagtccaaccaaataatccgcaacatgtaaacaagtgggattaatcttgcagcagacctgctcaaccatcc

SEQ ID NO: 8726 - DNA, 1150 bp, Glycine max
  Gm_smallRNAprecursor_1559
tttctttggcaaatatggagaaatctagacatatgatttcaatttcactagttccctgttaatacaaaggcagaaatcaaccacaatgtaagacttcaataaacgtttttagagaaatttgcataatataaagaaaaaagcaattatgatgtgaacatatgatagtcaaaaaaagataaatcaagataagaaaccaaatcattcatgagtctcactcaaggtgttgtcttccaaaacttgaattatagcttccctggttctcttggtgattcttgagtgacaatttttgtaaccatgtcctaaagtcgtgcaatgtacctctaccatctctaacctttatgagagattttttcagccaatatgtcaatactatttcacgttgtcaccataatgagcaccaagtatatcttcaacatttatcaacgcacaaatgtcaagcaaagcactatcaatgcatatcctttgaagcaacaagcaatgtcaagaaaagcaatataagtccatattctttgaagcaacaagcaatgtcaagaaaagcactcttctcttcttcttccaatgcatcaaagcttagtttaagtatctctaggatttgaatagtaagaatttgtttatattgtttgatgacagattttggttcttcttgtattttttccaaacaagttggaacctattacttccaaagccaatggaagtaattgctcgagcttgtcaacatcatctagaatcaagagaaccttctttcgctggagtctatgttgtatcattgaaactccttgttgctcacttgctaacttaattttcttctttccaagtatatatgaaagaaggatgctttggaaatgttgtagctcatgtttgtttgatttttcttacattttgaagaaaacatgaactatcaaaacagttagcaattaaattacagacagagcaagtgttgttttccctattccacccataccatggatccctgtcatgtggtggacaccatcatcagatccaacgtccaaaagcttcattacttttgacacttgtgactctagtccaaccaaataatccgcaacatgtaaacaagtgggattaatcttgcagcagacctgctcaaccatcctcccaatgaactcatattcatgtgcatatctgtttaaaa

SEQ ID NO: 8727 - DNA, 1055 bp, Glycine max
  Gm_smallRNAprecursor_1560
ggcaaatatggagaaatctagacatatgatttcaatttcactagttccctgttaatacaaaggcagaaatcaaccacaatgtaagacttcaataaacgtttttagagaaatttgcataatataaagaaaaaagcaattatgatgtgaacatatgatagtcaaaaaaagataaatcaagataagaaaccaaatcattcatgagtctcactcaaggtgttgtcttccaaaacttgaattatagcttccctggttctcttggtgattcttgagtgacaatttttgtaaccatgtcctaaagtcgtgcaatgtacctctaccatctctaacctttatgagagattttttcagccaatatgtcaatactatttcacgttgtcaccataatgagcaccaagtatatcttcaacatttatcaacgcacaaatgtcaagcaaagcactatcaatgcatatcctttgaagcaacaagcaatgtcaagaaaagcaatataagtccatattctttgaagcaacaagcaatgtcaagaaaagcactcttctcttcttcttccaatgcatcaaagcttagtttaagtatctctaggatttgaatagtaagaatttgtttatattgtttgatgacagattttggttcttcttgtattttttccaaacaagttggaacctattacttccaaagccaatggaagtaattgctcgagcttgtcaacatcatctagaatcaagagaaccttctttcgctggagtctatgttgtatcattgaaactccttgttgctcacttgctaacttaattttcttctttccaagtatatatgaaagaaggatgctttggaaatgttgtagctcatgtttgtttgatttttcttacattttgaagaaaacatgaactatcaaaacagttagcaattaaattacagacagagcaagtgttgttttccctattccacccataccatggatccctgtcatgtggtggacaccatcatcagatccaacgtccaaaagcttcattacttttgacacttgtgactctagtccaaccaaataatccgca

SEQ ID NO: 8728 - DNA, 1033 bp, Glycine max
  Gm_smallRNAprecursor_1561
caaatatggagaaatctagacatatgatttcaatttcactagttccctgttaatacaaaggcagaaatcaaccacaatgtaagacttcaataaacgtttttagagaaatttgcataatataaagaaaaaagcaattatgatgtgaacatatgatagtcaaaaaaagataaatcaagataagaaaccaaatcattcatgagtctcactcaaggtgttgtcttccaaaacttgaattatagcttccctggttctcttggtgattcttgagtgacaatttttgtaaccatgtcctaaagtcgtgcaatgtacctctaccatctctaacctttatgagagattttttcagccaatatgtcaatactatttcacgttgtcaccataatgagcaccaagtatatcttcaacatttatcaacgcacaaatgtcaagcaaagcactatcaatgcatatcctttgaagcaacaagcaatgtcaagaaaagcaatataagtccatattctttgaagcaacaagcaatgtcaagaaaagcactcttctcttcttcttccaatgcatcaaagcttagtttaagtatctctaggatttgaatagtaagaatttgtttatattgtttgatgacagattttggttcttcttgtattttttccaaacaagttggaacctattacttccaaagccaatggaagtaattgctcgagcttgtcaacatcatctagaatcaagagaaccttctttcgctggagtctatgttgtatcattgaaactccttgttgctcacttgctaacttaattttcttctttccaagtatatatgaaagaaggatgctttggaaatgttgtagctcatgtttgtttgatttttcttacattttgaagaaaacatgaactatcaaaacagttagcaattaaattacagacagagcaagtgttgttttccctattccacccataccatggatccctgtcatgtggtggacaccatcatcagatccaacgtccaaaagcttcattacttttgacacttgtgactcta

SEQ ID NO: 8729 - DNA, 1155 bp, Glycine max
  Gm_smallRNAprecursor_1562
caaatatggagaaatctagacatatgatttcaatttcactagttccctgttaatacaaaggcagaaatcaaccacaatgtaagacttcaataaacgtttttagagaaatttgcataatataaagaaaaaagcaattatgatgtgaacatatgatagtcaaaaaaagataaatcaagataagaaaccaaatcattcatgagtctcactcaaggtgttgtcttccaaaacttgaattatagcttccctggttctcttggtgattcttgagtgacaatttttgtaaccatgtcctaaagtcgtgcaatgtacctctaccatctctaacctttatgagagattttttcagccaatatgtcaatactatttcacgttgtcaccataatgagcaccaagtatatcttcaacatttatcaacgcacaaatgtcaagcaaagcactatcaatgcatatcctttgaagcaacaagcaatgtcaagaaaagcaatataagtccatattctttgaagcaacaagcaatgtcaagaaaagcactcttctcttcttcttccaatgcatcaaagcttagtttaagtatctctaggatttgaatagtaagaatttgtttatattgtttgatgacagattttggttcttcttgtattttttccaaacaagttggaacctattacttccaaagccaatggaagtaattgctcgagcttgtcaacatcatctagaatcaagagaaccttctttcgctggagtctatgttgtatcattgaaactccttgttgctcacttgctaacttaattttcttctttccaagtatatatgaaagaaggatgctttggaaatgttgtagctcatgtttgtttgatttttcttacattttgaagaaaacatgaactatcaaaacagttagcaattaaattacagacagagcaagtgttgttttccctattccacccataccatggatccctgtcatgtggtggacaccatcatcagatccaacgtccaaaagcttcattacttttgacacttgtgactctagtccaaccaaataatccgcaacatgtaaacaagtgggattaatcttgcagcagacctgctcaaccatcctcccaatgaactcatattcatgtgcatatctgtttaaaacaaaaaagttttaa

SEQ ID NO: 8730 - DNA, 1206 bp, Glycine max
  Gm_smallRNAprecursor_1563
caaatatggagaaatctagacatatgatttcaatttcactagttccctgttaatacaaaggcagaaatcaaccacaatgtaagacttcaataaacgtttttagagaaatttgcataatataaagaaaaaagcaattatgatgtgaacatatgatagtcaaaaaaagataaatcaagataagaaaccaaatcattcatgagtctcactcaaggtgttgtcttccaaaacttgaattatagcttccctggttctcttggtgattcttgagtgacaatttttgtaaccatgtcctaaagtcgtgcaatgtacctctaccatctctaacctttatgagagattttttcagccaatatgtcaatactatttcacgttgtcaccataatgagcaccaagtatatcttcaacatttatcaacgcacaaatgtcaagcaaagcactatcaatgcatatcctttgaagcaacaagcaatgtcaagaaaagcaatataagtccatattctttgaagcaacaagcaatgtcaagaaaagcactcttctcttcttcttccaatgcatcaaagcttagtttaagtatctctaggatttgaatagtaagaatttgtttatattgtttgatgacagattttggttcttcttgtattttttccaaacaagttggaacctattacttccaaagccaatggaagtaattgctcgagcttgtcaacatcatctagaatcaagagaaccttctttcgctggagtctatgttgtatcattgaaactccttgttgctcacttgctaacttaattttcttctttccaagtatatatgaaagaaggatgctttggaaatgttgtagctcatgtttgtttgatttttcttacattttgaagaaaacatgaactatcaaaacagttagcaattaaattacagacagagcaagtgttgttttccctattccacccataccatggatccctgtcatgtggtggacaccatcatcagatccaacgtccaaaagcttcattacttttgacacttgtgactctagtccaaccaaataatccgcaacatgtaaacaagtgggattaatcttgcagcagacctgctcaaccatcctcccaatgaactcatattcatgtgcatatctgtttaaaacaaaaaagttttaatgaagtcaaatattgccttgtatatccatgtcttgatacatatgttgtcaa

SEQ ID NO: 8731 - DNA, 1047 bp, Glycine max
  Gm_smallRNAprecursor_1564
atacaaaggcagaaatcaaccacaatgtaagacttcaataaacgtttttagagaaatttgcataatataaagaaaaaagcaattatgatgtgaacatatgatagtcaaaaaaagataaatcaagataagaaaccaaatcattcatgagtctcactcaaggtgttgtcttccaaaacttgaattatagcttccctggttctcttggtgattcttgagtgacaatttttgtaaccatgtcctaaagtcgtgcaatgtacctctaccatctctaacctttatgagagattttttcagccaatatgtcaatactatttcacgttgtcaccataatgagcaccaagtatatcttcaacatttatcaacgcacaaatgtcaagcaaagcactatcaatgcatatcctttgaagcaacaagcaatgtcaagaaaagcaatataagtccatattctttgaagcaacaagcaatgtcaagaaaagcactcttctcttcttcttccaatgcatcaaagcttagtttaagtatctctaggatttgaatagtaagaatttgtttatattgtttgatgacagattttggttcttcttgtattttttccaaacaagttggaacctattacttccaaagccaatggaagtaattgctcgagcttgtcaacatcatctagaatcaagagaaccttctttcgctggagtctatgttgtatcattgaaactccttgttgctcacttgctaacttaattttcttctttccaagtatatatgaaagaaggatgctttggaaatgttgtagctcatgtttgtttgatttttcttacattttgaagaaaacatgaactatcaaaacagttagcaattaaattacagacagagcaagtgttgttttccctattccacccataccatggatccctgtcatgtggtggacaccatcatcagatccaacgtccaaaagcttcattacttttgacacttgtgactctagtccaaccaaataatccgcaacatgtaaacaagtgggattaatcttgcagcagacctgctcaacca

SEQ ID NO: 8732 - DNA, 1050 bp, Glycine max
  Gm_smallRNAprecursor_1565
atacaaaggcagaaatcaaccacaatgtaagacttcaataaacgtttttagagaaatttgcataatataaagaaaaaagcaattatgatgtgaacatatgatagtcaaaaaaagataaatcaagataagaaaccaaatcattcatgagtctcactcaaggtgttgtcttccaaaacttgaattatagcttccctggttctcttggtgattcttgagtgacaatttttgtaaccatgtcctaaagtcgtgcaatgtacctctaccatctctaacctttatgagagattttttcagccaatatgtcaatactatttcacgttgtcaccataatgagcaccaagtatatcttcaacatttatcaacgcacaaatgtcaagcaaagcactatcaatgcatatcctttgaagcaacaagcaatgtcaagaaaagcaatataagtccatattctttgaagcaacaagcaatgtcaagaaaagcactcttctcttcttcttccaatgcatcaaagcttagtttaagtatctctaggatttgaatagtaagaatttgtttatattgtttgatgacagattttggttcttcttgtattttttccaaacaagttggaacctattacttccaaagccaatggaagtaattgctcgagcttgtcaacatcatctagaatcaagagaaccttctttcgctggagtctatgttgtatcattgaaactccttgttgctcacttgctaacttaattttcttctttccaagtatatatgaaagaaggatgctttggaaatgttgtagctcatgtttgtttgatttttcttacattttgaagaaaacatgaactatcaaaacagttagcaattaaattacagacagagcaagtgttgttttccctattccacccataccatggatccctgtcatgtggtggacaccatcatcagatccaacgtccaaaagcttcattacttttgacacttgtgactctagtccaaccaaataatccgcaacatgtaaacaagtgggattaatcttgcagcagacctgctcaaccatcc

SEQ ID NO: 8733 - DNA, 1203 bp, Glycine max
  Gm_smallRNAprecursor_1566
atacaaaggcagaaatcaaccacaatgtaagacttcaataaacgtttttagagaaatttgcataatataaagaaaaaagcaattatgatgtgaacatatgatagtcaaaaaaagataaatcaagataagaaaccaaatcattcatgagtctcactcaaggtgttgtcttccaaaacttgaattatagcttccctggttctcttggtgattcttgagtgacaatttttgtaaccatgtcctaaagtcgtgcaatgtacctctaccatctctaacctttatgagagattttttcagccaatatgtcaatactatttcacgttgtcaccataatgagcaccaagtatatcttcaacatttatcaacgcacaaatgtcaagcaaagcactatcaatgcatatcctttgaagcaacaagcaatgtcaagaaaagcaatataagtccatattctttgaagcaacaagcaatgtcaagaaaagcactcttctcttcttcttccaatgcatcaaagcttagtttaagtatctctaggatttgaatagtaagaatttgtttatattgtttgatgacagattttggttcttcttgtattttttccaaacaagttggaacctattacttccaaagccaatggaagtaattgctcgagcttgtcaacatcatctagaatcaagagaaccttctttcgctggagtctatgttgtatcattgaaactccttgttgctcacttgctaacttaattttcttctttccaagtatatatgaaagaaggatgctttggaaatgttgtagctcatgtttgtttgatttttcttacattttgaagaaaacatgaactatcaaaacagttagcaattaaattacagacagagcaagtgttgttttccctattccacccataccatggatccctgtcatgtggtggacaccatcatcagatccaacgtccaaaagcttcattacttttgacacttgtgactctagtccaaccaaataatccgcaacatgtaaacaagtgggattaatcttgcagcagacctgctcaaccatcctcccaatgaactcatattcatgtgcatatctgtttaaaacaaaaaagttttaatgaagtcaaatattgccttgtatatccatgtcttgatacatatgttgtcaaggttaacaaacatttctttttccctttatattttaacctcaaaccttat

SEQ ID NO: 8734 - DNA, 1123 bp, Glycine max
  Gm_smallRNAprecursor_1567
acttcaataaacgtttttagagaaatttgcataatataaagaaaaaagcaattatgatgtgaacatatgatagtcaaaaaaagataaatcaagataagaaaccaaatcattcatgagtctcactcaaggtgttgtcttccaaaacttgaattatagcttccctggttctcttggtgattcttgagtgacaatttttgtaaccatgtcctaaagtcgtgcaatgtacctctaccatctctaacctttatgagagattttttcagccaatatgtcaatactatttcacgttgtcaccataatgagcaccaagtatatcttcaacatttatcaacgcacaaatgtcaagcaaagcactatcaatgcatatcctttgaagcaacaagcaatgtcaagaaaagcaatataagtccatattctttgaagcaacaagcaatgtcaagaaaagcactcttctcttcttcttccaatgcatcaaagcttagtttaagtatctctaggatttgaatagtaagaatttgtttatattgtttgatgacagattttggttcttcttgtattttttccaaacaagttggaacctattacttccaaagccaatggaagtaattgctcgagcttgtcaacatcatctagaatcaagagaaccttctttcgctggagtctatgttgtatcattgaaactccttgttgctcacttgctaacttaattttcttctttccaagtatatatgaaagaaggatgctttggaaatgttgtagctcatgtttgtttgatttttcttacattttgaagaaaacatgaactatcaaaacagttagcaattaaattacagacagagcaagtgttgttttccctattccacccataccatggatccctgtcatgtggtggacaccatcatcagatccaacgtccaaaagcttcattacttttgacacttgtgactctagtccaaccaaataatccgcaacatgtaaacaagtgggattaatcttgcagcagacctgctcaaccatcctcccaatgaactcatattcatgtgcatatctgtttaaaacaaaaaagttttaatgaagtcaaatattgccttgtatatccatgtcttgatacatatgttgtcaa

SEQ ID NO: 8735 - DNA, 1057 bp, Glycine max
  Gm_smallRNAprecursor_1568
acgtttttagagaaatttgcataatataaagaaaaaagcaattatgatgtgaacatatgatagtcaaaaaaagataaatcaagataagaaaccaaatcattcatgagtctcactcaaggtgttgtcttccaaaacttgaattatagcttccctggttctcttggtgattcttgagtgacaatttttgtaaccatgtcctaaagtcgtgcaatgtacctctaccatctctaacctttatgagagattttttcagccaatatgtcaatactatttcacgttgtcaccataatgagcaccaagtatatcttcaacatttatcaacgcacaaatgtcaagcaaagcactatcaatgcatatcctttgaagcaacaagcaatgtcaagaaaagcaatataagtccatattctttgaagcaacaagcaatgtcaagaaaagcactcttctcttcttcttccaatgcatcaaagcttagtttaagtatctctaggatttgaatagtaagaatttgtttatattgtttgatgacagattttggttcttcttgtattttttccaaacaagttggaacctattacttccaaagccaatggaagtaattgctcgagcttgtcaacatcatctagaatcaagagaaccttctttcgctggagtctatgttgtatcattgaaactccttgttgctcacttgctaacttaattttcttctttccaagtatatatgaaagaaggatgctttggaaatgttgtagctcatgtttgtttgatttttcttacattttgaagaaaacatgaactatcaaaacagttagcaattaaattacagacagagcaagtgttgttttccctattccacccataccatggatccctgtcatgtggtggacaccatcatcagatccaacgtccaaaagcttcattacttttgacacttgtgactctagtccaaccaaataatccgcaacatgtaaacaagtgggattaatcttgcagcagacctgctcaaccatcctcccaatgaactcatattcatgtgcatatctgtttaaaacaaaaaagt

SEQ ID NO: 8736 - DNA, 1047 bp, Glycine max
  Gm_smallRNAprecursor_1569
tttagagaaatttgcataatataaagaaaaaagcaattatgatgtgaacatatgatagtcaaaaaaagataaatcaagataagaaaccaaatcattcatgagtctcactcaaggtgttgtcttccaaaacttgaattatagcttccctggttctcttggtgattcttgagtgacaatttttgtaaccatgtcctaaagtcgtgcaatgtacctctaccatctctaacctttatgagagattttttcagccaatatgtcaatactatttcacgttgtcaccataatgagcaccaagtatatcttcaacatttatcaacgcacaaatgtcaagcaaagcactatcaatgcatatcctttgaagcaacaagcaatgtcaagaaaagcaatataagtccatattctttgaagcaacaagcaatgtcaagaaaagcactcttctcttcttcttccaatgcatcaaagcttagtttaagtatctctaggatttgaatagtaagaatttgtttatattgtttgatgacagattttggttcttcttgtattttttccaaacaagttggaacctattacttccaaagccaatggaagtaattgctcgagcttgtcaacatcatctagaatcaagagaaccttctttcgctggagtctatgttgtatcattgaaactccttgttgctcacttgctaacttaattttcttctttccaagtatatatgaaagaaggatgctttggaaatgttgtagctcatgtttgtttgatttttcttacattttgaagaaaacatgaactatcaaaacagttagcaattaaattacagacagagcaagtgttgttttccctattccacccataccatggatccctgtcatgtggtggacaccatcatcagatccaacgtccaaaagcttcattacttttgacacttgtgactctagtccaaccaaataatccgcaacatgtaaacaagtgggattaatcttgcagcagacctgctcaaccatcctcccaatgaactcatattcatgtgcatatctgtttaaaacaaa

SEQ ID NO: 8737 - DNA, 1108 bp, Glycine max
  Gm_smallRNAprecursor_1570
tttagagaaatttgcataatataaagaaaaaagcaattatgatgtgaacatatgatagtcaaaaaaagataaatcaagataagaaaccaaatcattcatgagtctcactcaaggtgttgtcttccaaaacttgaattatagcttccctggttctcttggtgattcttgagtgacaatttttgtaaccatgtcctaaagtcgtgcaatgtacctctaccatctctaacctttatgagagattttttcagccaatatgtcaatactatttcacgttgtcaccataatgagcaccaagtatatcttcaacatttatcaacgcacaaatgtcaagcaaagcactatcaatgcatatcctttgaagcaacaagcaatgtcaagaaaagcaatataagtccatattctttgaagcaacaagcaatgtcaagaaaagcactcttctcttcttcttccaatgcatcaaagcttagtttaagtatctctaggatttgaatagtaagaatttgtttatattgtttgatgacagattttggttcttcttgtattttttccaaacaagttggaacctattacttccaaagccaatggaagtaattgctcgagcttgtcaacatcatctagaatcaagagaaccttctttcgctggagtctatgttgtatcattgaaactccttgttgctcacttgctaacttaattttcttctttccaagtatatatgaaagaaggatgctttggaaatgttgtagctcatgtttgtttgatttttcttacattttgaagaaaacatgaactatcaaaacagttagcaattaaattacagacagagcaagtgttgttttccctattccacccataccatggatccctgtcatgtggtggacaccatcatcagatccaacgtccaaaagcttcattacttttgacacttgtgactctagtccaaccaaataatccgcaacatgtaaacaagtgggattaatcttgcagcagacctgctcaaccatcctcccaatgaactcatattcatgtgcatatctgtttaaaacaaaaaagttttaatgaagtcaaatattgccttgtatatccatgtcttgatacatatgttgtcaa

SEQ ID NO: 8738 - DNA, 1097 bp, Glycine max
  Gm_smallRNAprecursor_1571
atataaagaaaaaagcaattatgatgtgaacatatgatagtcaaaaaaagataaatcaagataagaaaccaaatcattcatgagtctcactcaaggtgttgtcttccaaaacttgaattatagcttccctggttctcttggtgattcttgagtgacaatttttgtaaccatgtcctaaagtcgtgcaatgtacctctaccatctctaacctttatgagagattttttcagccaatatgtcaatactatttcacgttgtcaccataatgagcaccaagtatatcttcaacatttatcaacgcacaaatgtcaagcaaagcactatcaatgcatatcctttgaagcaacaagcaatgtcaagaaaagcaatataagtccatattctttgaagcaacaagcaatgtcaagaaaagcactcttctcttcttcttccaatgcatcaaagcttagtttaagtatctctaggatttgaatagtaagaatttgtttatattgtttgatgacagattttggttcttcttgtattttttccaaacaagttggaacctattacttccaaagccaatggaagtaattgctcgagcttgtcaacatcatctagaatcaagagaaccttctttcgctggagtctatgttgtatcattgaaactccttgttgctcacttgctaacttaattttcttctttccaagtatatatgaaagaaggatgctttggaaatgttgtagctcatgtttgtttgatttttcttacattttgaagaaaacatgaactatcaaaacagttagcaattaaattacagacagagcaagtgttgttttccctattccacccataccatggatccctgtcatgtggtggacaccatcatcagatccaacgtccaaaagcttcattacttttgacacttgtgactctagtccaaccaaataatccgcaacatgtaaacaagtgggattaatcttgcagcagacctgctcaaccatcctcccaatgaactcatattcatgtgcatatctgtttaaaacaaaaaagttttaatgaagtcaaatattgccttgtatatccatgtcttgatacatatgttgtcaaggttaac

SEQ ID NO: 8739 - DNA, 1031 bp, Glycine max
  Gm_smallRNAprecursor_1572
taaagaaaaaagcaattatgatgtgaacatatgatagtcaaaaaaagataaatcaagataagaaaccaaatcattcatgagtctcactcaaggtgttgtcttccaaaacttgaattatagcttccctggttctcttggtgattcttgagtgacaatttttgtaaccatgtcctaaagtcgtgcaatgtacctctaccatctctaacctttatgagagattttttcagccaatatgtcaatactatttcacgttgtcaccataatgagcaccaagtatatcttcaacatttatcaacgcacaaatgtcaagcaaagcactatcaatgcatatcctttgaagcaacaagcaatgtcaagaaaagcaatataagtccatattctttgaagcaacaagcaatgtcaagaaaagcactcttctcttcttcttccaatgcatcaaagcttagtttaagtatctctaggatttgaatagtaagaatttgtttatattgtttgatgacagattttggttcttcttgtattttttccaaacaagttggaacctattacttccaaagccaatggaagtaattgctcgagcttgtcaacatcatctagaatcaagagaaccttctttcgctggagtctatgttgtatcattgaaactccttgttgctcacttgctaacttaattttcttctttccaagtatatatgaaagaaggatgctttggaaatgttgtagctcatgtttgtttgatttttcttacattttgaagaaaacatgaactatcaaaacagttagcaattaaattacagacagagcaagtgttgttttccctattccacccataccatggatccctgtcatgtggtggacaccatcatcagatccaacgtccaaaagcttcattacttttgacacttgtgactctagtccaaccaaataatccgcaacatgtaaacaagtgggattaatcttgcagcagacctgctcaaccatcctcccaatgaactcatattcatgtgcatatctgtttaaaacaaaaaagt

SEQ ID NO: 8740 - DNA, 1040 bp, Glycine max
  Gm_smallRNAprecursor_1573
gcgctacaactaaagaattagtcctccattatgcagggtttgatggtggacctagtgaatcttgatcctgataagtgttctagatgcttaatcattatatgttttttcacttgttgtcgcggacgtcctagagtagtgtataaagaagtcatatatatatactataaaacaatgataaataagcatccatagtttttaaatatctaattaataatattcatcatttttttctatttctctccttatccaatcacattatataatctataatactgataatttttttctctttttactctctctctctttcactaggtgtcatataccatattggacgtccataattatacgatactgacagagtaccacagtgtttttgttagtcctatttataggaggtagaacttgccattcttttcctcaacatagaacctttgttatagctgagtggccatattataaatacaaatggcttctgcaaaagtagacacggcgtgatattggtacggctcatcttaattcaaccattatatcaacaattgagacgagccgaatcaatatcactcttgtttgcttcattgcatatacttgcaggatgcagcttttcctttagaaaccaaattcaactatccctttgtttatgcttttcttccttctccatgaatgatgaatcccttatgtgacatatggtggtctaacatgaagttctattttatgaatatataggaagaaggcttactagttacattatctgcttcgcactgaaaaatataaatcttcagaaaatggattctgcagaagtggactggcgtggtattgcttctgctcatctttgcatatgaatttcatcacatccctttaaataagacgagccgaatcaataccactccagtacacttcactgcatatatatggctgtgttcttcctatgagtcaaactacgctgatttcagaataatgaaggggaaagtgaatcttcactgttcttattcatgaaaaaaccacagtatcctcctttatggtgtgtagttctctctctt

SEQ ID NO: 8741 - DNA, 1221 bp, Glycine max
  Gm_smallRNAprecursor_1574
tcaccaactcttcaaatagcttacatcagttacatgcttcattcgcgtgcttgaaccttacaagtcccaagatcatgacattgtataatgtggtgttcttctttggtgttgcagtaaaatagtagaatgcgtcattgaagttgtcgttttggatgcacacaagagcaatggagtttcaagaaacgacattcttaagcaacatggaaagggagggtgttatggaatgttagagaaagtcattttgctagtaggtagagagcattgagttccatatgatggcatcttttgtgggcatttcatcgaaaagttagcaaatggcatcaaagttaaagagtcaacttattaaagaaaaaaagttggttatttatgtatttgcttctctgtttggagaaaaaaaatattctcttcaatctgcttagacccaaacacaccctgttaagaatagtcccacatcgggtaattcatgaacatgataagtgcttatatagctgggtagaccacccccttatgaaccggtttttaaggggacctttcggatgccttggctgcactataaaatttaatatggtatcagagcgatattctgcttctgtccggtgggtgccgccagccctcgctttgtggtgacgagccctggctcgagggggcgtgttaagaatagtcccacatcgggtaattcatgaacatgataagtgcttatatagctgggtagaccacccccttatgaaccggtttttaaggggacctttcggatgccttggctgcactataaaatttaatacacccaccttatctctttctttctctttatcaccaccactttcttttgaagcaacgaattttattggttgtttgattcaaatgtgttttggttggtgtttgagtattgtttaggttcaaatagggtgttggtgcttgaataattgattttgaggttggttcaaagtttgaagcagcccaaatgatgaaattttactttgtggcggtgaaaaattgctaaaagaaaaattaagtatactcagatttcacatctaaatttttggaatattaaaccgtcacagtttacaaaacatcaatcatctacttaattataaaaaaatcattaatcatttatttgtcgtgtcactaatggacttggtggaaaggactaaaacaatttgaagactaattttatcaacttgaaaatatagggattaagataaagtttgataaaaagtataa

SEQ ID NO: 8742 - DNA, 1213 bp, Glycine max
  Gm_smallRNAprecursor_1575
caactcttcaaatagcttacatcagttacatgcttcattcgcgtgcttgaaccttacaagtcccaagatcatgacattgtataatgtggtgttcttctttggtgttgcagtaaaatagtagaatgcgtcattgaagttgtcgttttggatgcacacaagagcaatggagtttcaagaaacgacattcttaagcaacatggaaagggagggtgttatggaatgttagagaaagtcattttgctagtaggtagagagcattgagttccatatgatggcatcttttgtgggcatttcatcgaaaagttagcaaatggcatcaaagttaaagagtcaacttattaaagaaaaaaagttggttatttatgtatttgcttctctgtttggagaaaaaaaatattctcttcaatctgcttagacccaaacacaccctgttaagaatagtcccacatcgggtaattcatgaacatgataagtgcttatatagctgggtagaccacccccttatgaaccggtttttaaggggacctttcggatgccttggctgcactataaaatttaatatggtatcagagcgatattctgcttctgtccggtgggtgccgccagccctcgctttgtggtgacgagccctggctcgagggggcgtgttaagaatagtcccacatcgggtaattcatgaacatgataagtgcttatatagctgggtagaccacccccttatgaaccggtttttaaggggacctttcggatgccttggctgcactataaaatttaatacacccaccttatctctttctttctctttatcaccaccactttcttttgaagcaacgaattttattggttgtttgattcaaatgtgttttggttggtgtttgagtattgtttaggttcaaatagggtgttggtgcttgaataattgattttgaggttggttcaaagtttgaagcagcccaaatgatgaaattttactttgtggcggtgaaaaattgctaaaagaaaaattaagtatactcagatttcacatctaaatttttggaatattaaaccgtcacagtttacaaaacatcaatcatctacttaattataaaaaaatcattaatcatttatttgtcgtgtcactaatggacttggtggaaaggactaaaacaatttgaagactaattttatcaacttgaaaatatagggattaagataaagtttgataaaaagt

SEQ ID NO: 8743 - DNA, 1045 bp, Glycine max
  Gm_smallRNAprecursor_1576
tatatcaaaatactaaacagaaaatatgagaaaacattcctgtcatttcaacctcaccttgaaggagattgtagaagtgacaaagtttgagaatgtgggtttgggcctaactcaaccccaaaggctaactcatggggggagggttgcccccgcttatatatattctatctttgccttatctctagcttatgtgggacttggatttttcccgatacaccccctcacgctcagcactttgggcttggtggatggtccgttaatggatctaggataggctctgatatcatcttagaatgtgggtttggcataactcaaccctaaaagctagctcatgggataagggtcgtcgttcacttatatattctatttttgtcttatgagtgaataggcaatttagtccctgggattgtacccattttgcatattagtccctaacttaatattaaattcaaaatagtccctatctttgcataagtgttgcaaaataatccttccgttaaattttaaagtaacgccgttagtgagattaattttagtaccacgtgaactatccaacgtggcactaaaggatgacgtggcatgatacgtggacatgtctcttaaaagatgccacgtcatttgatgataacaaaacgagtaaatagacaatttagtccctaaccttgtacccttgttgcatattagtccctaacttaatgaaaaattcaaaatagtccttccgttaaattttaaagtaacgctgttagtgaggtcaattttagtgccacgtcatttgatgatgatagaatgagtggcttcttcaaatttgatggttctgaaccaattgaggcatatatacaaaaaataatccacacacacttgcacaaataaaaagaaccaaaaatccacagcaacaaccttatctctgtagctgtcaacaccaatgggcgaggtctgcataaccattctcttttcctctttttttttcttcaattaccatcaatgtatcattctgggttctgattttgcaaggaatcaaaagatgacaaggaattcaaggaggaat

SEQ ID NO: 8744 - DNA, 1046 bp, Glycine max
  Gm_smallRNAprecursor_1577
tatatcaaaatactaaacagaaaatatgagaaaacattcctgtcatttcaacctcaccttgaaggagattgtagaagtgacaaagtttgagaatgtgggtttgggcctaactcaaccccaaaggctaactcatggggggagggttgcccccgcttatatatattctatctttgccttatctctagcttatgtgggacttggatttttcccgatacaccccctcacgctcagcactttgggcttggtggatggtccgttaatggatctaggataggctctgatatcatcttagaatgtgggtttggcataactcaaccctaaaagctagctcatgggataagggtcgtcgttcacttatatattctatttttgtcttatgagtgaataggcaatttagtccctgggattgtacccattttgcatattagtccctaacttaatattaaattcaaaatagtccctatctttgcataagtgttgcaaaataatccttccgttaaattttaaagtaacgccgttagtgagattaattttagtaccacgtgaactatccaacgtggcactaaaggatgacgtggcatgatacgtggacatgtctcttaaaagatgccacgtcatttgatgataacaaaacgagtaaatagacaatttagtccctaaccttgtacccttgttgcatattagtccctaacttaatgaaaaattcaaaatagtccttccgttaaattttaaagtaacgctgttagtgaggtcaattttagtgccacgtcatttgatgatgatagaatgagtggcttcttcaaatttgatggttctgaaccaattgaggcatatatacaaaaaataatccacacacacttgcacaaataaaaagaaccaaaaatccacagcaacaaccttatctctgtagctgtcaacaccaatgggcgaggtctgcataaccattctcttttcctctttttttttcttcaattaccatcaatgtatcattctgggttctgattttgcaaggaatcaaaagatgacaaggaattcaaggaggaatc

SEQ ID NO: 8745 - DNA, 1044 bp, Glycine max
  Gm_smallRNAprecursor_1578
atatcaaaatactaaacagaaaatatgagaaaacattcctgtcatttcaacctcaccttgaaggagattgtagaagtgacaaagtttgagaatgtgggtttgggcctaactcaaccccaaaggctaactcatggggggagggttgcccccgcttatatatattctatctttgccttatctctagcttatgtgggacttggatttttcccgatacaccccctcacgctcagcactttgggcttggtggatggtccgttaatggatctaggataggctctgatatcatcttagaatgtgggtttggcataactcaaccctaaaagctagctcatgggataagggtcgtcgttcacttatatattctatttttgtcttatgagtgaataggcaatttagtccctgggattgtacccattttgcatattagtccctaacttaatattaaattcaaaatagtccctatctttgcataagtgttgcaaaataatccttccgttaaattttaaagtaacgccgttagtgagattaattttagtaccacgtgaactatccaacgtggcactaaaggatgacgtggcatgatacgtggacatgtctcttaaaagatgccacgtcatttgatgataacaaaacgagtaaatagacaatttagtccctaaccttgtacccttgttgcatattagtccctaacttaatgaaaaattcaaaatagtccttccgttaaattttaaagtaacgctgttagtgaggtcaattttagtgccacgtcatttgatgatgatagaatgagtggcttcttcaaatttgatggttctgaaccaattgaggcatatatacaaaaaataatccacacacacttgcacaaataaaaagaaccaaaaatccacagcaacaaccttatctctgtagctgtcaacaccaatgggcgaggtctgcataaccattctcttttcctctttttttttcttcaattaccatcaatgtatcattctgggttctgattttgcaaggaatcaaaagatgacaaggaattcaaggaggaat

SEQ ID NO: 8746 - DNA, 1044 bp, Glycine max; identical to SEQ ID NO: 8745
  Gm_smallRNAprecursor_1579

SEQ ID NO: 8747 - DNA, 1044 bp, Glycine max; identical to SEQ ID NO: 8745
  Gm_smallRNAprecursor_1580

SEQ ID NO: 8748 - DNA, 1045 bp, Glycine max
  Gm_smallRNAprecursor_1581
atatcaaaatactaaacagaaaatatgagaaaacattcctgtcatttcaacctcaccttgaaggagattgtagaagtgacaaagtttgagaatgtgggtttgggcctaactcaaccccaaaggctaactcatggggggagggttgcccccgcttatatatattctatctttgccttatctctagcttatgtgggacttggatttttcccgatacaccccctcacgctcagcactttgggcttggtggatggtccgttaatggatctaggataggctctgatatcatcttagaatgtgggtttggcataactcaaccctaaaagctagctcatgggataagggtcgtcgttcacttatatattctatttttgtcttatgagtgaataggcaatttagtccctgggattgtacccattttgcatattagtccctaacttaatattaaattcaaaatagtccctatctttgcataagtgttgcaaaataatccttccgttaaattttaaagtaacgccgttagtgagattaattttagtaccacgtgaactatccaacgtggcactaaaggatgacgtggcatgatacgtggacatgtctcttaaaagatgccacgtcatttgatgataacaaaacgagtaaatagacaatttagtccctaaccttgtacccttgttgcatattagtccctaacttaatgaaaaattcaaaatagtccttccgttaaattttaaagtaacgctgttagtgaggtcaattttagtgccacgtcatttgatgatgatagaatgagtggcttcttcaaatttgatggttctgaaccaattgaggcatatatacaaaaaataatccacacacacttgcacaaataaaaagaaccaaaaatccacagcaacaaccttatctctgtagctgtcaacaccaatgggcgaggtctgcataaccattctcttttcctctttttttttcttcaattaccatcaatgtatcattctgggttctgattttgcaaggaatcaaaagatgacaaggaattcaaggaggaatc

SEQ ID NO: 8749 - DNA, 1043 bp, Glycine max
  Gm_smallRNAprecursor_1582
tatcaaaatactaaacagaaaatatgagaaaacattcctgtcatttcaacctcaccttgaaggagattgtagaagtgacaaagtttgagaatgtgggtttgggcctaactcaaccccaaaggctaactcatggggggagggttgcccccgcttatatatattctatctttgccttatctctagcttatgtgggacttggatttttcccgatacaccccctcacgctcagcactttgggcttggtggatggtccgttaatggatctaggataggctctgatatcatcttagaatgtgggtttggcataactcaaccctaaaagctagctcatgggataagggtcgtcgttcacttatatattctatttttgtcttatgagtgaataggcaatttagtccctgggattgtacccattttgcatattagtccctaacttaatattaaattcaaaatagtccctatctttgcataagtgttgcaaaataatccttccgttaaattttaaagtaacgccgttagtgagattaattttagtaccacgtgaactatccaacgtggcactaaaggatgacgtggcatgatacgtggacatgtctcttaaaagatgccacgtcatttgatgataacaaaacgagtaaatagacaatttagtccctaaccttgtacccttgttgcatattagtccctaacttaatgaaaaattcaaaatagtccttccgttaaattttaaagtaacgctgttagtgaggtcaattttagtgccacgtcatttgatgatgatagaatgagtggcttcttcaaatttgatggttctgaaccaattgaggcatatatacaaaaaataatccacacacacttgcacaaataaaaagaaccaaaaatccacagcaacaaccttatctctgtagctgtcaacaccaatgggcgaggtctgcataaccattctcttttcctctttttttttcttcaattaccatcaatgtatcattctgggttctgattttgcaaggaatcaaaagatgacaaggaattcaaggaggaat

SEQ ID NO: 8750 - DNA, 1043 bp, Glycine max; identical to SEQ ID NO: 8749
  Gm_smallRNAprecursor_1583

SEQ ID NO: 8751 - DNA, 1184 bp, Glycine max
  Gm_smallRNAprecursor_1584
attgtagaagtgacaaagtttgagaatgtgggtttgggcctaactcaaccccaaaggctaactcatggggggagggttgcccccgcttatatatattctatctttgccttatctctagcttatgtgggacttggatttttcccgatacaccccctcacgctcagcactttgggcttggtggatggtccgttaatggatctaggataggctctgatatcatcttagaatgtgggtttggcataactcaaccctaaaagctagctcatgggataagggtcgtcgttcacttatatattctatttttgtcttatgagtgaataggcaatttagtccctgggattgtacccattttgcatattagtccctaacttaatattaaattcaaaatagtccctatctttgcataagtgttgcaaaataatccttccgttaaattttaaagtaacgccgttagtgagattaattttagtaccacgtgaactatccaacgtggcactaaaggatgacgtggcatgatacgtggacatgtctcttaaaagatgccacgtcatttgatgataacaaaacgagtaaatagacaatttagtccctaaccttgtacccttgttgcatattagtccctaacttaatgaaaaattcaaaatagtccttccgttaaattttaaagtaacgctgttagtgaggtcaattttagtgccacgtcatttgatgatgatagaatgagtggcttcttcaaatttgatggttctgaaccaattgaggcatatatacaaaaaataatccacacacacttgcacaaataaaaagaaccaaaaatccacagcaacaaccttatctctgtagctgtcaacaccaatgggcgaggtctgcataaccattctcttttcctctttttttttcttcaattaccatcaatgtatcattctgggttctgattttgcaaggaatcaaaagatgacaaggaattcaaggaggaatctgcaccgccagaaatcgtgcaaggcacaacctttgcaatgcatggacactttaagcgcgatttctgacatcttttaagttagggactattttgcaacacttatgcaaaagataaggactattttgaatttttcattaagttagagactaatatgcaacaggggcacaaagtcagggactaaattgcctatttactcgttttgttt

SEQ ID NO: 8752 - DNA, 1099 bp, Glycine max
  Gm_smallRNAprecursor_1585
aattgttctgtttttttttcttttttttttccaatgtacttatatcctgtagttatgtttcattatttgatcagaaactttctttttgtacttgaaagattcgttgtattcaagttaaaggcaatttttttcccatatttatatatgcaggagaatttatatcttttaaattccagattttacacgtttggactatcagtacctgagaatactggaggccttcagagaaccacttatggatgaatattggaggcctttagagaactcattgactattactgaacagacaacaacagtaagcacaattatttatgttttatgcttcacttctcttcattgtacttttgtatatattttcttatgggcaaatgttaattgttaacttgttattttttattaacagccatgatctttctcccttcccttgtttcttaattattcaaccaatcttttatcttcacttctatacattactcccttttcttgccgtgtctggtgtctgacacgacaccgacaccgacacgacatcgacgcccgtgtccggattgaatttgatatgtttgacaggtgttcacgtgtccatgtccgtgttgtgtccggtgtccgtgtcagtgtcggtgcttcataggtccttatgagctagatcattgcattgcatattttaatttcaattggtaaaattcaaataaggatgcatttgtgccagaaaattgtctctcagttgcgcatattttcagttcaagttgatcttgatgaattttagattgttgttatcaagtttatgttttgggctgaatttctattaagcttatcaaagaattttgtcttgcatggtctttaaacgagaacaaagtgtgtgtaaaaatgaactttgaaaaaagtaaacaaaaacttcagaaaaactgttaaaaaattgttttaggcccaaaaattctaacccaatatatgcccaacttgttttgaaccaaatcaactaacccacaactaaaaagatttgaaacttcccttagtcgaaggctgaacactagggattaggagaggaattattgtgattggatgggcaattttgagtctgagctcgatcaaactcaaattgatg

SEQ ID NO: 8753 - DNA, 1099 bp, Glycine max; identical to SEQ ID NO: 8752
  Gm_smallRNAprecursor_1586

SEQ ID NO: 8754 - DNA, 1093 bp, Glycine max
  Gm_smallRNAprecursor_1587
tctgtttttttttcttttttttttccaatgtacttatatcctgtagttatgtttcattatttgatcagaaactttctttttgtacttgaaagattcgttgtattcaagttaaaggcaatttttttcccatatttatatatgcaggagaatttatatcttttaaattccagattttacacgtttggactatcagtacctgagaatactggaggccttcagagaaccacttatggatgaatattggaggcctttagagaactcattgactattactgaacagacaacaacagtaagcacaattatttatgttttatgcttcacttctcttcattgtacttttgtatatattttcttatgggcaaatgttaattgttaacttgttattttttattaacagccatgatctttctcccttcccttgtttcttaattattcaaccaatcttttatcttcacttctatacattactcccttttcttgccgtgtctggtgtctgacacgacaccgacaccgacacgacatcgacgcccgtgtccggattgaatttgatatgtttgacaggtgttcacgtgtccatgtccgtgttgtgtccggtgtccgtgtcagtgtcggtgcttcataggtccttatgagctagatcattgcattgcatattttaatttcaattggtaaaattcaaataaggatgcatttgtgccagaaaattgtctctcagttgcgcatattttcagttcaagttgatcttgatgaattttagattgttgttatcaagtttatgttttgggctgaatttctattaagcttatcaaagaattttgtcttgcatggtctttaaacgagaacaaagtgtgtgtaaaaatgaactttgaaaaaagtaaacaaaaacttcagaaaaactgttaaaaaattgttttaggcccaaaaattctaacccaatatatgcccaacttgttttgaaccaaatcaactaacccacaactaaaaagatttgaaacttcccttagtcgaaggctgaacactagggattaggagaggaattattgtgattggatgggcaattttgagtctgagctcgatcaaactcaaattgatg

SEQ ID NO: 8755 - DNA, 1093 bp, Glycine max; identical to SEQ ID NO: 8754
  Gm_smallRNAprecursor_1588

SEQ ID NO: 8756 - DNA, 1079 bp, Glycine max
  Gm_smallRNAprecursor_1589
ttaaggaaattcctagaaccttctcttcttctagaagtttctccataatttttctttcctctattttctttgttttggggctgaaatttaaactttgactggaaggcattttcaattgtatcttctttatgcctatacagtctttgctcatatgcttcaagagagcccacaagttctgtctctgatagagtggacagatctttggtttcctcaatcgttgtcacgattgggtcaaacttttggggcatagtaattagaattttctcaaaattttcttgtcaagaatatcttccccaaaagctctcatttgattaactatttctttaactttagaatagtaatctttaactgtctcagactccttcatcttcaatagttcaaaatctcttcttagagattgaagtttaacggcacgtaccttaacacttccttgaaactcctcctgcaatgtgttccacgcttctttggcagtcttagctcccataattcttgggaaaattggatcagtcaccgcttgttgcaaggtgaacaacgcctttgaatttttttgtttatttttcttcaactctttttcttgagatgcattaagagctgaagtatccgcgggaatggtgaagccttcttctactatgtcccgtaaatcttgagatgaaaaatatgtttccattttaacacgccagaaatcataattttcaccattgaagatagggacagaaatagttgacgattgagtagtgttatccatagcttagaaaaaatattattagaatgggttaatagtacaaaggaaatttttgaagtagttgggaggattttgaaatggtaggtaggtaatataactacgcccaatgtatgaccgaacgtagctcagataccactgttggtagttggttagatgatagttgatagttttagagaattgttttagaaagaaggctatgtcattgatttcttggattgatcaattacaacataccaattgcctatttataggctcaagtcaccaacctctcaatggtggtgaatgtttctacattactttaggtctttctagaattttcatgatagattaatatcat

SEQ ID NO: 8757 - DNA, 1036 bp, Glycine max
  Gm_smallRNAprecursor_1590
atttggatattaattaaacgttaactacaataagtgtacacacacataagcaatatatataagtagaagttttatttaaatcacgtaccttaacaacaatccacctagcaccagccttggatttaggttgtgaagtatcatcaagtcctttcaaaacactgttgaatacgaggaacattaaaatattgatattgttgagttatactaatgcaaatgtattgaaaacaagactgacctgttaattattctcttaaggtagttgtctagcctgttatacaaggaacaaaaccaaacaacaaggttttccttaggcagaatgacgaccatttgctagtgtccgctgcagtggagacgaatatgggttattgtagtattatacattatttaaatttagttgttttatttgacttacccattcaggtaggctctaaggtagacatcccgttttgaactctgcatccaactcttgatgtaactttccgattcaaactgcgattgtccagatctctgaatggactgtggctcgaggaatccatacacatcagaattccccgctcacatacttgtctcagtcagatgcctgttgttgtgaagacaaagttaattatgtatgaatttaaaacaataacttaagtaattaacaataatctaaattgacatacagaattcacaactgtaaaacagatatgctaagacattgaccatcgtgtgcaatttcagagagatttttgtgcttgatgtacaatgggaagtcttaattaaacaccccaaacacgatagcatcccacataacctggagaggcctcaagaaaagctgtgggatggtcaatgttatcagatataggggatcatcgacctcaggatgcggcctatctggaggctttgctggagacacagctgcctgtttatcaaacatagtaaaataacacaatttaattttaatgaacaaatcaattgaaaaaagaagcatataatcagagtaaaaaacctgttctgataaaagcttcacaagatgtgttagctaagcaaggaaggt

SEQ ID NO: 8758 - DNA, 1199 bp, Glycine max
  Gm_smallRNAprecursor_1591
tcaaaatattttttttagaattaaattaattaatttttatgcattgtaaaccaactagaaattataattataatagatataatttttaaagtaattattataaaaatttataaaagtacaatgtatacgatgatttgtaaccaaatattattagtcaataaaatatttactctttcttttttattatatatatatatatatatatatatatatatatatatatatatatataataaaaaacggacagataggaagtaagaatgcagtatgattaatgaaatgaaaatataaacttgaaaacagatatcaaggtcacaccggagaccggcttacaaaacccaggttttcataaacaaagaaaccgaagcggcggcagagccgcacaggatcggtgaagggagaagagagaagaatgaaaaacagaaatttattgaatctagaaagaagcgcttacaaaaatcttgtttcagagcacctctcttccgaaacctgaaaaatgactaaatgaaagggtgcctcacaacatgcttgaggactccttatatagccaaatatctaagaccggtagttgccggtagttttgaccgggactatttgactgtttgttacaagacaagtagttttgaccgggactttaatgactacaggacaggtagtattgtccagcattaattacacattagttacaaacagacggttttgtgaccgaaattaaatttaatctaaacagataccaaaacaatcatcttcgttttggtaaaagggatcttcttcgtcttcttcaacagaacttgtttcttccttctttgaggatgaagcttcttcttcctgttgtaacatttgtagaacttccttcagatttttagctaagacctcctttgatgtcgatcctgctaaaaatgctgccagatgagacttttggttcaagaacactgaagtctctggatcagccgctttgaggaattctggatgggatttgaaccatagttttacttgttctggatccgctttggatgagtcaaattgtgtccaccattttacaaatgcgtgtctttgtagtgatggatattgatttgtcttttcagtcttgctgtagcgatattgccatgagaatatccatgacagtgcaaagcttgaaaagtatttaagatctgctggaattcgtgattcctgcgaattgtattgtttcttaaattggg

SEQ ID NO: 8759 - DNA, 1141 bp, Glycine max
  Gm_smallRNAprecursor_1592
tttttaaagtaattattataaaaatttataaaagtacaatgtatacgatgatttgtaaccaaatattattagtcaataaaatatttactctttcttttttattatatatatatatatatatatatatatatatatatatatatatatataataaaaaacggacagataggaagtaagaatgcagtatgattaatgaaatgaaaatataaacttgaaaacagatatcaaggtcacaccggagaccggcttacaaaacccaggttttcataaacaaagaaaccgaagcggcggcagagccgcacaggatcggtgaagggagaagagagaagaatgaaaaacagaaatttattgaatctagaaagaagcgcttacaaaaatcttgtttcagagcacctctcttccgaaacctgaaaaatgactaaatgaaagggtgcctcacaacatgcttgaggactccttatatagccaaatatctaagaccggtagttgccggtagttttgaccgggactatttgactgtttgttacaagacaagtagttttgaccgggactttaatgactacaggacaggtagtattgtccagcattaattacacattagttacaaacagacggttttgtgaccgaaattaaatttaatctaaacagataccaaaacaatcatcttcgttttggtaaaagggatcttcttcgtcttcttcaacagaacttgtttcttccttctttgaggatgaagcttcttcttcctgttgtaacatttgtagaacttccttcagatttttagctaagacctcctttgatgtcgatcctgctaaaaatgctgccagatgagacttttggttcaagaacactgaagtctctggatcagccgctttgaggaattctggatgggatttgaaccatagttttacttgttctggatccgctttggatgagtcaaattgtgtccaccattttacaaatgcgtgtctttgtagtgatggatattgatttgtcttttcagtcttgctgtagcgatattgccatgagaatatccatgacagtgcaaagcttgaaaagtatttaagatctgctggaattcgtgattcctgcgaattgtattgtttcttaaattgggaaaatccttgttggaccgtttctg

SEQ ID NO: 8760 - DNA, 1154 bp, Glycine max
  Gm_smallRNAprecursor_1593
tttttaaagtaattattataaaaatttataaaagtacaatgtatacgatgatttgtaaccaaatattattagtcaataaaatatttactctttcttttttattatatatatatatatatatatatatatatatatatatatatatatataataaaaaacggacagataggaagtaagaatgcagtatgattaatgaaatgaaaatataaacttgaaaacagatatcaaggtcacaccggagaccggcttacaaaacccaggttttcataaacaaagaaaccgaagcggcggcagagccgcacaggatcggtgaagggagaagagagaagaatgaaaaacagaaatttattgaatctagaaagaagcgcttacaaaaatcttgtttcagagcacctctcttccgaaacctgaaaaatgactaaatgaaagggtgcctcacaacatgcttgaggactccttatatagccaaatatctaagaccggtagttgccggtagttttgaccgggactatttgactgtttgttacaagacaagtagttttgaccgggactttaatgactacaggacaggtagtattgtccagcattaattacacattagttacaaacagacggttttgtgaccgaaattaaatttaatctaaacagataccaaaacaatcatcttcgttttggtaaaagggatcttcttcgtcttcttcaacagaacttgtttcttccttctttgaggatgaagcttcttcttcctgttgtaacatttgtagaacttccttcagatttttagctaagacctcctttgatgtcgatcctgctaaaaatgctgccagatgagacttttggttcaagaacactgaagtctctggatcagccgctttgaggaattctggatgggatttgaaccatagttttacttgttctggatccgctttggatgagtcaaattgtgtccaccattttacaaatgcgtgtctttgtagtgatggatattgatttgtcttttcagtcttgctgtagcgatattgccatgagaatatccatgacagtgcaaagcttgaaaagtatttaagatctgctggaattcgtgattcctgcgaattgtattgtttcttaaattgggaaaatccttgttggaccgtttctgggaatatctctgg

SEQ ID NO: 8761 - DNA, 1064 bp, Glycine max
  Gm_smallRNAprecursor_1594
tatatatataataaaaaacggacagataggaagtaagaatgcagtatgattaatgaaatgaaaatataaacttgaaaacagatatcaaggtcacaccggagaccggcttacaaaacccaggttttcataaacaaagaaaccgaagcggcggcagagccgcacaggatcggtgaagggagaagagagaagaatgaaaaacagaaatttattgaatctagaaagaagcgcttacaaaaatcttgtttcagagcacctctcttccgaaacctgaaaaatgactaaatgaaagggtgcctcacaacatgcttgaggactccttatatagccaaatatctaagaccggtagttgccggtagttttgaccgggactatttgactgtttgttacaagacaagtagttttgaccgggactttaatgactacaggacaggtagtattgtccagcattaattacacattagttacaaacagacggttttgtgaccgaaattaaatttaatctaaacagataccaaaacaatcatcttcgttttggtaaaagggatcttcttcgtcttcttcaacagaacttgtttcttccttctttgaggatgaagcttcttcttcctgttgtaacatttgtagaacttccttcagatttttagctaagacctcctttgatgtcgatcctgctaaaaatgctgccagatgagacttttggttcaagaacactgaagtctctggatcagccgctttgaggaattctggatgggatttgaaccatagttttacttgttctggatccgctttggatgagtcaaattgtgtccaccattttacaaatgcgtgtctttgtagtgatggatattgatttgtcttttcagtcttgctgtagcgatattgccatgagaatatccatgacagtgcaaagcttgaaaagtatttaagatctgctggaattcgtgattcctgcgaattgtattgtttcttaaattgggaaaatccttgttggaccgtttctgggaatatctctgggattggtccaaagaagtcccaccattgcaaaaaccaattgggaaaattgt

SEQ ID NO: 8762 - DNA, 1083 bp, Glycine max
  Gm_smallRNAprecursor_1595
atatataataaaaaacggacagataggaagtaagaatgcagtatgattaatgaaatgaaaatataaacttgaaaacagatatcaaggtcacaccggagaccggcttacaaaacccaggttttcataaacaaagaaaccgaagcggcggcagagccgcacaggatcggtgaagggagaagagagaagaatgaaaaacagaaatttattgaatctagaaagaagcgcttacaaaaatcttgtttcagagcacctctcttccgaaacctgaaaaatgactaaatgaaagggtgcctcacaacatgcttgaggactccttatatagccaaatatctaagaccggtagttgccggtagttttgaccgggactatttgactgtttgttacaagacaagtagttttgaccgggactttaatgactacaggacaggtagtattgtccagcattaattacacattagttacaaacagacggttttgtgaccgaaattaaatttaatctaaacagataccaaaacaatcatcttcgttttggtaaaagggatcttcttcgtcttcttcaacagaacttgtttcttccttctttgaggatgaagcttcttcttcctgttgtaacatttgtagaacttccttcagatttttagctaagacctcctttgatgtcgatcctgctaaaaatgctgccagatgagacttttggttcaagaacactgaagtctctggatcagccgctttgaggaattctggatgggatttgaaccatagttttacttgttctggatccgctttggatgagtcaaattgtgtccaccattttacaaatgcgtgtctttgtagtgatggatattgatttgtcttttcagtcttgctgtagcgatattgccatgagaatatccatgacagtgcaaagcttgaaaagtatttaagatctgctggaattcgtgattcctgcgaattgtattgtttcttaaattgggaaaatccttgttggaccgtttctgggaatatctctgggattggtccaaagaagtcccaccattgcaaaaaccaattgggaaaattgtaaattgtgttggtcttgaaata

SEQ ID NO: 8763 - DNA, 1082 bp, Glycine max
  Gm_smallRNAprecursor_1596
tatataataaaaaacggacagataggaagtaagaatgcagtatgattaatgaaatgaaaatataaacttgaaaacagatatcaaggtcacaccggagaccggcttacaaaacccaggttttcataaacaaagaaaccgaagcggcggcagagccgcacaggatcggtgaagggagaagagagaagaatgaaaaacagaaatttattgaatctagaaagaagcgcttacaaaaatcttgtttcagagcacctctcttccgaaacctgaaaaatgactaaatgaaagggtgcctcacaacatgcttgaggactccttatatagccaaatatctaagaccggtagttgccggtagttttgaccgggactatttgactgtttgttacaagacaagtagttttgaccgggactttaatgactacaggacaggtagtattgtccagcattaattacacattagttacaaacagacggttttgtgaccgaaattaaatttaatctaaacagataccaaaacaatcatcttcgttttggtaaaagggatcttcttcgtcttcttcaacagaacttgtttcttccttctttgaggatgaagcttcttcttcctgttgtaacatttgtagaacttccttcagatttttagctaagacctcctttgatgtcgatcctgctaaaaatgctgccagatgagacttttggttcaagaacactgaagtctctggatcagccgctttgaggaattctggatgggatttgaaccatagttttacttgttctggatccgctttggatgagtcaaattgtgtccaccattttacaaatgcgtgtctttgtagtgatggatattgatttgtcttttcagtcttgctgtagcgatattgccatgagaatatccatgacagtgcaaagcttgaaaagtatttaagatctgctggaattcgtgattcctgcgaattgtattgtttcttaaattgggaaaatccttgttggaccgtttctgggaatatctctgggattggtccaaagaagtcccaccattgcaaaaaccaattgggaaaattgtaaattgtgttggtcttgaaata

SEQ ID NO: 8764 - DNA, 1081 bp, Glycine max
  Gm_smallRNAprecursor_1597
atataataaaaaacggacagataggaagtaagaatgcagtatgattaatgaaatgaaaatataaacttgaaaacagatatcaaggtcacaccggagaccggcttacaaaacccaggttttcataaacaaagaaaccgaagcggcggcagagccgcacaggatcggtgaagggagaagagagaagaatgaaaaacagaaatttattgaatctagaaagaagcgcttacaaaaatcttgtttcagagcacctctcttccgaaacctgaaaaatgactaaatgaaagggtgcctcacaacatgcttgaggactccttatatagccaaatatctaagaccggtagttgccggtagttttgaccgggactatttgactgtttgttacaagacaagtagttttgaccgggactttaatgactacaggacaggtagtattgtccagcattaattacacattagttacaaacagacggttttgtgaccgaaattaaatttaatctaaacagataccaaaacaatcatcttcgttttggtaaaagggatcttcttcgtcttcttcaacagaacttgtttcttccttctttgaggatgaagcttcttcttcctgttgtaacatttgtagaacttccttcagatttttagctaagacctcctttgatgtcgatcctgctaaaaatgctgccagatgagacttttggttcaagaacactgaagtctctggatcagccgctttgaggaattctggatgggatttgaaccatagttttacttgttctggatccgctttggatgagtcaaattgtgtccaccattttacaaatgcgtgtctttgtagtgatggatattgatttgtcttttcagtcttgctgtagcgatattgccatgagaatatccatgacagtgcaaagcttgaaaagtatttaagatctgctggaattcgtgattcctgcgaattgtattgtttcttaaattgggaaaatccttgttggaccgtttctgggaatatctctgggattggtccaaagaagtcccaccattgcaaaaaccaattgggaaaattgtaaattgtgttggtcttgaaata

SEQ ID NO: 8765 - DNA, 1131 bp, Glycine max
  Gm_smallRNAprecursor_1598
acaagtagttttgaccgggactttaatgactacaggacaggtagtattgtccagcattaattacacattagttacaaacagacggttttgtgaccgaaattaaatttaatctaaacagataccaaaacaatcatcttcgttttggtaaaagggatcttcttcgtcttcttcaacagaacttgtttcttccttctttgaggatgaagcttcttcttcctgttgtaacatttgtagaacttccttcagatttttagctaagacctcctttgatgtcgatcctgctaaaaatgctgccagatgagacttttggttcaagaacactgaagtctctggatcagccgctttgaggaattctggatgggatttgaaccatagttttacttgttctggatccgctttggatgagtcaaattgtgtccaccattttacaaatgcgtgtctttgtagtgatggatattgatttgtcttttcagtcttgctgtagcgatattgccatgagaatatccatgacagtgcaaagcttgaaaagtatttaagatctgctggaattcgtgattcctgcgaattgtattgtttcttaaattgggaaaatccttgttggaccgtttctgggaatatctctgggattggtccaaagaagtcccaccattgcaaaaaccaattgggaaaattgtaaattgtgttggtcttgaaatatattagccatgaatgcttgaagcgggtattttggtgccaaaacaccttggtccaagcatcaacgtaatcccaataggtataacctaccggatcaaatggaactgaaaatctcttccctttgttcaagtctgaaccaaagtgtcttggttgaagaacttttagtatttggatggttgaatgggtgtttaaggtttggtcttttggatctttgaaatgtttgatagatactgagtttgaatctaccaaaatcaattcataaaaagttcttgtcttcaggatggtggttggtttgtagtgaaatcctggtgggaaagccttggccgtcgccttgaagggatttttgtcccaaaattcaggttccatttgcaaaacagttaacaatttatttttataaatataattgttagtttgtttggtaggtggtgtttgagcttt

SEQ ID NO: 8766 - DNA, 1146 bp, Glycine max
  Gm_smallRNAprecursor_1599
actacaggacaggtagtattgtccagcattaattacacattagttacaaacagacggttttgtgaccgaaattaaatttaatctaaacagataccaaaacaatcatcttcgttttggtaaaagggatcttcttcgtcttcttcaacagaacttgtttcttccttctttgaggatgaagcttcttcttcctgttgtaacatttgtagaacttccttcagatttttagctaagacctcctttgatgtcgatcctgctaaaaatgctgccagatgagacttttggttcaagaacactgaagtctctggatcagccgctttgaggaattctggatgggatttgaaccatagttttacttgttctggatccgctttggatgagtcaaattgtgtccaccattttacaaatgcgtgtctttgtagtgatggatattgatttgtcttttcagtcttgctgtagcgatattgccatgagaatatccatgacagtgcaaagcttgaaaagtatttaagatctgctggaattcgtgattcctgcgaattgtattgtttcttaaattgggaaaatccttgttggaccgtttctgggaatatctctgggattggtccaaagaagtcccaccattgcaaaaaccaattgggaaaattgtaaattgtgttggtcttgaaatatattagccatgaatgcttgaagcgggtattttggtgccaaaacaccttggtccaagcatcaacgtaatcccaataggtataacctaccggatcaaatggaactgaaaatctcttccctttgttcaagtctgaaccaaagtgtcttggttgaagaacttttagtatttggatggttgaatgggtgtttaaggtttggtcttttggatctttgaaatgtttgatagatactgagtttgaatctaccaaaatcaattcataaaaagttcttgtcttcaggatggtggttggtttgtagtgaaatcctggtgggaaagccttggccgtcgccttgaagggatttttgtcccaaaattcaggttccatttgcaaaacagttaacaatttatttttataaatataattgttagtttgtttggtaggtggtgtttgagctttggctaaaggtagttttcctttagtattggtggctgttttggtc

SEQ ID NO: 8767 - DNA, 1080 bp, Glycine max
  Gm_smallRNAprecursor_1600
ttcaacagaacttgtttcttccttctttgaggatgaagcttcttcttcctgttgtaacatttgtagaacttccttcagatttttagctaagacctcctttgatgtcgatcctgctaaaaatgctgccagatgagacttttggttcaagaacactgaagtctctggatcagccgctttgaggaattctggatgggatttgaaccatagttttacttgttctggatccgctttggatgagtcaaattgtgtccaccattttacaaatgcgtgtctttgtagtgatggatattgatttgtcttttcagtcttgctgtagcgatattgccatgagaatatccatgacagtgcaaagcttgaaaagtatttaagatctgctggaattcgtgattcctgcgaattgtattgtttcttaaattgggaaaatccttgttggaccgtttctgggaatatctctgggattggtccaaagaagtcccaccattgcaaaaaccaattgggaaaattgtaaattgtgttggtcttgaaatatattagccatgaatgcttgaagcgggtattttggtgccaaaacaccttggtccaagcatcaacgtaatcccaataggtataacctaccggatcaaatggaactgaaaatctcttccctttgttcaagtctgaaccaaagtgtcttggttgaagaacttttagtatttggatggttgaatgggtgtttaaggtttggtcttttggatctttgaaatgtttgatagatactgagtttgaatctaccaaaatcaattcataaaaagttcttgtcttcaggatggtggttggtttgtagtgaaatcctggtgggaaagccttggccgtcgccttgaagggatttttgtcccaaaattcaggttccatttgcaaaacagttaacaatttatttttataaatataattgttagtttgtttggtaggtggtgtttgagctttggctaaaggtagttttcctttagtattggtggctgttttggtcattgacgcattttggatcattgtttgtaaatttgattcagattcatcatcagattctgaggcaatgtctgccca

SEQ ID NO: 8768 - DNA, 1104 bp, Glycine max
  Gm_smallRNAprecursor_1601
ttcaacagaacttgtttcttccttctttgaggatgaagcttcttcttcctgttgtaacatttgtagaacttccttcagatttttagctaagacctcctttgatgtcgatcctgctaaaaatgctgccagatgagacttttggttcaagaacactgaagtctctggatcagccgctttgaggaattctggatgggatttgaaccatagttttacttgttctggatccgctttggatgagtcaaattgtgtccaccattttacaaatgcgtgtctttgtagtgatggatattgatttgtcttttcagtcttgctgtagcgatattgccatgagaatatccatgacagtgcaaagcttgaaaagtatttaagatctgctggaattcgtgattcctgcgaattgtattgtttcttaaattgggaaaatccttgttggaccgtttctgggaatatctctgggattggtccaaagaagtcccaccattgcaaaaaccaattgggaaaattgtaaattgtgttggtcttgaaatatattagccatgaatgcttgaagcgggtattttggtgccaaaacaccttggtccaagcatcaacgtaatcccaataggtataacctaccggatcaaatggaactgaaaatctcttccctttgttcaagtctgaaccaaagtgtcttggttgaagaacttttagtatttggatggttgaatgggtgtttaaggtttggtcttttggatctttgaaatgtttgatagatactgagtttgaatctaccaaaatcaattcataaaaagttcttgtcttcaggatggtggttggtttgtagtgaaatcctggtgggaaagccttggccgtcgccttgaagggatttttgtcccaaaattcaggttccatttgcaaaacagttaacaatttatttttataaatataattgttagtttgtttggtaggtggtgtttgagctttggctaaaggtagttttcctttagtattggtggctgttttggtcattgacgcattttggatcattgtttgtaaatttgattcagattcatcatcagattctgaggcaatgtctgcccaagattttttgattatttttggaaa

SEQ ID NO: 8769 - DNA, 1140 bp, Glycine max
  Gm_smallRNAprecursor_1602
tttttagctaagacctcctttgatgtcgatcctgctaaaaatgctgccagatgagacttttggttcaagaacactgaagtctctggatcagccgctttgaggaattctggatgggatttgaaccatagttttacttgttctggatccgctttggatgagtcaaattgtgtccaccattttacaaatgcgtgtctttgtagtgatggatattgatttgtcttttcagtcttgctgtagcgatattgccatgagaatatccatgacagtgcaaagcttgaaaagtatttaagatctgctggaattcgtgattcctgcgaattgtattgtttcttaaattgggaaaatccttgttggaccgtttctgggaatatctctgggattggtccaaagaagtcccaccattgcaaaaaccaattgggaaaattgtaaattgtgttggtcttgaaatatattagccatgaatgcttgaagcgggtattttggtgccaaaacaccttggtccaagcatcaacgtaatcccaataggtataacctaccggatcaaatggaactgaaaatctcttccctttgttcaagtctgaaccaaagtgtcttggttgaagaacttttagtatttggatggttgaatgggtgtttaaggtttggtcttttggatctttgaaatgtttgatagatactgagtttgaatctaccaaaatcaattcataaaaagttcttgtcttcaggatggtggttggtttgtagtgaaatcctggtgggaaagccttggccgtcgccttgaagggatttttgtcccaaaattcaggttccatttgcaaaacagttaacaatttatttttataaatataattgttagtttgtttggtaggtggtgtttgagctttggctaaaggtagttttcctttagtattggtggctgttttggtcattgacgcattttggatcattgtttgtaaatttgattcagattcatcatcagattctgaggcaatgtctgcccaagattttttgattatttttggaaatttggtcagacccatgtcttgaagggcctgaagggtttcaattggccaagcatagtcggccgatgtttgtttggcggttgccggtttgggagattcctgagtggatggctcaggt

SEQ ID NO: 8770 - DNA, 1224 bp, Glycine max
  Gm_smallRNAprecursor_1603
cgctttgaggaattctggatgggatttgaaccatagttttacttgttctggatccgctttggatgagtcaaattgtgtccaccattttacaaatgcgtgtctttgtagtgatggatattgatttgtcttttcagtcttgctgtagcgatattgccatgagaatatccatgacagtgcaaagcttgaaaagtatttaagatctgctggaattcgtgattcctgcgaattgtattgtttcttaaattgggaaaatccttgttggaccgtttctgggaatatctctgggattggtccaaagaagtcccaccattgcaaaaaccaattgggaaaattgtaaattgtgttggtcttgaaatatattagccatgaatgcttgaagcgggtattttggtgccaaaacaccttggtccaagcatcaacgtaatcccaataggtataacctaccggatcaaatggaactgaaaatctcttccctttgttcaagtctgaaccaaagtgtcttggttgaagaacttttagtatttggatggttgaatgggtgtttaaggtttggtcttttggatctttgaaatgtttgatagatactgagtttgaatctaccaaaatcaattcataaaaagttcttgtcttcaggatggtggttggtttgtagtgaaatcctggtgggaaagccttggccgtcgccttgaagggatttttgtcccaaaattcaggttccatttgcaaaacagttaacaatttatttttataaatataattgttagtttgtttggtaggtggtgtttgagctttggctaaaggtagttttcctttagtattggtggctgttttggtcattgacgcattttggatcattgtttgtaaatttgattcagattcatcatcagattctgaggcaatgtctgcccaagattttttgattatttttggaaatttggtcagacccatgtcttgaagggcctgaagggtttcaattggccaagcatagtcggccgatgtttgtttggcggttgccggtttgggagattcctgagtggatggctcaggtttgattgaggcaatctgggttgatgacccttctaaattggttttctgggtagatgacccagcctgggttggtgacccagaagaggtagatgatttcttcatggttggttctggaagagccagcctggctcctttgcctgtactccttcctccccgtagggagattcccgatgcctt

SEQ ID NO: 8771 - DNA, 1222 bp, Glycine max
  Gm_smallRNAprecursor_1604
ctttgaggaattctggatgggatttgaaccatagttttacttgttctggatccgctttggatgagtcaaattgtgtccaccattttacaaatgcgtgtctttgtagtgatggatattgatttgtcttttcagtcttgctgtagcgatattgccatgagaatatccatgacagtgcaaagcttgaaaagtatttaagatctgctggaattcgtgattcctgcgaattgtattgtttcttaaattgggaaaatccttgttggaccgtttctgggaatatctctgggattggtccaaagaagtcccaccattgcaaaaaccaattgggaaaattgtaaattgtgttggtcttgaaatatattagccatgaatgcttgaagcgggtattttggtgccaaaacaccttggtccaagcatcaacgtaatcccaataggtataacctaccggatcaaatggaactgaaaatctcttccctttgttcaagtctgaaccaaagtgtcttggttgaagaacttttagtatttggatggttgaatgggtgtttaaggtttggtcttttggatctttgaaatgtttgatagatactgagtttgaatctaccaaaatcaattcataaaaagttcttgtcttcaggatggtggttggtttgtagtgaaatcctggtgggaaagccttggccgtcgccttgaagggatttttgtcccaaaattcaggttccatttgcaaaacagttaacaatttatttttataaatataattgttagtttgtttggtaggtggtgtttgagctttggctaaaggtagttttcctttagtattggtggctgttttggtcattgacgcattttggatcattgtttgtaaatttgattcagattcatcatcagattctgaggcaatgtctgcccaagattttttgattatttttggaaatttggtcagacccatgtcttgaagggcctgaagggtttcaattggccaagcatagtcggccgatgtttgtttggcggttgccggtttgggagattcctgagtggatggctcaggtttgattgaggcaatctgggttgatgacccttctaaattggttttctgggtagatgacccagcctgggttggtgacccagaagaggtagatgatttcttcatggttggttctggaagagccagcctggctcctttgcctgtactccttcctccccgtagggagattcccgatgcctt

SEQ ID NO: 8772 - DNA, 1058 bp, Glycine max
  Gm_smallRNAprecursor_1605
tacttgttctggatccgctttggatgagtcaaattgtgtccaccattttacaaatgcgtgtctttgtagtgatggatattgatttgtcttttcagtcttgctgtagcgatattgccatgagaatatccatgacagtgcaaagcttgaaaagtatttaagatctgctggaattcgtgattcctgcgaattgtattgtttcttaaattgggaaaatccttgttggaccgtttctgggaatatctctgggattggtccaaagaagtcccaccattgcaaaaaccaattgggaaaattgtaaattgtgttggtcttgaaatatattagccatgaatgcttgaagcgggtattttggtgccaaaacaccttggtccaagcatcaacgtaatcccaataggtataacctaccggatcaaatggaactgaaaatctcttccctttgttcaagtctgaaccaaagtgtcttggttgaagaacttttagtatttggatggttgaatgggtgtttaaggtttggtcttttggatctttgaaatgtttgatagatactgagtttgaatctaccaaaatcaattcataaaaagttcttgtcttcaggatggtggttggtttgtagtgaaatcctggtgggaaagccttggccgtcgccttgaagggatttttgtcccaaaattcaggttccatttgcaaaacagttaacaatttatttttataaatataattgttagtttgtttggtaggtggtgtttgagctttggctaaaggtagttttcctttagtattggtggctgttttggtcattgacgcattttggatcattgtttgtaaatttgattcagattcatcatcagattctgaggcaatgtctgcccaagattttttgattatttttggaaatttggtcagacccatgtcttgaagggcctgaagggtttcaattggccaagcatagtcggccgatgtttgtttggcggttgccggtttgggagattcctgagtggatggctcaggtttgattgaggcaatctgggttgatgacccttctaaattggttttctggg

SEQ ID NO: 8773 - DNA, 1183 bp, Glycine max
  Gm_smallRNAprecursor_1606
tacttgttctggatccgctttggatgagtcaaattgtgtccaccattttacaaatgcgtgtctttgtagtgatggatattgatttgtcttttcagtcttgctgtagcgatattgccatgagaatatccatgacagtgcaaagcttgaaaagtatttaagatctgctggaattcgtgattcctgcgaattgtattgtttcttaaattgggaaaatccttgttggaccgtttctgggaatatctctgggattggtccaaagaagtcccaccattgcaaaaaccaattgggaaaattgtaaattgtgttggtcttgaaatatattagccatgaatgcttgaagcgggtattttggtgccaaaacaccttggtccaagcatcaacgtaatcccaataggtataacctaccggatcaaatggaactgaaaatctcttccctttgttcaagtctgaaccaaagtgtcttggttgaagaacttttagtatttggatggttgaatgggtgtttaaggtttggtcttttggatctttgaaatgtttgatagatactgagtttgaatctaccaaaatcaattcataaaaagttcttgtcttcaggatggtggttggtttgtagtgaaatcctggtgggaaagccttggccgtcgccttgaagggatttttgtcccaaaattcaggttccatttgcaaaacagttaacaatttatttttataaatataattgttagtttgtttggtaggtggtgtttgagctttggctaaaggtagttttcctttagtattggtggctgttttggtcattgacgcattttggatcattgtttgtaaatttgattcagattcatcatcagattctgaggcaatgtctgcccaagattttttgattatttttggaaatttggtcagacccatgtcttgaagggcctgaagggtttcaattggccaagcatagtcggccgatgtttgtttggcggttgccggtttgggagattcctgagtggatggctcaggtttgattgaggcaatctgggttgatgacccttctaaattggttttctgggtagatgacccagcctgggttggtgacccagaagaggtagatgatttcttcatggttggttctggaagagccagcctggctcctttgcctgtactccttcctccccgtagggagattcccgatgcc

SEQ ID NO: 8774 - DNA, 1098 bp, Glycine max
  Gm_smallRNAprecursor_1607
gtgtctttgtagtgatggatattgatttgtcttttcagtcttgctgtagcgatattgccatgagaatatccatgacagtgcaaagcttgaaaagtatttaagatctgctggaattcgtgattcctgcgaattgtattgtttcttaaattgggaaaatccttgttggaccgtttctgggaatatctctgggattggtccaaagaagtcccaccattgcaaaaaccaattgggaaaattgtaaattgtgttggtcttgaaatatattagccatgaatgcttgaagcgggtattttggtgccaaaacaccttggtccaagcatcaacgtaatcccaataggtataacctaccggatcaaatggaactgaaaatctcttccctttgttcaagtctgaaccaaagtgtcttggttgaagaacttttagtatttggatggttgaatgggtgtttaaggtttggtcttttggatctttgaaatgtttgatagatactgagtttgaatctaccaaaatcaattcataaaaagttcttgtcttcaggatggtggttggtttgtagtgaaatcctggtgggaaagccttggccgtcgccttgaagggatttttgtcccaaaattcaggttccatttgcaaaacagttaacaatttatttttataaatataattgttagtttgtttggtaggtggtgtttgagctttggctaaaggtagttttcctttagtattggtggctgttttggtcattgacgcattttggatcattgtttgtaaatttgattcagattcatcatcagattctgaggcaatgtctgcccaagattttttgattatttttggaaatttggtcagacccatgtcttgaagggcctgaagggtttcaattggccaagcatagtcggccgatgtttgtttggcggttgccggtttgggagattcctgagtggatggctcaggtttgattgaggcaatctgggttgatgacccttctaaattggttttctgggtagatgacccagcctgggttggtgacccagaagaggtagatgatttcttcatggttggttctggaagagccagcctggctcctttgcctgtactcct

SEQ ID NO: 8775 - DNA, 1090 bp, Glycine max
  Gm_smallRNAprecursor_1608
gcgaattgtattgtttcttaaattgggaaaatccttgttggaccgtttctgggaatatctctgggattggtccaaagaagtcccaccattgcaaaaaccaattgggaaaattgtaaattgtgttggtcttgaaatatattagccatgaatgcttgaagcgggtattttggtgccaaaacaccttggtccaagcatcaacgtaatcccaataggtataacctaccggatcaaatggaactgaaaatctcttccctttgttcaagtctgaaccaaagtgtcttggttgaagaacttttagtatttggatggttgaatgggtgtttaaggtttggtcttttggatctttgaaatgtttgatagatactgagtttgaatctaccaaaatcaattcataaaaagttcttgtcttcaggatggtggttggtttgtagtgaaatcctggtgggaaagccttggccgtcgccttgaagggatttttgtcccaaaattcaggttccatttgcaaaacagttaacaatttatttttataaatataattgttagtttgtttggtaggtggtgtttgagctttggctaaaggtagttttcctttagtattggtggctgttttggtcattgacgcattttggatcattgtttgtaaatttgattcagattcatcatcagattctgaggcaatgtctgcccaagattttttgattatttttggaaatttggtcagacccatgtcttgaagggcctgaagggtttcaattggccaagcatagtcggccgatgtttgtttggcggttgccggtttgggagattcctgagtggatggctcaggtttgattgaggcaatctgggttgatgacccttctaaattggttttctgggtagatgacccagcctgggttggtgacccagaagaggtagatgatttcttcatggttggttctggaagagccagcctggctcctttgcctgtactccttcctccccgtagggagattcccgatgccttaggaggcattaccacttttttgtaggaattcacgggtaaggtagtcaggtaatgaatttgaggtgcccttgatgtattctatgtcaa

SEQ ID NO: 8776 - DNA, 1113 bp, Glycine max
  Gm_smallRNAprecursor_1609
ggaaatttggtcagacccatgtcttgaagggcctgaagggtttcaattggccaagcatagtcggccgatgtttgtttggcggttgccggtttgggagattcctgagtggatggctcaggtttgattgaggcaatctgggttgatgacccttctaaattggttttctgggtagatgacccagcctgggttggtgacccagaagaggtagatgatttcttcatggttggttctggaagagccagcctggctcctttgcctgtactccttcctccccgtagggagattcccgatgccttaggaggcattaccacttttttgtaggaattcacgggtaaggtagtcaggtaatgaatttgaggtgcccttgatgtattctatgtcaaaatcaaagacacttaaaattgcttgccatcgtgcaaaaatttgttttgaggcaaggttttttacatctttttgtaaaatatctttggctgatttacaatcaaccctgattaaaaatttttggtttaataaatccgattgaaatttggaaatgcacaaaacaattgctaaaacttcttttttaacagttgaatattttaattgtgcaggattccaatgttttgatgtatatgcaatgacatgatcttggccatggactctttgtttgaggatgccaccataacctatgtctgaagcatctgtttcgacaattttaaatgcctgtggaataggaagatacagacatttaatggattggactttgactttgatttctttaaccgtttgtgtatggaggtcagaccaaggaggcggatttttcttcagcctatcatgtaatggcttgacaatattatttaaataggggacaaattctcctacgtaatttagacaacctagaaatctttgtaactgggttttgtctaagatttggttggggaatttgctagcaaactctattgacctttcgattggaatgattgtaccctgatatatattgtgaccaaggaatcgaattcgagtttggaaaagattgatttttgatttggagactgccaaaccattttgtttgatgatatgtatgaaggtttggagatgtttgaaatgttggtcaatgttttgggaaaagattaa

SEQ ID NO: 8777 - DNA, 1113 bp, Glycine max; identical to SEQ ID NO: 8776
  Gm_smallRNAprecursor_1610

SEQ ID NO: 8778 - DNA, 1114 bp, Glycine max
  Gm_smallRNAprecursor_1611
ggaaatttggtcagacccatgtcttgaagggcctgaagggtttcaattggccaagcatagtcggccgatgtttgtttggcggttgccggtttgggagattcctgagtggatggctcaggtttgattgaggcaatctgggttgatgacccttctaaattggttttctgggtagatgacccagcctgggttggtgacccagaagaggtagatgatttcttcatggttggttctggaagagccagcctggctcctttgcctgtactccttcctccccgtagggagattcccgatgccttaggaggcattaccacttttttgtaggaattcacgggtaaggtagtcaggtaatgaatttgaggtgcccttgatgtattctatgtcaaaatcaaagacacttaaaattgcttgccatcgtgcaaaaatttgttttgaggcaaggttttttacatctttttgtaaaatatctttggctgatttacaatcaaccctgattaaaaatttttggtttaataaatccgattgaaatttggaaatgcacaaaacaattgctaaaacttcttttttaacagttgaatattttaattgtgcaggattccaatgttttgatgtatatgcaatgacatgatcttggccatggactctttgtttgaggatgccaccataacctatgtctgaagcatctgtttcgacaattttaaatgcctgtggaataggaagatacagacatttaatggattggactttgactttgatttctttaaccgtttgtgtatggaggtcagaccaaggaggcggatttttcttcagcctatcatgtaatggcttgacaatattatttaaataggggacaaattctcctacgtaatttagacaacctagaaatctttgtaactgggttttgtctaagatttggttggggaatttgctagcaaactctattgacctttcgattggaatgattgtaccctgatatatattgtgaccaaggaatcgaattcgagtttggaaaagattgatttttgatttggagactgccaaaccattttgtttgatgatatgtatgaaggtttggagatgtttgaaatgttggtcaatgttttgggaaaagattaaa

SEQ ID NO: 8779 - DNA, 1207 bp, Glycine max
  Gm_smallRNAprecursor_1612
ggaaatttggtcagacccatgtcttgaagggcctgaagggtttcaattggccaagcatagtcggccgatgtttgtttggcggttgccggtttgggagattcctgagtggatggctcaggtttgattgaggcaatctgggttgatgacccttctaaattggttttctgggtagatgacccagcctgggttggtgacccagaagaggtagatgatttcttcatggttggttctggaagagccagcctggctcctttgcctgtactccttcctccccgtagggagattcccgatgccttaggaggcattaccacttttttgtaggaattcacgggtaaggtagtcaggtaatgaatttgaggtgcccttgatgtattctatgtcaaaatcaaagacacttaaaattgcttgccatcgtgcaaaaatttgttttgaggcaaggttttttacatctttttgtaaaatatctttggctgatttacaatcaaccctgattaaaaatttttggtttaataaatccgattgaaatttggaaatgcacaaaacaattgctaaaacttcttttttaacagttgaatattttaattgtgcaggattccaatgttttgatgtatatgcaatgacatgatcttggccatggactctttgtttgaggatgccaccataacctatgtctgaagcatctgtttcgacaattttaaatgcctgtggaataggaagatacagacatttaatggattggactttgactttgatttctttaaccgtttgtgtatggaggtcagaccaaggaggcggatttttcttcagcctatcatgtaatggcttgacaatattatttaaataggggacaaattctcctacgtaatttagacaacctagaaatctttgtaactgggttttgtctaagatttggttggggaatttgctagcaaactctattgacctttcgattggaatgattgtaccctgatatatattgtgaccaaggaatcgaattcgagtttggaaaagattgatttttgatttggagactgccaaaccattttgtttgatgatatgtatgaaggtttggagatgtttgaaatgttggtcaatgttttgggaaaagattaaaacatcatctatgtagacaatgacaaattttgaataaggattgaaaatatcattcataattttttgaaattctgaaggggcattcttcagcccg

SEQ ID NO: 8780 - DNA, 1035 bp, Glycine max
  Gm_smallRNAprecursor_1613
gcggttgccggtttgggagattcctgagtggatggctcaggtttgattgaggcaatctgggttgatgacccttctaaattggttttctgggtagatgacccagcctgggttggtgacccagaagaggtagatgatttcttcatggttggttctggaagagccagcctggctcctttgcctgtactccttcctccccgtagggagattcccgatgccttaggaggcattaccacttttttgtaggaattcacgggtaaggtagtcaggtaatgaatttgaggtgcccttgatgtattctatgtcaaaatcaaagacacttaaaattgcttgccatcgtgcaaaaatttgttttgaggcaaggttttttacatctttttgtaaaatatctttggctgatttacaatcaaccctgattaaaaatttttggtttaataaatccgattgaaatttggaaatgcacaaaacaattgctaaaacttcttttttaacagttgaatattttaattgtgcaggattccaatgttttgatgtatatgcaatgacatgatcttggccatggactctttgtttgaggatgccaccataacctatgtctgaagcatctgtttcgacaattttaaatgcctgtggaataggaagatacagacatttaatggattggactttgactttgatttctttaaccgtttgtgtatggaggtcagaccaaggaggcggatttttcttcagcctatcatgtaatggcttgacaatattatttaaataggggacaaattctcctacgtaatttagacaacctagaaatctttgtaactgggttttgtctaagatttggttggggaatttgctagcaaactctattgacctttcgattggaatgattgtaccctgatatatattgtgaccaaggaatcgaattcgagtttggaaaagattgatttttgatttggagactgccaaaccattttgtttgatgatatgtatgaaggtttggagatgtttgaaatgttggtcaatgttttgggaaaagattaa

SEQ ID NO: 8781 - DNA, 1234 bp, Glycine max
  Gm_smallRNAprecursor_1614
aatcaaccctgattaaaaatttttggtttaataaatccgattgaaatttggaaatgcacaaaacaattgctaaaacttcttttttaacagttgaatattttaattgtgcaggattccaatgttttgatgtatatgcaatgacatgatcttggccatggactctttgtttgaggatgccaccataacctatgtctgaagcatctgtttcgacaattttaaatgcctgtggaataggaagatacagacatttaatggattggactttgactttgatttctttaaccgtttgtgtatggaggtcagaccaaggaggcggatttttcttcagcctatcatgtaatggcttgacaatattatttaaataggggacaaattctcctacgtaatttagacaacctagaaatctttgtaactgggttttgtctaagatttggttggggaatttgctagcaaactctattgacctttcgattggaatgattgtaccctgatatatattgtgaccaaggaatcgaattcgagtttggaaaagattgatttttgatttggagactgccaaaccattttgtttgatgatatgtatgaaggtttggagatgtttgaaatgttggtcaatgttttgggaaaagattaaaacatcatctatgtagacaatgacaaattttgaataaggattgaaaatatcattcataattttttgaaattctgaaggggcattcttcagcccgaatggcatcacgttccattcatattgcccgaaaggtacagtaaacgctgttttgtacctgtctgattcttggatttggatttgccaaaatccagatttcatatcaaattttgaaaatatcttcgcagaatttaatctgttaagcaaatcttttttgtttggaataggatatctaatccattgtaatgcttgatttaatggtttgtaatttatgactaagcggggtgttccacgctcaatctcagattgtttgttaacataaaaagccgcacaagaccatgggcttttgcttttccggattaggcctttatcaagcaaatccttgatttccttttgacagtattgaagaagttcttcattcatttggattggtctggcttttgtgggaatttgtttttccctaaagtctttctcataagggagatcgacaatatgtttctttctgtcccaaaatgcatgtggcaattcagaacaaacggtcgattcaatatgatttaataaagattg

SEQ ID NO: 8782 - DNA, 1061 bp, Glycine max
  Gm_smallRNAprecursor_1615
tatttaaataggggacaaattctcctacgtaatttagacaacctagaaatctttgtaactgggttttgtctaagatttggttggggaatttgctagcaaactctattgacctttcgattggaatgattgtaccctgatatatattgtgaccaaggaatcgaattcgagtttggaaaagattgatttttgatttggagactgccaaaccattttgtttgatgatatgtatgaaggtttggagatgtttgaaatgttggtcaatgttttgggaaaagattaaaacatcatctatgtagacaatgacaaattttgaataaggattgaaaatatcattcataattttttgaaattctgaaggggcattcttcagcccgaatggcatcacgttccattcatattgcccgaaaggtacagtaaacgctgttttgtacctgtctgattcttggatttggatttgccaaaatccagatttcatatcaaattttgaaaatatcttcgcagaatttaatctgttaagcaaatcttttttgtttggaataggatatctaatccattgtaatgcttgatttaatggtttgtaatttatgactaagcggggtgttccacgctcaatctcagattgtttgttaacataaaaagccgcacaagaccatgggcttttgcttttccggattaggcctttatcaagcaaatccttgatttccttttgacagtattgaagaagttcttcattcatttggattggtctggcttttgtgggaatttgtttttccctaaagtctttctcataagggagatcgacaatatgtttctttctgtcccaaaatgcatgtggcaattcagaacaaacggtcgattcaatatgatttaataaagattgaattctttcttttacttggggttttcctagttgtatctgaatattattaaaagatacttcttcttttaagaagttaatttgattaatcttattttctataaggtttatatttctagaaattggtttagtagaaaaattaaatataatttttcttcctaaataatttgtggttattccttca

SEQ ID NO: 8783 - DNA, 1127 bp, Glycine max
  Gm_smallRNAprecursor_1616
ggacaaattctcctacgtaatttagacaacctagaaatctttgtaactgggttttgtctaagatttggttggggaatttgctagcaaactctattgacctttcgattggaatgattgtaccctgatatatattgtgaccaaggaatcgaattcgagtttggaaaagattgatttttgatttggagactgccaaaccattttgtttgatgatatgtatgaaggtttggagatgtttgaaatgttggtcaatgttttgggaaaagattaaaacatcatctatgtagacaatgacaaattttgaataaggattgaaaatatcattcataattttttgaaattctgaaggggcattcttcagcccgaatggcatcacgttccattcatattgcccgaaaggtacagtaaacgctgttttgtacctgtctgattcttggatttggatttgccaaaatccagatttcatatcaaattttgaaaatatcttcgcagaatttaatctgttaagcaaatcttttttgtttggaataggatatctaatccattgtaatgcttgatttaatggtttgtaatttatgactaagcggggtgttccacgctcaatctcagattgtttgttaacataaaaagccgcacaagaccatgggcttttgcttttccggattaggcctttatcaagcaaatccttgatttccttttgacagtattgaagaagttcttcattcatttggattggtctggcttttgtgggaatttgtttttccctaaagtctttctcataagggagatcgacaatatgtttctttctgtcccaaaatgcatgtggcaattcagaacaaacggtcgattcaatatgatttaataaagattgaattctttcttttacttggggttttcctagttgtatctgaatattattaaaagatacttcttcttttaagaagttaatttgattaatcttattttctataaggtttatatttctagaaattggtttagtagaaaaattaaatataatttttcttcctaaataatttgtggttattccttcattggatatttggatgggaaacagggctctaatgaagggcgttcctaagattacttcattcttaaggttttttaccaga

SEQ ID NO: 8784 - DNA, 1159 bp, Glycine max
  Gm_smallRNAprecursor_1617
acccatctttcgggaagagttacttcatcccattttatttttcttgggagagacacgttagcctttgtcatatcagtgataaacaaggttgtttctcctttttgaggttttaacaggactctagatgcacaagtattcatgaccttgtactggatcctataaattaaggctgctgggattgatccttctttcatgtcaaggccatgaaagtggatgtttaagaacatagagtcaagaatgtttctgtccatcagactcactgttttgtttggataacaattaaaatatattggaccttgtcctaagctggtttcgactgttccaattagggagtcttcgaattgattatgcctaatatctcttagacacattaaaactgctgcatctatgcccatatcaattaagggcttgatggctacttgtacacaaccgatgtgtaaatatttatacttacggctatgctcataaattgaattttttgaaagtagatgaaattcttcccctatatcttgtcctagaggaatattgttttctactgttttgattatgtaatcaaagttgtgtttgtctttaattgtttcaggaacgtatagttgatcctgagggatttctggaatgttccagtcatccatgttttgattaatatcttcgaatcggacttcctcatcgaagagattgtgttttggggcgacctcttgggtctggttatcttgatcacttaagagattggtgtttcttgaagaagatgaagaggaggaattcgagcgaaaagaaatacgggaaaacgatcgcaataatctagacatgattaaaacattctctaatatctttgccctcatttggttccataggaatctttccgtaaggctatatgttacagaacttcttggatctgaataaatggaaaagaagattttttttttttttaatacagacaatatagtttgaacattactcctatagccaccagtatattatgtctcaatattttatttgaacaatacaccttagccttactgccctttctcatccacgggacttactgctacagtatcattcaactaaaatatcagactgctgtgcttccagaaaatactgttcaaacacatactgtttaaattaaaattactgtacatgctttagatccataagttcagtt

SEQ ID NO: 8785 - DNA, 1224 bp, Glycine max
  Gm_smallRNAprecursor_1618
gctatgctcataaattgaattttttgaaagtagatgaaattcttcccctatatcttgtcctagaggaatattgttttctactgttttgattatgtaatcaaagttgtgtttgtctttaattgtttcaggaacgtatagttgatcctgagggatttctggaatgttccagtcatccatgttttgattaatatcttcgaatcggacttcctcatcgaagagattgtgttttggggcgacctcttgggtctggttatcttgatcacttaagagattggtgtttcttgaagaagatgaagaggaggaattcgagcgaaaagaaatacgggaaaacgatcgcaataatctagacatgattaaaacattctctaatatctttgccctcatttggttccataggaatctttccgtaaggctatatgttacagaacttcttggatctgaataaatggaaaagaagattttttttttttttaatacagacaatatagtttgaacattactcctatagccaccagtatattatgtctcaatattttatttgaacaatacaccttagccttactgccctttctcatccacgggacttactgctacagtatcattcaactaaaatatcagactgctgtgcttccagaaaatactgttcaaacacatactgtttaaattaaaattactgtacatgctttagatccataagttcagttaacatatgcccttacggacactattcctacttccccatcaggctctgataccagaggtcagcggagtaggatcaaacggacagataggaagtaagaatgcagtatgattaatgaaatgaaaatataaacttgaaaacagatatcaaggtcacaccggagaccggcttacaaaacccaggttttcataaacaaagaaaccgaagcggcggcagagccgcacaggatcggtgaagggagaagagagaagaatgaaaaacagaaatttattgaatctagaaagaagcgcttacaaaaatcttgtttcagagcacctctcttccgaaacctgaaaaatgactaaatgaaagggtgcctcacaacatgcttgaggactccttatatagccaaatatctaagaccggtagttgccggtagttttgaccgggactatttgactgtttgttacaagacaagtagttttgaccgggactttaatgactacaggacaggtagtattgtccagcattaattacacattagt

SEQ ID NO: 8786 - DNA, 1199 bp, Glycine max
  Gm_smallRNAprecursor_1619
gaacaatacaccttagccttactgccctttctcatccacgggacttactgctacagtatcattcaactaaaatatcagactgctgtgcttccagaaaatactgttcaaacacatactgtttaaattaaaattactgtacatgctttagatccataagttcagttaacatatgcccttacggacactattcctacttccccatcaggctctgataccagaggtcagcggagtaggatcaaacggacagataggaagtaagaatgcagtatgattaatgaaatgaaaatataaacttgaaaacagatatcaaggtcacaccggagaccggcttacaaaacccaggttttcataaacaaagaaaccgaagcggcggcagagccgcacaggatcggtgaagggagaagagagaagaatgaaaaacagaaatttattgaatctagaaagaagcgcttacaaaaatcttgtttcagagcacctctcttccgaaacctgaaaaatgactaaatgaaagggtgcctcacaacatgcttgaggactccttatatagccaaatatctaagaccggtagttgccggtagttttgaccgggactatttgactgtttgttacaagacaagtagttttgaccgggactttaatgactacaggacaggtagtattgtccagcattaattacacattagttacaaacagacggttttgtgaccgaaattaaatttaatctaaacagataccaaaacaatcatcttcgttttggtaaaagggatcttcttcgtcttcttcaacagaacttgtttcttccttctttgaggatgaagcttcttcttcctgttgtaacatttgtagaacttccttcagatttttagctaagacctcctttgatgtcgatcctgctaaaaatgctgccagatgagacttttggttcaagaacactgaagtctctggatcagccgctttgaggaattctggatgggatttgaaccatagttttacttgttctggatccgctttggatgagtcaaattgtgtccaccattttacaaatgcgtgtctttgtagtgatggatattgatttgtcttttcagtcttgctgtagcgatattgccatgagaatatccatgacagtgcaaagcttgaaaagtatttaagatctgctggaattcgtgattcctgcgaattgtattgtttcttaaattggg

SEQ ID NO: 8787 - DNA, 1141 bp, Glycine max
  Gm_smallRNAprecursor_1620
ctgtgcttccagaaaatactgttcaaacacatactgtttaaattaaaattactgtacatgctttagatccataagttcagttaacatatgcccttacggacactattcctacttccccatcaggctctgataccagaggtcagcggagtaggatcaaacggacagataggaagtaagaatgcagtatgattaatgaaatgaaaatataaacttgaaaacagatatcaaggtcacaccggagaccggcttacaaaacccaggttttcataaacaaagaaaccgaagcggcggcagagccgcacaggatcggtgaagggagaagagagaagaatgaaaaacagaaatttattgaatctagaaagaagcgcttacaaaaatcttgtttcagagcacctctcttccgaaacctgaaaaatgactaaatgaaagggtgcctcacaacatgcttgaggactccttatatagccaaatatctaagaccggtagttgccggtagttttgaccgggactatttgactgtttgttacaagacaagtagttttgaccgggactttaatgactacaggacaggtagtattgtccagcattaattacacattagttacaaacagacggttttgtgaccgaaattaaatttaatctaaacagataccaaaacaatcatcttcgttttggtaaaagggatcttcttcgtcttcttcaacagaacttgtttcttccttctttgaggatgaagcttcttcttcctgttgtaacatttgtagaacttccttcagatttttagctaagacctcctttgatgtcgatcctgctaaaaatgctgccagatgagacttttggttcaagaacactgaagtctctggatcagccgctttgaggaattctggatgggatttgaaccatagttttacttgttctggatccgctttggatgagtcaaattgtgtccaccattttacaaatgcgtgtctttgtagtgatggatattgatttgtcttttcagtcttgctgtagcgatattgccatgagaatatccatgacagtgcaaagcttgaaaagtatttaagatctgctggaattcgtgattcctgcgaattgtattgtttcttaaattgggaaaatccttgttggaccgtttctg

SEQ ID NO: 8788 - DNA, 1154 bp, Glycine max
  Gm_smallRNAprecursor_1621
ctgtgcttccagaaaatactgttcaaacacatactgtttaaattaaaattactgtacatgctttagatccataagttcagttaacatatgcccttacggacactattcctacttccccatcaggctctgataccagaggtcagcggagtaggatcaaacggacagataggaagtaagaatgcagtatgattaatgaaatgaaaatataaacttgaaaacagatatcaaggtcacaccggagaccggcttacaaaacccaggttttcataaacaaagaaaccgaagcggcggcagagccgcacaggatcggtgaagggagaagagagaagaatgaaaaacagaaatttattgaatctagaaagaagcgcttacaaaaatcttgtttcagagcacctctcttccgaaacctgaaaaatgactaaatgaaagggtgcctcacaacatgcttgaggactccttatatagccaaatatctaagaccggtagttgccggtagttttgaccgggactatttgactgtttgttacaagacaagtagttttgaccgggactttaatgactacaggacaggtagtattgtccagcattaattacacattagttacaaacagacggttttgtgaccgaaattaaatttaatctaaacagataccaaaacaatcatcttcgttttggtaaaagggatcttcttcgtcttcttcaacagaacttgtttcttccttctttgaggatgaagcttcttcttcctgttgtaacatttgtagaacttccttcagatttttagctaagacctcctttgatgtcgatcctgctaaaaatgctgccagatgagacttttggttcaagaacactgaagtctctggatcagccgctttgaggaattctggatgggatttgaaccatagttttacttgttctggatccgctttggatgagtcaaattgtgtccaccattttacaaatgcgtgtctttgtagtgatggatattgatttgtcttttcagtcttgctgtagcgatattgccatgagaatatccatgacagtgcaaagcttgaaaagtatttaagatctgctggaattcgtgattcctgcgaattgtattgtttcttaaattgggaaaatccttgttggaccgtttctgggaatatctctgg

SEQ ID NO: 8789 - DNA, 1064 bp, Glycine max
  Gm_smallRNAprecursor_1622
cagcggagtaggatcaaacggacagataggaagtaagaatgcagtatgattaatgaaatgaaaatataaacttgaaaacagatatcaaggtcacaccggagaccggcttacaaaacccaggttttcataaacaaagaaaccgaagcggcggcagagccgcacaggatcggtgaagggagaagagagaagaatgaaaaacagaaatttattgaatctagaaagaagcgcttacaaaaatcttgtttcagagcacctctcttccgaaacctgaaaaatgactaaatgaaagggtgcctcacaacatgcttgaggactccttatatagccaaatatctaagaccggtagttgccggtagttttgaccgggactatttgactgtttgttacaagacaagtagttttgaccgggactttaatgactacaggacaggtagtattgtccagcattaattacacattagttacaaacagacggttttgtgaccgaaattaaatttaatctaaacagataccaaaacaatcatcttcgttttggtaaaagggatcttcttcgtcttcttcaacagaacttgtttcttccttctttgaggatgaagcttcttcttcctgttgtaacatttgtagaacttccttcagatttttagctaagacctcctttgatgtcgatcctgctaaaaatgctgccagatgagacttttggttcaagaacactgaagtctctggatcagccgctttgaggaattctggatgggatttgaaccatagttttacttgttctggatccgctttggatgagtcaaattgtgtccaccattttacaaatgcgtgtctttgtagtgatggatattgatttgtcttttcagtcttgctgtagcgatattgccatgagaatatccatgacagtgcaaagcttgaaaagtatttaagatctgctggaattcgtgattcctgcgaattgtattgtttcttaaattgggaaaatccttgttggaccgtttctgggaatatctctgggattggtccaaagaagtcccaccattgcaaaaaccaattgggaaaattgt

SEQ ID NO: 8790 - DNA, 1083 bp, Glycine max
  Gm_smallRNAprecursor_1623
cggagtaggatcaaacggacagataggaagtaagaatgcagtatgattaatgaaatgaaaatataaacttgaaaacagatatcaaggtcacaccggagaccggcttacaaaacccaggttttcataaacaaagaaaccgaagcggcggcagagccgcacaggatcggtgaagggagaagagagaagaatgaaaaacagaaatttattgaatctagaaagaagcgcttacaaaaatcttgtttcagagcacctctcttccgaaacctgaaaaatgactaaatgaaagggtgcctcacaacatgcttgaggactccttatatagccaaatatctaagaccggtagttgccggtagttttgaccgggactatttgactgtttgttacaagacaagtagttttgaccgggactttaatgactacaggacaggtagtattgtccagcattaattacacattagttacaaacagacggttttgtgaccgaaattaaatttaatctaaacagataccaaaacaatcatcttcgttttggtaaaagggatcttcttcgtcttcttcaacagaacttgtttcttccttctttgaggatgaagcttcttcttcctgttgtaacatttgtagaacttccttcagatttttagctaagacctcctttgatgtcgatcctgctaaaaatgctgccagatgagacttttggttcaagaacactgaagtctctggatcagccgctttgaggaattctggatgggatttgaaccatagttttacttgttctggatccgctttggatgagtcaaattgtgtccaccattttacaaatgcgtgtctttgtagtgatggatattgatttgtcttttcagtcttgctgtagcgatattgccatgagaatatccatgacagtgcaaagcttgaaaagtatttaagatctgctggaattcgtgattcctgcgaattgtattgtttcttaaattgggaaaatccttgttggaccgtttctgggaatatctctgggattggtccaaagaagtcccaccattgcaaaaaccaattgggaaaattgtaaattgtgttggtcttgaaata

SEQ ID NO: 8791 - DNA, 1082 bp, Glycine max
  Gm_smallRNAprecursor_1624
ggagtaggatcaaacggacagataggaagtaagaatgcagtatgattaatgaaatgaaaatataaacttgaaaacagatatcaaggtcacaccggagaccggcttacaaaacccaggttttcataaacaaagaaaccgaagcggcggcagagccgcacaggatcggtgaagggagaagagagaagaatgaaaaacagaaatttattgaatctagaaagaagcgcttacaaaaatcttgtttcagagcacctctcttccgaaacctgaaaaatgactaaatgaaagggtgcctcacaacatgcttgaggactccttatatagccaaatatctaagaccggtagttgccggtagttttgaccgggactatttgactgtttgttacaagacaagtagttttgaccgggactttaatgactacaggacaggtagtattgtccagcattaattacacattagttacaaacagacggttttgtgaccgaaattaaatttaatctaaacagataccaaaacaatcatcttcgttttggtaaaagggatcttcttcgtcttcttcaacagaacttgtttcttccttctttgaggatgaagcttcttcttcctgttgtaacatttgtagaacttccttcagatttttagctaagacctcctttgatgtcgatcctgctaaaaatgctgccagatgagacttttggttcaagaacactgaagtctctggatcagccgctttgaggaattctggatgggatttgaaccatagttttacttgttctggatccgctttggatgagtcaaattgtgtccaccattttacaaatgcgtgtctttgtagtgatggatattgatttgtcttttcagtcttgctgtagcgatattgccatgagaatatccatgacagtgcaaagcttgaaaagtatttaagatctgctggaattcgtgattcctgcgaattgtattgtttcttaaattgggaaaatccttgttggaccgtttctgggaatatctctgggattggtccaaagaagtcccaccattgcaaaaaccaattgggaaaattgtaaattgtgttggtcttgaaata

SEQ ID NO: 8792 - DNA, 1081 bp, Glycine max
  Gm_smallRNAprecursor_1625
gagtaggatcaaacggacagataggaagtaagaatgcagtatgattaatgaaatgaaaatataaacttgaaaacagatatcaaggtcacaccggagaccggcttacaaaacccaggttttcataaacaaagaaaccgaagcggcggcagagccgcacaggatcggtgaagggagaagagagaagaatgaaaaacagaaatttattgaatctagaaagaagcgcttacaaaaatcttgtttcagagcacctctcttccgaaacctgaaaaatgactaaatgaaagggtgcctcacaacatgcttgaggactccttatatagccaaatatctaagaccggtagttgccggtagttttgaccgggactatttgactgtttgttacaagacaagtagttttgaccgggactttaatgactacaggacaggtagtattgtccagcattaattacacattagttacaaacagacggttttgtgaccgaaattaaatttaatctaaacagataccaaaacaatcatcttcgttttggtaaaagggatcttcttcgtcttcttcaacagaacttgtttcttccttctttgaggatgaagcttcttcttcctgttgtaacatttgtagaacttccttcagatttttagctaagacctcctttgatgtcgatcctgctaaaaatgctgccagatgagacttttggttcaagaacactgaagtctctggatcagccgctttgaggaattctggatgggatttgaaccatagttttacttgttctggatccgctttggatgagtcaaattgtgtccaccattttacaaatgcgtgtctttgtagtgatggatattgatttgtcttttcagtcttgctgtagcgatattgccatgagaatatccatgacagtgcaaagcttgaaaagtatttaagatctgctggaattcgtgattcctgcgaattgtattgtttcttaaattgggaaaatccttgttggaccgtttctgggaatatctctgggattggtccaaagaagtcccaccattgcaaaaaccaattgggaaaattgtaaattgtgttggtcttgaaata

SEQ ID NO: 8793 - DNA, 1131 bp, Glycine max
  Gm_smallRNAprecursor_1626
acaagtagttttgaccgggactttaatgactacaggacaggtagtattgtccagcattaattacacattagttacaaacagacggttttgtgaccgaaattaaatttaatctaaacagataccaaaacaatcatcttcgttttggtaaaagggatcttcttcgtcttcttcaacagaacttgtttcttccttctttgaggatgaagcttcttcttcctgttgtaacatttgtagaacttccttcagatttttagctaagacctcctttgatgtcgatcctgctaaaaatgctgccagatgagacttttggttcaagaacactgaagtctctggatcagccgctttgaggaattctggatgggatttgaaccatagttttacttgttctggatccgctttggatgagtcaaattgtgtccaccattttacaaatgcgtgtctttgtagtgatggatattgatttgtcttttcagtcttgctgtagcgatattgccatgagaatatccatgacagtgcaaagcttgaaaagtatttaagatctgctggaattcgtgattcctgcgaattgtattgtttcttaaattgggaaaatccttgttggaccgtttctgggaatatctctgggattggtccaaagaagtcccaccattgcaaaaaccaattgggaaaattgtaaattgtgttggtcttgaaatatattagccatgaatgcttgaagcgggtattttggtgccaaaacaccttggtccaagcatcaacgtaatcccaataggtataacctaccggatcaaatggaactgaaaatctcttccctttgttcaagtctgaaccaaagtgtcttggttgaagaacttttagtatttggatggttgaatgggtgtttaaggtttggtcttttggatctttgaaatgtttgatagatactgagtttgaatctaccaaaatcaattcataaaaagttcttgtcttcaggatggtggttggtttgtagtgaaatcctggtgggaaagccttggccgtcgccttgaagggatttttgtcccaaaattcaggttccatctgcaaaacagttaacaatttatttttataaatataattgttagtttgtttggtaggtggtgtttgagcttt

SEQ ID NO: 8794 - DNA, 1146 bp, Glycine max
  Gm_smallRNAprecursor_1627
actacaggacaggtagtattgtccagcattaattacacattagttacaaacagacggttttgtgaccgaaattaaatttaatctaaacagataccaaaacaatcatcttcgttttggtaaaagggatcttcttcgtcttcttcaacagaacttgtttcttccttctttgaggatgaagcttcttcttcctgttgtaacatttgtagaacttccttcagatttttagctaagacctcctttgatgtcgatcctgctaaaaatgctgccagatgagacttttggttcaagaacactgaagtctctggatcagccgctttgaggaattctggatgggatttgaaccatagttttacttgttctggatccgctttggatgagtcaaattgtgtccaccattttacaaatgcgtgtctttgtagtgatggatattgatttgtcttttcagtcttgctgtagcgatattgccatgagaatatccatgacagtgcaaagcttgaaaagtatttaagatctgctggaattcgtgattcctgcgaattgtattgtttcttaaattgggaaaatccttgttggaccgtttctgggaatatctctgggattggtccaaagaagtcccaccattgcaaaaaccaattgggaaaattgtaaattgtgttggtcttgaaatatattagccatgaatgcttgaagcgggtattttggtgccaaaacaccttggtccaagcatcaacgtaatcccaataggtataacctaccggatcaaatggaactgaaaatctcttccctttgttcaagtctgaaccaaagtgtcttggttgaagaacttttagtatttggatggttgaatgggtgtttaaggtttggtcttttggatctttgaaatgtttgatagatactgagtttgaatctaccaaaatcaattcataaaaagttcttgtcttcaggatggtggttggtttgtagtgaaatcctggtgggaaagccttggccgtcgccttgaagggatttttgtcccaaaattcaggttccatctgcaaaacagttaacaatttatttttataaatataattgttagtttgtttggtaggtggtgtttgagctttggctaaaggtagttttcctttagtattggtggctgttttggtc

SEQ ID NO: 8795 - DNA, 1080 bp, Glycine max
  Gm_smallRNAprecursor_1628
ttcaacagaacttgtttcttccttctttgaggatgaagcttcttcttcctgttgtaacatttgtagaacttccttcagatttttagctaagacctcctttgatgtcgatcctgctaaaaatgctgccagatgagacttttggttcaagaacactgaagtctctggatcagccgctttgaggaattctggatgggatttgaaccatagttttacttgttctggatccgctttggatgagtcaaattgtgtccaccattttacaaatgcgtgtctttgtagtgatggatattgatttgtcttttcagtcttgctgtagcgatattgccatgagaatatccatgacagtgcaaagcttgaaaagtatttaagatctgctggaattcgtgattcctgcgaattgtattgtttcttaaattgggaaaatccttgttggaccgtttctgggaatatctctgggattggtccaaagaagtcccaccattgcaaaaaccaattgggaaaattgtaaattgtgttggtcttgaaatatattagccatgaatgcttgaagcgggtattttggtgccaaaacaccttggtccaagcatcaacgtaatcccaataggtataacctaccggatcaaatggaactgaaaatctcttccctttgttcaagtctgaaccaaagtgtcttggttgaagaacttttagtatttggatggttgaatgggtgtttaaggtttggtcttttggatctttgaaatgtttgatagatactgagtttgaatctaccaaaatcaattcataaaaagttcttgtcttcaggatggtggttggtttgtagtgaaatcctggtgggaaagccttggccgtcgccttgaagggatttttgtcccaaaattcaggttccatctgcaaaacagttaacaatttatttttataaatataattgttagtttgtttggtaggtggtgtttgagctttggctaaaggtagttttcctttagtattggtggctgttttggtcattgacgcattttggatcattgtttgtaaatttgattcagattcatcatcagattctgaggcaatgtctgccca

SEQ ID NO: 8796 - DNA, 1104 bp, Glycine max
  Gm_smallRNAprecursor_1629
ttcaacagaacttgtttcttccttctttgaggatgaagcttcttcttcctgttgtaacatttgtagaacttccttcagatttttagctaagacctcctttgatgtcgatcctgctaaaaatgctgccagatgagacttttggttcaagaacactgaagtctctggatcagccgctttgaggaattctggatgggatttgaaccatagttttacttgttctggatccgctttggatgagtcaaattgtgtccaccattttacaaatgcgtgtctttgtagtgatggatattgatttgtcttttcagtcttgctgtagcgatattgccatgagaatatccatgacagtgcaaagcttgaaaagtatttaagatctgctggaattcgtgattcctgcgaattgtattgtttcttaaattgggaaaatccttgttggaccgtttctgggaatatctctgggattggtccaaagaagtcccaccattgcaaaaaccaattgggaaaattgtaaattgtgttggtcttgaaatatattagccatgaatgcttgaagcgggtattttggtgccaaaacaccttggtccaagcatcaacgtaatcccaataggtataacctaccggatcaaatggaactgaaaatctcttccctttgttcaagtctgaaccaaagtgtcttggttgaagaacttttagtatttggatggttgaatgggtgtttaaggtttggtcttttggatctttgaaatgtttgatagatactgagtttgaatctaccaaaatcaattcataaaaagttcttgtcttcaggatggtggttggtttgtagtgaaatcctggtgggaaagccttggccgtcgccttgaagggatttttgtcccaaaattcaggttccatctgcaaaacagttaacaatttatttttataaatataattgttagtttgtttggtaggtggtgtttgagctttggctaaaggtagttttcctttagtattggtggctgttttggtcattgacgcattttggatcattgtttgtaaatttgattcagattcatcatcagattctgaggcaatgtctgcccaagattttttgattatttttggaaa

SEQ ID NO: 8797 - DNA, 1140 bp, Glycine max
  Gm_smallRNAprecursor_1630
tttttagctaagacctcctttgatgtcgatcctgctaaaaatgctgccagatgagacttttggttcaagaacactgaagtctctggatcagccgctttgaggaattctggatgggatttgaaccatagttttacttgttctggatccgctttggatgagtcaaattgtgtccaccattttacaaatgcgtgtctttgtagtgatggatattgatttgtcttttcagtcttgctgtagcgatattgccatgagaatatccatgacagtgcaaagcttgaaaagtatttaagatctgctggaattcgtgattcctgcgaattgtattgtttcttaaattgggaaaatccttgttggaccgtttctgggaatatctctgggattggtccaaagaagtcccaccattgcaaaaaccaattgggaaaattgtaaattgtgttggtcttgaaatatattagccatgaatgcttgaagcgggtattttggtgccaaaacaccttggtccaagcatcaacgtaatcccaataggtataacctaccggatcaaatggaactgaaaatctcttccctttgttcaagtctgaaccaaagtgtcttggttgaagaacttttagtatttggatggttgaatgggtgtttaaggtttggtcttttggatctttgaaatgtttgatagatactgagtttgaatctaccaaaatcaattcataaaaagttcttgtcttcaggatggtggttggtttgtagtgaaatcctggtgggaaagccttggccgtcgccttgaagggatttttgtcccaaaattcaggttccatctgcaaaacagttaacaatttatttttataaatataattgttagtttgtttggtaggtggtgtttgagctttggctaaaggtagttttcctttagtattggtggctgttttggtcattgacgcattttggatcattgtttgtaaatttgattcagattcatcatcagattctgaggcaatgtctgcccaagattttttgattatttttggaaatttggtcagacccatgtcttgaagggcctgaagggtttcaattggccaagcatagtcggccgatgtttgtttggcggttgccggtttgggagattcctgagtggatggctcaggt

SEQ ID NO: 8798 - DNA, 1224 bp, Glycine max
  Gm_smallRNAprecursor_1631
cgctttgaggaattctggatgggatttgaaccatagttttacttgttctggatccgctttggatgagtcaaattgtgtccaccattttacaaatgcgtgtctttgtagtgatggatattgatttgtcttttcagtcttgctgtagcgatattgccatgagaatatccatgacagtgcaaagcttgaaaagtatttaagatctgctggaattcgtgattcctgcgaattgtattgtttcttaaattgggaaaatccttgttggaccgtttctgggaatatctctgggattggtccaaagaagtcccaccattgcaaaaaccaattgggaaaattgtaaattgtgttggtcttgaaatatattagccatgaatgcttgaagcgggtattttggtgccaaaacaccttggtccaagcatcaacgtaatcccaataggtataacctaccggatcaaatggaactgaaaatctcttccctttgttcaagtctgaaccaaagtgtcttggttgaagaacttttagtatttggatggttgaatgggtgtttaaggtttggtcttttggatctttgaaatgtttgatagatactgagtttgaatctaccaaaatcaattcataaaaagttcttgtcttcaggatggtggttggtttgtagtgaaatcctggtgggaaagccttggccgtcgccttgaagggatttttgtcccaaaattcaggttccatctgcaaaacagttaacaatttatttttataaatataattgttagtttgtttggtaggtggtgtttgagctttggctaaaggtagttttcctttagtattggtggctgttttggtcattgacgcattttggatcattgtttgtaaatttgattcagattcatcatcagattctgaggcaatgtctgcccaagattttttgattatttttggaaatttggtcagacccatgtcttgaagggcctgaagggtttcaattggccaagcatagtcggccgatgtttgtttggcggttgccggtttgggagattcctgagtggatggctcaggtttgattgaggcaatctgggttgatgacccttctaaattggttttctgggtagatgacccagcctgggttggtgacccagaagaggtagatgatttcttcatggttggttctggaagagccagcctggctcctttgcctgtactccttcctccccgtagggagattcccgatgcctt

SEQ ID NO: 8799 - DNA, 1222 bp, Glycine max
  Gm_smallRNAprecursor_1632
ctttgaggaattctggatgggatttgaaccatagttttacttgttctggatccgctttggatgagtcaaattgtgtccaccattttacaaatgcgtgtctttgtagtgatggatattgatttgtcttttcagtcttgctgtagcgatattgccatgagaatatccatgacagtgcaaagcttgaaaagtatttaagatctgctggaattcgtgattcctgcgaattgtattgtttcttaaattgggaaaatccttgttggaccgtttctgggaatatctctgggattggtccaaagaagtcccaccattgcaaaaaccaattgggaaaattgtaaattgtgttggtcttgaaatatattagccatgaatgcttgaagcgggtattttggtgccaaaacaccttggtccaagcatcaacgtaatcccaataggtataacctaccggatcaaatggaactgaaaatctcttccctttgttcaagtctgaaccaaagtgtcttggttgaagaacttttagtatttggatggttgaatgggtgtttaaggtttggtcttttggatctttgaaatgtttgatagatactgagtttgaatctaccaaaatcaattcataaaaagttcttgtcttcaggatggtggttggtttgtagtgaaatcctggtgggaaagccttggccgtcgccttgaagggatttttgtcccaaaattcaggttccatctgcaaaacagttaacaatttatttttataaatataattgttagtttgtttggtaggtggtgtttgagctttggctaaaggtagttttcctttagtattggtggctgttttggtcattgacgcattttggatcattgtttgtaaatttgattcagattcatcatcagattctgaggcaatgtctgcccaagattttttgattatttttggaaatttggtcagacccatgtcttgaagggcctgaagggtttcaattggccaagcatagtcggccgatgtttgtttggcggttgccggtttgggagattcctgagtggatggctcaggtttgattgaggcaatctgggttgatgacccttctaaattggttttctgggtagatgacccagcctgggttggtgacccagaagaggtagatgatttcttcatggttggttctggaagagccagcctggctcctttgcctgtactccttcctccccgtagggagattcccgatgcctt

SEQ ID NO: 8800 - DNA, 1058 bp, Glycine max
  Gm_smallRNAprecursor_1633
tacttgttctggatccgctttggatgagtcaaattgtgtccaccattttacaaatgcgtgtctttgtagtgatggatattgatttgtcttttcagtcttgctgtagcgatattgccatgagaatatccatgacagtgcaaagcttgaaaagtatttaagatctgctggaattcgtgattcctgcgaattgtattgtttcttaaattgggaaaatccttgttggaccgtttctgggaatatctctgggattggtccaaagaagtcccaccattgcaaaaaccaattgggaaaattgtaaattgtgttggtcttgaaatatattagccatgaatgcttgaagcgggtattttggtgccaaaacaccttggtccaagcatcaacgtaatcccaataggtataacctaccggatcaaatggaactgaaaatctcttccctttgttcaagtctgaaccaaagtgtcttggttgaagaacttttagtatttggatggttgaatgggtgtttaaggtttggtcttttggatctttgaaatgtttgatagatactgagtttgaatctaccaaaatcaattcataaaaagttcttgtcttcaggatggtggttggtttgtagtgaaatcctggtgggaaagccttggccgtcgccttgaagggatttttgtcccaaaattcaggttccatctgcaaaacagttaacaatttatttttataaatataattgttagtttgtttggtaggtggtgtttgagctttggctaaaggtagttttcctttagtattggtggctgttttggtcattgacgcattttggatcattgtttgtaaatttgattcagattcatcatcagattctgaggcaatgtctgcccaagattttttgattatttttggaaatttggtcagacccatgtcttgaagggcctgaagggtttcaattggccaagcatagtcggccgatgtttgtttggcggttgccggtttgggagattcctgagtggatggctcaggtttgattgaggcaatctgggttgatgacccttctaaattggttttctggg

SEQ ID NO: 8801 - DNA, 1176 bp, Glycine max
  Gm_smallRNAprecursor_1634
tacttgttctggatccgctttggatgagtcaaattgtgtccaccattttacaaatgcgtgtctttgtagtgatggatattgatttgtcttttcagtcttgctgtagcgatattgccatgagaatatccatgacagtgcaaagcttgaaaagtatttaagatctgctggaattcgtgattcctgcgaattgtattgtttcttaaattgggaaaatccttgttggaccgtttctgggaatatctctgggattggtccaaagaagtcccaccattgcaaaaaccaattgggaaaattgtaaattgtgttggtcttgaaatatattagccatgaatgcttgaagcgggtattttggtgccaaaacaccttggtccaagcatcaacgtaatcccaataggtataacctaccggatcaaatggaactgaaaatctcttccctttgttcaagtctgaaccaaagtgtcttggttgaagaacttttagtatttggatggttgaatgggtgtttaaggtttggtcttttggatctttgaaatgtttgatagatactgagtttgaatctaccaaaatcaattcataaaaagttcttgtcttcaggatggtggttggtttgtagtgaaatcctggtgggaaagccttggccgtcgccttgaagggatttttgtcccaaaattcaggttccatctgcaaaacagttaacaatttatttttataaatataattgttagtttgtttggtaggtggtgtttgagctttggctaaaggtagttttcctttagtattggtggctgttttggtcattgacgcattttggatcattgtttgtaaatttgattcagattcatcatcagattctgaggcaatgtctgcccaagattttttgattatttttggaaatttggtcagacccatgtcttgaagggcctgaagggtttcaattggccaagcatagtcggccgatgtttgtttggcggttgccggtttgggagattcctgagtggatggctcaggtttgattgaggcaatctgggttgatgacccttctaaattggttttctgggtagatgacccagcctgggttggtgacccagaagaggtagatgatttcttcatggttggttctggaagagccagcctggctcctttgcctgtactccttcctccccgtagggagattcc

SEQ ID NO: 8802 - DNA, 1183 bp, Glycine max
  Gm_smallRNAprecursor_1635
tacttgttctggatccgctttggatgagtcaaattgtgtccaccattttacaaatgcgtgtctttgtagtgatggatattgatttgtcttttcagtcttgctgtagcgatattgccatgagaatatccatgacagtgcaaagcttgaaaagtatttaagatctgctggaattcgtgattcctgcgaattgtattgtttcttaaattgggaaaatccttgttggaccgtttctgggaatatctctgggattggtccaaagaagtcccaccattgcaaaaaccaattgggaaaattgtaaattgtgttggtcttgaaatatattagccatgaatgcttgaagcgggtattttggtgccaaaacaccttggtccaagcatcaacgtaatcccaataggtataacctaccggatcaaatggaactgaaaatctcttccctttgttcaagtctgaaccaaagtgtcttggttgaagaacttttagtatttggatggttgaatgggtgtttaaggtttggtcttttggatctttgaaatgtttgatagatactgagtttgaatctaccaaaatcaattcataaaaagttcttgtcttcaggatggtggttggtttgtagtgaaatcctggtgggaaagccttggccgtcgccttgaagggatttttgtcccaaaattcaggttccatctgcaaaacagttaacaatttatttttataaatataattgttagtttgtttggtaggtggtgtttgagctttggctaaaggtagttttcctttagtattggtggctgttttggtcattgacgcattttggatcattgtttgtaaatttgattcagattcatcatcagattctgaggcaatgtctgcccaagattttttgattatttttggaaatttggtcagacccatgtcttgaagggcctgaagggtttcaattggccaagcatagtcggccgatgtttgtttggcggttgccggtttgggagattcctgagtggatggctcaggtttgattgaggcaatctgggttgatgacccttctaaattggttttctgggtagatgacccagcctgggttggtgacccagaagaggtagatgatttcttcatggttggttctggaagagccagcctggctcctttgcctgtactccttcctccccgtagggagattcccgatgcc

SEQ ID NO: 8803 - DNA, 1159 bp, Glycine max
  Gm_smallRNAprecursor_1636
ctggatccgctttggatgagtcaaattgtgtccaccattttacaaatgcgtgtctttgtagtgatggatattgatttgtcttttcagtcttgctgtagcgatattgccatgagaatatccatgacagtgcaaagcttgaaaagtatttaagatctgctggaattcgtgattcctgcgaattgtattgtttcttaaattgggaaaatccttgttggaccgtttctgggaatatctctgggattggtccaaagaagtcccaccattgcaaaaaccaattgggaaaattgtaaattgtgttggtcttgaaatatattagccatgaatgcttgaagcgggtattttggtgccaaaacaccttggtccaagcatcaacgtaatcccaataggtataacctaccggatcaaatggaactgaaaatctcttccctttgttcaagtctgaaccaaagtgtcttggttgaagaacttttagtatttggatggttgaatgggtgtttaaggtttggtcttttggatctttgaaatgtttgatagatactgagtttgaatctaccaaaatcaattcataaaaagttcttgtcttcaggatggtggttggtttgtagtgaaatcctggtgggaaagccttggccgtcgccttgaagggatttttgtcccaaaattcaggttccatctgcaaaacagttaacaatttatttttataaatataattgttagtttgtttggtaggtggtgtttgagctttggctaaaggtagttttcctttagtattggtggctgttttggtcattgacgcattttggatcattgtttgtaaatttgattcagattcatcatcagattctgaggcaatgtctgcccaagattttttgattatttttggaaatttggtcagacccatgtcttgaagggcctgaagggtttcaattggccaagcatagtcggccgatgtttgtttggcggttgccggtttgggagattcctgagtggatggctcaggtttgattgaggcaatctgggttgatgacccttctaaattggttttctgggtagatgacccagcctgggttggtgacccagaagaggtagatgatttcttcatggttggttctggaagagccagcctggctcctttgcctgtactccttcctccccgtag

SEQ ID NO: 8804 - DNA, 1098 bp, Glycine max
  Gm_smallRNAprecursor_1637
gtgtctttgtagtgatggatattgatttgtcttttcagtcttgctgtagcgatattgccatgagaatatccatgacagtgcaaagcttgaaaagtatttaagatctgctggaattcgtgattcctgcgaattgtattgtttcttaaattgggaaaatccttgttggaccgtttctgggaatatctctgggattggtccaaagaagtcccaccattgcaaaaaccaattgggaaaattgtaaattgtgttggtcttgaaatatattagccatgaatgcttgaagcgggtattttggtgccaaaacaccttggtccaagcatcaacgtaatcccaataggtataacctaccggatcaaatggaactgaaaatctcttccctttgttcaagtctgaaccaaagtgtcttggttgaagaacttttagtatttggatggttgaatgggtgtttaaggtttggtcttttggatctttgaaatgtttgatagatactgagtttgaatctaccaaaatcaattcataaaaagttcttgtcttcaggatggtggttggtttgtagtgaaatcctggtgggaaagccttggccgtcgccttgaagggatttttgtcccaaaattcaggttccatctgcaaaacagttaacaatttatttttataaatataattgttagtttgtttggtaggtggtgtttgagctttggctaaaggtagttttcctttagtattggtggctgttttggtcattgacgcattttggatcattgtttgtaaatttgattcagattcatcatcagattctgaggcaatgtctgcccaagattttttgattatttttggaaatttggtcagacccatgtcttgaagggcctgaagggtttcaattggccaagcatagtcggccgatgtttgtttggcggttgccggtttgggagattcctgagtggatggctcaggtttgattgaggcaatctgggttgatgacccttctaaattggttttctgggtagatgacccagcctgggttggtgacccagaagaggtagatgatttcttcatggttggttctggaagagccagcctggctcctttgcctgtactcct

SEQ ID NO: 8805 - DNA, 1098 bp, Glycine max
  Gm_smallRNAprecursor_1638
ttgatttgtcttttcagtcttgctgtagcgatattgccatgagaatatccatgacagtgcaaagcttgaaaagtatttaagatctgctggaattcgtgattcctgcgaattgtattgtttcttaaattgggaaaatccttgttggaccgtttctgggaatatctctgggattggtccaaagaagtcccaccattgcaaaaaccaattgggaaaattgtaaattgtgttggtcttgaaatatattagccatgaatgcttgaagcgggtattttggtgccaaaacaccttggtccaagcatcaacgtaatcccaataggtataacctaccggatcaaatggaactgaaaatctcttccctttgttcaagtctgaaccaaagtgtcttggttgaagaacttttagtatttggatggttgaatgggtgtttaaggtttggtcttttggatctttgaaatgtttgatagatactgagtttgaatctaccaaaatcaattcataaaaagttcttgtcttcaggatggtggttggtttgtagtgaaatcctggtgggaaagccttggccgtcgccttgaagggatttttgtcccaaaattcaggttccatctgcaaaacagttaacaatttatttttataaatataattgttagtttgtttggtaggtggtgtttgagctttggctaaaggtagttttcctttagtattggtggctgttttggtcattgacgcattttggatcattgtttgtaaatttgattcagattcatcatcagattctgaggcaatgtctgcccaagattttttgattatttttggaaatttggtcagacccatgtcttgaagggcctgaagggtttcaattggccaagcatagtcggccgatgtttgtttggcggttgccggtttgggagattcctgagtggatggctcaggtttgattgaggcaatctgggttgatgacccttctaaattggttttctgggtagatgacccagcctgggttggtgacccagaagaggtagatgatttcttcatggttggttctggaagagccagcctggctcctttgcctgtactccttcctccccgtagggagattcc

SEQ ID NO: 8806 - DNA, 1090 bp, Glycine max
  Gm_smallRNAprecursor_1639
gcgaattgtattgtttcttaaattgggaaaatccttgttggaccgtttctgggaatatctctgggattggtccaaagaagtcccaccattgcaaaaaccaattgggaaaattgtaaattgtgttggtcttgaaatatattagccatgaatgcttgaagcgggtattttggtgccaaaacaccttggtccaagcatcaacgtaatcccaataggtataacctaccggatcaaatggaactgaaaatctcttccctttgttcaagtctgaaccaaagtgtcttggttgaagaacttttagtatttggatggttgaatgggtgtttaaggtttggtcttttggatctttgaaatgtttgatagatactgagtttgaatctaccaaaatcaattcataaaaagttcttgtcttcaggatggtggttggtttgtagtgaaatcctggtgggaaagccttggccgtcgccttgaagggatttttgtcccaaaattcaggttccatctgcaaaacagttaacaatttatttttataaatataattgttagtttgtttggtaggtggtgtttgagctttggctaaaggtagttttcctttagtattggtggctgttttggtcattgacgcattttggatcattgtttgtaaatttgattcagattcatcatcagattctgaggcaatgtctgcccaagattttttgattatttttggaaatttggtcagacccatgtcttgaagggcctgaagggtttcaattggccaagcatagtcggccgatgtttgtttggcggttgccggtttgggagattcctgagtggatggctcaggtttgattgaggcaatctgggttgatgacccttctaaattggttttctgggtagatgacccagcctgggttggtgacccagaagaggtagatgatttcttcatggttggttctggaagagccagcctggctcctttgcctgtactccttcctccccgtagggagattcccgatgccttaggaggcattaccacttttctgtaagaattcacgggtaaggtagtcaggtaatgaatttgaggtgcccttgatgtattctatgtcaa

SEQ ID NO: 8807 - DNA, 1119 bp, Glycine max
  Gm_smallRNAprecursor_1640
aagtcctaatagtcattgactcattattctttgttgaaccttagcataagtcctaatactcatagactcattaattgactttctaaagaaaaaaaaaaaaaagaaatgagctgtgtttctctatttgtcgaattatacgtgaagaagaaatgtacaatttttgtggtaataaaaacatttgaaaaatgaaattcaaaccaagaataggaatgtatgagagaagaaaattccaataacaaaagtttcaaagtagaagtagtatttttcacggcataatttctcatacaatattacttttatctctgaaacactttttgtttggaaaaaagtcttatggtaatataaattaggtaaaattgtaaatttggtctcccattttatctttaattttggattttgtcacccgataaaatcattcacaaattttatcatcgtatttaatcaaatcatgcaatgttggtcccccaatccacaattagacgttgattgttacaaagtaatgttgactgtcacatgtcacgttcttattggatgatgactgtcatgagtcatgttctgattgatcaataaaaacaataatgcatgcatttcatctttcatggagttgacatccaatcaaaacatgacacgtgacagtcatcatccaataagaacgtgacacgtgaccatcaacattcatttattcaacgtacaattgtgggttaggggaccaacattgtctgatttgattaaatacgaggacaaaattcatgaataattttatcgcaggacaaaatctaaaattagagtcaaaatggaggacaaaaaatacaattttgcctataaattattgacagtattcattagtttggttaatgattaatttttgtcaaaaaatttagccatttttaatgagaccgtttttttttaatcatgtttttttatctataatatttaaagagaacgagttgcactaacagtttattgatgtataattttcggtttaggtaaacgtataataattgattagaccgaaccgaaaatttctagcttgttcttttcatgttgccatggcatcaaatcattggttaattaggcccataaattttgatttatttattttaacttttaaaagttgga

SEQ ID NO: 8808 - DNA, 1118 bp, Glycine max
  Gm_smallRNAprecursor_1641
agtcctaatagtcattgactcattattctttgttgaaccttagcataagtcctaatactcatagactcattaattgactttctaaagaaaaaaaaaaaaaagaaatgagctgtgtttctctatttgtcgaattatacgtgaagaagaaatgtacaatttttgtggtaataaaaacatttgaaaaatgaaattcaaaccaagaataggaatgtatgagagaagaaaattccaataacaaaagtttcaaagtagaagtagtatttttcacggcataatttctcatacaatattacttttatctctgaaacactttttgtttggaaaaaagtcttatggtaatataaattaggtaaaattgtaaatttggtctcccattttatctttaattttggattttgtcacccgataaaatcattcacaaattttatcatcgtatttaatcaaatcatgcaatgttggtcccccaatccacaattagacgttgattgttacaaagtaatgttgactgtcacatgtcacgttcttattggatgatgactgtcatgagtcatgttctgattgatcaataaaaacaataatgcatgcatttcatctttcatggagttgacatccaatcaaaacatgacacgtgacagtcatcatccaataagaacgtgacacgtgaccatcaacattcatttattcaacgtacaattgtgggttaggggaccaacattgtctgatttgattaaatacgaggacaaaattcatgaataattttatcgcaggacaaaatctaaaattagagtcaaaatggaggacaaaaaatacaattttgcctataaattattgacagtattcattagtttggttaatgattaatttttgtcaaaaaatttagccatttttaatgagaccgtttttttttaatcatgtttttttatctataatatttaaagagaacgagttgcactaacagtttattgatgtataattttcggtttaggtaaacgtataataattgattagaccgaaccgaaaatttctagcttgttcttttcatgttgccatggcatcaaatcattggttaattaggcccataaattttgatttatttattttaacttttaaaagttgga

SEQ ID NO: 8809 - DNA, 1126 bp, Glycine max
  Gm_smallRNAprecursor_1642
ccaattttttattaaaataatttttataattttttaagagatatatatagataaagaaaaatcaaaaaaattgaaaaaattatagtataactttttagttacatgtatatatattttaagttaaatttatgtgttgttaaaatttttgttttcttatgtacattaattaaagaatgagaaaattagttagtagtattgaaacaaattgaaaaacacaaggaataaataattaatacacataaaattaaacagttgtgactgagatgataaacgagaataatgaaacatactaaaaatacaattgcaacataaatatgacgaaactaatgatagtctaaaagatgttgtgcaagagacatgtcttgttgcagttggattattggttttgctaaaaatagctaaaatttctattgggcagaatcgtttccagtagttggattgtactaacacatttagcacgtcttcgtcatttttcaattttgttatttcatattcgattaaattttctgaatacttagcatgacttggttgtcgaaagaacaatcgtatgaccaattgtgattcctgaattccataagggaggaacctcataggtgcaacttgcttgattaaatccttgagtttgttcatgctacatcctgaaggaatatcaaatcttattggatttattctagtgaaggagtaacccaaaaacccactatggcgtggtatgttccacttccggttgtatcatgagtaggagtgatattggactgaagcaggttgagtatatcatccagtgttctatggatggtacataataattttatatggccaacacacgagtattgctcattgcacattaacattgtgtaaacatcatcatcatttttcaattgtagagattgaaaaaaatattgttgacttgcatccatgaatggttgtcggtagtagatttcatccattaattgatcgttggttagctgaagggtgttgtgcattctactcttgagtgtatcaaaagaacaatcattaggaaatcgcattgttgttggagtgagactttgaaaataaacacaagtttggttataagttattgatccatttgaaaaaatgaaggctaatctcgagttagcaaaggtttggc

SEQ ID NO: 8810 - DNA, 1066 bp, Glycine max
  Gm_smallRNAprecursor_1643
gctttccaaaaaatgagattattcattataaaaaaaaaattaatcaaacaagcaattactttagagtttaaactagttaatcaacgcacaaggaaagaatactgaaatggaaaaattaacagaatattcctcaaaatttagcagcaataaacaataacgcattctgtttaatacaacagccgatattatatttatttattttttccctcatctcatagcaaaatcaccacaaatcagaaaattagcagctgcaacactacaggcattatctcggaagaaagcgcaaacgaagtaatataaaattatttcaaataacagcagaggcatctagatttgagtactcgctacgaagaagaaaaatctttcatagaaatgctgatacagagaattcgtgaacgctaactaatttttccatatgaaaacaagaggaagcataaaaacaatgttatttaagagaagaaagagaaaggaaattgctggtaaagagaggcaaagtgagcgctggatgcagaggtttatcgaccgattcttgctttgtgttcttccacaaccaaattcaggaagagatcgatgaaccgctgcctccagtgacttcacctcatctcgatacacctccaaaattaaaattatccgtgaaataacaaaaatcaaaacaacaaacacagctttgtaatttttttgtgtgtttttggatgagatattggacacgcaaagacggtagctaaaaacagcaaatacgatccgtgatgtgaaaaacatagatctgaacataaagagaaaattagagccaatttctcttccatcacaagtcacacatacacacacacaccggggggaaatatgagtaataggaagctaagcaataaatagtattaaagaaaagaaaacaatatgatacagagggaagagagagagaaagaggaatatatgtaatatgaaccaggaatctgtggagtcaccattgccgcaagtgtgtgtatcgctctctctctctctctctctctctgttttgagtcacagatccaccacagtgacttttcaaaggccgaatccttctgcatttttt

SEQ ID NO: 8811 - DNA, 1066 bp, Glycine max; identical to SEQ ID NO: 8810
  Gm_smallRNAprecursor_1644

SEQ ID NO: 8812 - DNA, 1065 bp, Glycine max
  Gm_smallRNAprecursor_1645
ctttccaaaaaatgagattattcattataaaaaaaaaattaatcaaacaagcaattactttagagtttaaactagttaatcaacgcacaaggaaagaatactgaaatggaaaaattaacagaatattcctcaaaatttagcagcaataaacaataacgcattctgtttaatacaacagccgatattatatttatttattttttccctcatctcatagcaaaatcaccacaaatcagaaaattagcagctgcaacactacaggcattatctcggaagaaagcgcaaacgaagtaatataaaattatttcaaataacagcagaggcatctagatttgagtactcgctacgaagaagaaaaatctttcatagaaatgctgatacagagaattcgtgaacgctaactaatttttccatatgaaaacaagaggaagcataaaaacaatgttatttaagagaagaaagagaaaggaaattgctggtaaagagaggcaaagtgagcgctggatgcagaggtttatcgaccgattcttgctttgtgttcttccacaaccaaattcaggaagagatcgatgaaccgctgcctccagtgacttcacctcatctcgatacacctccaaaattaaaattatccgtgaaataacaaaaatcaaaacaacaaacacagctttgtaatttttttgtgtgtttttggatgagatattggacacgcaaagacggtagctaaaaacagcaaatacgatccgtgatgtgaaaaacatagatctgaacataaagagaaaattagagccaatttctcttccatcacaagtcacacatacacacacacaccggggggaaatatgagtaataggaagctaagcaataaatagtattaaagaaaagaaaacaatatgatacagagggaagagagagagaaagaggaatatatgtaatatgaaccaggaatctgtggagtcaccattgccgcaagtgtgtgtatcgctctctctctctctctctctctctgttttgagtcacagatccaccacagtgacttttcaaaggccgaatccttctgcatttttt

SEQ ID NO: 8813 - DNA, 1065 bp, Glycine max; identical to SEQ ID NO: 8812
  Gm_smallRNAprecursor_1646

SEQ ID NO: 8814 - DNA, 1035 bp, Glycine max
  Gm_smallRNAprecursor_1647
caatgtagtcgtgtttgcattttgtgggtcaacaaacatctttgtctttcgcctatactagaccatgtagtccgagttaaagctcaataggccttcttgtcggggataagcgtcgaccctaaaagcatggcgattgttccactgatcaatcattggggcgaacaattgcccccaattttcgtcatgtttcccttttaatgttataccatgaatgtttaagggttacgaaggagactctggaattggttgctgcatcccaaattgtctcaatactttgtccggttggtgccactcaataacttggaaacaaattagtggcaccaccgcgtaccacgcgacacttctgagtacacaaatgggaggcaacaatgatataacggttgctgtgtaaggctcccacacaaactgcatataacaacatagttgtcaacattttagtaaaataacacatatcattttttattttacgaatacaataccatgttcttacctcatgacgtttcataatatccaacttgcgacgaaaaactctcacatcatcattgccgatatgttggtttccacgtcgtagccacctacaaagattaaaatttaatataccctaaaaccatttattctattgaaatgaaagatgcttttaaaaatgactaacctgtgccccagtggtttattttctacttgggaaggagtcctctttggagccaaggttggacattgttcccatgcccacatttgtagtaagatgcacataccctaaaaccattaatttagttttataatcggtggcactgcacatctctctgtatagaaaagcaagtacggcagctccccatgcatatgtgccacagtcttcaaagtcacgtaaaaattgaaggtaccttagcgaaactttgttactgcttttgtcaacgaacaagacacctccaatgaatctcagtatccatacacaggcaaaccttcatacttgttcttcgttgtcatcgttatttatttgtgcaaaatggtgagccaaccaacttaatttaatcacactac

SEQ ID NO: 8815 - DNA, 1035 bp, Glycine max
  Gm_smallRNAprecursor_1648
caatgtagccatgttttcattttgtgggtcaacaaacatctttgtctttcgcctataccagaccatgtagttcgagttaaagctcaataggccctcttgtcggggataagcgtcgaccctaaaagcatggcgattgtttcactgatcaatcattggggcgaacaattgcccccaattttcgtcatgtttcccttttagtgttatgccatgaatgttcaagggttgcgaatgagactctggaattggttgttgcattccaaattgtctcaatactctatccggttggtgccactcaataacttgaaaacaaattagtggcaccaccgcgcaccacgcgacactttcgactacacaaatgggaggcaacaatgatataacagttgcagtgtaaggctcccacacaaactgcatataacaacatagttgtcagcattttagtaaaataacacatatcattttttattttacaaatacaataccatgttcttacctcatgacgtttcataatatccaacttgcgacgaaaaactctcacatcatcattgccgatatgttgatttccatgtcgtagccacctacaaagattaaaatttaatataccctaaaaccatttattcttttaaaatgaaagacgcttttaaaaatgactaacctgtgccccagtggtttattttctacttgggaaagagtcctctttggagccaaggttggacatcattcccatgcccacatttgtagtaagatgcacatacctttgattgatttagttttataattggtggcactgcacatctctctatatagaaaagcaagtacagcaggtccccatgcatatgtgctacagtctccaaagtcacgtaaaaattgaaggtaccttagcgaaactttgttactgcttttgtcaacgaacaagacacctccaatgaatcgtagtatccatgcacgggcaaaccttcgtacttgttcttcgtcgtcgtggttatttatttgtgcaaaatggtgagccaaccaacttaatttaaccacactaccttt

SEQ ID NO: 8816 - DNA, 1157 bp, Glycine max
  Gm_smallRNAprecursor_1649
aggcaacaatgatataacagttgcagtgtaaggctcccacacaaactgcatataacaacatagttgtcagcattttagtaaaataacacatatcattttttattttacaaatacaataccatgttcttacctcatgacgtttcataatatccaacttgcgacgaaaaactctcacatcatcattgccgatatgttgatttccatgtcgtagccacctacaaagattaaaatttaatataccctaaaaccatttattcttttaaaatgaaagacgcttttaaaaatgactaacctgtgccccagtggtttattttctacttgggaaagagtcctctttggagccaaggttggacatcattcccatgcccacatttgtagtaagatgcacatacctttgattgatttagttttataattggtggcactgcacatctctctatatagaaaagcaagtacagcaggtccccatgcatatgtgctacagtctccaaagtcacgtaaaaattgaaggtaccttagcgaaactttgttactgcttttgtcaacgaacaagacacctccaatgaatcgtagtatccatgcacgggcaaaccttcgtacttgttcttcgtcgtcgtggttatttatttgtgcaaaatggtgagccaaccaacttaatttaaccacactacctttaatttcaccttcttgtggtctgactcccaataattcctcacataaatcagcccaattaagatttgttggaccgattaatggtaaaccatccacacgtagacctaacaatacagagacgtcttgaagagtaatagtacactctccgcatctcatgtgaaacgtatgtgtttccggcctccatctttctatcaaagcactaattaatgagacatttatttttaagtatcccatcttcataatccggtaaaaaccagattgtcgaaggaaaggaaaaatttgctctggaatttcttcttccccttgataatggggacaacttgtctgatatgtaattttcgatcttcttccccattccaaacatgttctgaaacatgcttaggttgcatccataatacattactatcgatcgggccaaacttaattttaatatgtgatggacatgacgatgaagatgccattgatactgcaaaataaaatataat

SEQ ID NO: 8817 - DNA, 1158 bp, Glycine max
  Gm_smallRNAprecursor_1650
aggcaacaatgatataacagttgcagtgtaaggctcccacacaaactgcatataacaacatagttgtcagcattttagtaaaataacacatatcattttttattttacaaatacaataccatgttcttacctcatgacgtttcataatatccaacttgcgacgaaaaactctcacatcatcattgccgatatgttgatttccatgtcgtagccacctacaaagattaaaatttaatataccctaaaaccatttattcttttaaaatgaaagacgcttttaaaaatgactaacctgtgccccagtggtttattttctacttgggaaagagtcctctttggagccaaggttggacatcattcccatgcccacatttgtagtaagatgcacatacctttgattgatttagttttataattggtggcactgcacatctctctatatagaaaagcaagtacagcaggtccccatgcatatgtgctacagtctccaaagtcacgtaaaaattgaaggtaccttagcgaaactttgttactgcttttgtcaacgaacaagacacctccaatgaatcgtagtatccatgcacgggcaaaccttcgtacttgttcttcgtcgtcgtggttatttatttgtgcaaaatggtgagccaaccaacttaatttaaccacactacctttaatttcaccttcttgtggtctgactcccaataattcctcacataaatcagcccaattaagatttgttggaccgattaatggtaaaccatccacacgtagacctaacaatacagagacgtcttgaagagtaatagtacactctccgcatctcatgtgaaacgtatgtgtttccggcctccatctttctatcaaagcactaattaatgagacatttatttttaagtatcccatcttcataatccggtaaaaaccagattgtcgaaggaaaggaaaaatttgctctggaatttcttcttccccttgataatggggacaacttgtctgatatgtaattttcgatcttcttccccattccaaacatgttctgaaacatgcttaggttgcatccataatacattactatcgatcgggccaaacttaattttaatatgtgatggacatgacgatgaagatgccattgatactgcaaaataaaatataata

SEQ ID NO: 8818 - DNA, 1155 bp, Glycine max
  Gm_smallRNAprecursor_1651
gcaacaatgatataacagttgcagtgtaaggctcccacacaaactgcatataacaacatagttgtcagcattttagtaaaataacacatatcattttttattttacaaatacaataccatgttcttacctcatgacgtttcataatatccaacttgcgacgaaaaactctcacatcatcattgccgatatgttgatttccatgtcgtagccacctacaaagattaaaatttaatataccctaaaaccatttattcttttaaaatgaaagacgcttttaaaaatgactaacctgtgccccagtggtttattttctacttgggaaagagtcctctttggagccaaggttggacatcattcccatgcccacatttgtagtaagatgcacatacctttgattgatttagttttataattggtggcactgcacatctctctatatagaaaagcaagtacagcaggtccccatgcatatgtgctacagtctccaaagtcacgtaaaaattgaaggtaccttagcgaaactttgttactgcttttgtcaacgaacaagacacctccaatgaatcgtagtatccatgcacgggcaaaccttcgtacttgttcttcgtcgtcgtggttatttatttgtgcaaaatggtgagccaaccaacttaatttaaccacactacctttaatttcaccttcttgtggtctgactcccaataattcctcacataaatcagcccaattaagatttgttggaccgattaatggtaaaccatccacacgtagacctaacaatacagagacgtcttgaagagtaatagtacactctccgcatctcatgtgaaacgtatgtgtttccggcctccatctttctatcaaagcactaattaatgagacatttatttttaagtatcccatcttcataatccggtaaaaaccagattgtcgaaggaaaggaaaaatttgctctggaatttcttcttccccttgataatggggacaacttgtctgatatgtaattttcgatcttcttccccattccaaacatgttctgaaacatgcttaggttgcatccataatacattactatcgatcgggccaaacttaattttaatatgtgatggacatgacgatgaagatgccattgatactgcaaaataaaatataat

SEQ ID NO: 8819 - DNA, 1036 bp, Glycine max
  Gm_smallRNAprecursor_1652
tgttcttacctcatgacgtttcataatatccaacttgcgacgaaaaactctcacatcatcattgccgatatgttgatttccatgtcgtagccacctacaaagattaaaatttaatataccctaaaaccatttattcttttaaaatgaaagacgcttttaaaaatgactaacctgtgccccagtggtttattttctacttgggaaagagtcctctttggagccaaggttggacatcattcccatgcccacatttgtagtaagatgcacatacctttgattgatttagttttataattggtggcactgcacatctctctatatagaaaagcaagtacagcaggtccccatgcatatgtgctacagtctccaaagtcacgtaaaaattgaaggtaccttagcgaaactttgttactgcttttgtcaacgaacaagacacctccaatgaatcgtagtatccatgcacgggcaaaccttcgtacttgttcttcgtcgtcgtggttatttatttgtgcaaaatggtgagccaaccaacttaatttaaccacactacctttaatttcaccttcttgtggtctgactcccaataattcctcacataaatcagcccaattaagatttgttggaccgattaatggtaaaccatccacacgtagacctaacaatacagagacgtcttgaagagtaatagtacactctccgcatctcatgtgaaacgtatgtgtttccggcctccatctttctatcaaagcactaattaatgagacatttatttttaagtatcccatcttcataatccggtaaaaaccagattgtcgaaggaaaggaaaaatttgctctggaatttcttcttccccttgataatggggacaacttgtctgatatgtaattttcgatcttcttccccattccaaacatgttctgaaacatgcttaggttgcatccataatacattactatcgatcgggccaaacttaattttaatatgtgatggacatgacgatgaagatgccattgatactgcaaaataaaatataat

SEQ ID NO: 8820 - DNA, 1037 bp, Glycine max
  Gm_smallRNAprecursor_1653
tgttcttacctcatgacgtttcataatatccaacttgcgacgaaaaactctcacatcatcattgccgatatgttgatttccatgtcgtagccacctacaaagattaaaatttaatataccctaaaaccatttattcttttaaaatgaaagacgcttttaaaaatgactaacctgtgccccagtggtttattttctacttgggaaagagtcctctttggagccaaggttggacatcattcccatgcccacatttgtagtaagatgcacatacctttgattgatttagttttataattggtggcactgcacatctctctatatagaaaagcaagtacagcaggtccccatgcatatgtgctacagtctccaaagtcacgtaaaaattgaaggtaccttagcgaaactttgttactgcttttgtcaacgaacaagacacctccaatgaatcgtagtatccatgcacgggcaaaccttcgtacttgttcttcgtcgtcgtggttatttatttgtgcaaaatggtgagccaaccaacttaatttaaccacactacctttaatttcaccttcttgtggtctgactcccaataattcctcacataaatcagcccaattaagatttgttggaccgattaatggtaaaccatccacacgtagacctaacaatacagagacgtcttgaagagtaatagtacactctccgcatctcatgtgaaacgtatgtgtttccggcctccatctttctatcaaagcactaattaatgagacatttatttttaagtatcccatcttcataatccggtaaaaaccagattgtcgaaggaaaggaaaaatttgctctggaatttcttcttccccttgataatggggacaacttgtctgatatgtaattttcgatcttcttccccattccaaacatgttctgaaacatgcttaggttgcatccataatacattactatcgatcgggccaaacttaattttaatatgtgatggacatgacgatgaagatgccattgatactgcaaaataaaatataata

SEQ ID NO: 8821 - DNA, 1165 bp, Glycine max
  Gm_smallRNAprecursor_1654
atccaattttgctcaaattggatcctacaagtcctaaatcatgtataaatcatatctaaaccaaaaacaagcttcagaccaaggcaattcaaaatctaggtatctaaaacccctcaatttagtggattttcaaggtttgagaagtgaaaatgagaatgggataattttggagcaaactctcatctcaaacaagtctataacgttaatctaaacttgctcaaactggttttacgatgaaaactccaccgaatcaaaatttgacccctcaacacccaatttaccctagaaacggctcttgctttcactttggtcactcgttttcctcatttgctcatcccaagctttcccacaaatcctaaatgacattttaaactaggattaactcactttagccttcaattaccactaaccccaaatttggcctttcaatccctcaaaacctcacttttccactcacatcactaccattctcacttttaaccctaggttaactctccccatcatctctaccagttttctaccaatgatttcagcacacaagcatcacaaagcatcattataaaaccctaaaacagaatgggtatatttggctcacatcaaacatgacgagtttagcatgctttcaacaaattccttcacaaataactaccataaggcataaacctagtagaactacccatcatatctcccaaagacccaatacccacaaaatttatgtgagaagaagtctacccaaacctgaaatttgaagtcccacaacgtagaggtgcgcttcacgactccgaaaatggcttccttttgtgatttggagtagaaatggtgagcaaagtttggagctttaatgggcaacaatggtggatgagaaggggagaagaaaagcaacgtgagaatgagggaaaagcttctgaaatttttttttggctgagtgaggagagagaacatggctttttatgagaaagaatgatttccttttcctattattttattttctaaagcacttgccacttgtcccattttgagtggaacaaaaagggcccactttttctcttgatgtgactcatactcagccacaagaagagaaaaaaatctgaccttttgaaatgctaaaatcctgcctcggtttgcatgccgcttttctggttccagtccctcgcgtttctctgca

SEQ ID NO: 8822 - DNA, 1035 bp, Glycine max
  Gm_smallRNAprecursor_1655
tgtagccgtctttgcattttctgggtcaacaaacatctttgtctttcgcctataccagaccatgtagtccgagttaaaactcaataagccttcttgtcggggataagcgtcgaccctaaatgcatggcgattattccactgctggatcattggggcgaacaattgcccccaattttcgtcatgtttcccttttaatgttatgccatgaatgtttaagggttgtgaaggagactctggaactggttgttgcatcccaaattgtctcaacactctgtccggttggtgccactcaataacttggaaacaaattagtggcaccaccgcgtaccacgcgagacttccgactaaacaaacgggaggcaacaatgatataacggttgatgggtaaggctcccacacaaacaaactgcatataacaacatagttgtgaacattgtagtaaaataagacataattttgtattttacaaatacagtagcatggttcttacctcatgacgtttcataatatccaacttgcgacgaaaaactttcacatcatcattgccgatatgttggtttccacgtcgcagccacctacaaagaataaaatttaatataccctaaaaccatttattctattgaaatgaaagacgctgttaaaaatgactgacctgtgccctagtggtatattttctatttgggaaggagtcctctttggagtcaaggttggacatcgttcccatgcccacaattgtagtaagatgcacatacctccgattgatttagttttataattggtggcactgcacatctctctgtatagaaaaccaagtacatcagctccccatgcatatctgctacattcttcaaagtcacgtaaaaattgaaggtaccttagcgaaactctgttactggttttgtcaacgaacaagacacctccaataaatctcagtatccatgcacgggcaaaccttcgtacttgttcttcgtcgtcgtcattattaatttgatcaaaatggtgagccaaccaacttaatttaatcacactaccttt

SEQ ID NO: 8823 - DNA, 1198 bp, Glycine max
  Gm_smallRNAprecursor_1656
acagaaagaaacatattgttgatctcccttatgagaaagactttagggaaaaacaaattcccacaaaagccagaccaatccaaatgaatgaagaacttcttcaatactgtcaaaaggaaatcaaggatttgcttgataaaggcctaatccagaaaagcaaaagcccatggtcttgtgcagctttttatgtcaataaacaatatgagattgagtgtggaacaccccgcttagtcataaattacaaaccactaaatcaagcattacaatggattagatatcctattccaaacaaaaaagatttgcttaacagattaaattctgcaaggatattttcaaaatttgatatgaaatctggattttggcaaatccaaatccaagaatcaaataggtacaaaacagcgtttactgtacctttcgggcaatatgaatggaacgtgatgccattcggactgaagaatgccccttcagaatttcaaaaaattatgaacgatatttttaatccctattcaaaatttgtcattgtctacatagatgatgttttaatcttttcccaaaacattgaccaacatttcaaacatctccaaaccttcatacatatcatcaaacaaaatggtttggcggtctccaaatcaaaaatcaatcttttccaaactcgtattcgattccttggtcacaatatatatcaaggtacaatcattccaatcgaaaggtcaatagagtttgctagcaaattccctaaccaaatcttagacaagacccagttacaacgatttctggggtgcctaaattatgtaggagaatttgtcccctatctaaacaacgttgtcaaaccattacatgataggctgaaaaagaatccgcctccttggtctgacctccatacccaaacagttaaagaaatcaaagtcaaagtccaatccataaagtgtctgtatcttcccattccacaggcattcaaaattgtcgaaactgatgcatcagacatcgattacggtggcatcctcaaacaacaagtacatggtcaagaacatgtcatcgcatatacttcaaaacattggaatcctgcacaattaaagtattcaactgttaaaaaagaagttttagcaattgttttgtgcatttccaaatttcaatctgatttattaaataaaatttttttggtaaatgttgactgcaaatcagccaaagacattttaca

SEQ ID NO: 8824 - DNA, 1066 bp, Glycine max
  Gm_smallRNAprecursor_1657
atttcaaaaaacaaaattttcaatgttttacaaatggaaccagaatactgggacaagaatcctttcaaattaaccgccaaagtattccccccgggattccattacaggccaacagccacaaacaaaacccgcaaattctacgaattcattctaatagatacgaactcagtatctattaaacacttcaaagaccccaaagatccaaatctaaatacccattccacaatccaaatcctaaaggttatgcagccacgacgttatggccccaacttaaaccaacccaagaaattttctgcaccatttgaccccgaaggatataattattgggattacattgacgcctggaccaatgtgttctggcatcaaaatagtaaattcaagcattcatggctaatttacttcaaaaataacactgtgtataatttttcaaattggttcctccaatggtggaactacttcggaccaattccacagatattcccagaagaagtccaatagggattccaacaattcaacaagctctacaacagcaaggaatcatgaattccgacagatttgaagtacttttccagttttgccttgtcatggattttttcatggcaatacaggtacggaaaaaccgaaaacaacaaacagtatccaccatcgcagagacacgcctttgtaaaatggtggtcacaatttgatacctcaaaggctgctccagaacaagtcaagaactggttccagagcaatcctgagttcctcaaacctgctgacccggagacatctttgtttctgaatcagaagtcgcaacttgcagcattcttagcaagctcaaaatctaaagagagtcttgctcagaatctcaaagaagttctccaactacttcaacaggaagtggaagaagaaccccccaagaaggaagccgaatcatctgagacaaatgatgaccaagaagattatatatatatatatatatatagaaaacaacagagaggaagtattgaagtaacactaactaataaatatttattgagcacggttgcacagatactcccaagtcaatactatagatgttggccaa

SEQ ID NO: 8825 - DNA, 1067 bp, Glycine max
  Gm_smallRNAprecursor_1658
atttcaaaaaacaaaattttcaatgttttacaaatggaaccagaatactgggacaagaatcctttcaaattaaccgccaaagtattccccccgggattccattacaggccaacagccacaaacaaaacccgcaaattctacgaattcattctaatagatacgaactcagtatctattaaacacttcaaagaccccaaagatccaaatctaaatacccattccacaatccaaatcctaaaggttatgcagccacgacgttatggccccaacttaaaccaacccaagaaattttctgcaccatttgaccccgaaggatataattattgggattacattgacgcctggaccaatgtgttctggcatcaaaatagtaaattcaagcattcatggctaatttacttcaaaaataacactgtgtataatttttcaaattggttcctccaatggtggaactacttcggaccaattccacagatattcccagaagaagtccaatagggattccaacaattcaacaagctctacaacagcaaggaatcatgaattccgacagatttgaagtacttttccagttttgccttgtcatggattttttcatggcaatacaggtacggaaaaaccgaaaacaacaaacagtatccaccatcgcagagacacgcctttgtaaaatggtggtcacaatttgatacctcaaaggctgctccagaacaagtcaagaactggttccagagcaatcctgagttcctcaaacctgctgacccggagacatctttgtttctgaatcagaagtcgcaacttgcagcattcttagcaagctcaaaatctaaagagagtcttgctcagaatctcaaagaagttctccaactacttcaacaggaagtggaagaagaaccccccaagaaggaagccgaatcatctgagacaaatgatgaccaagaagattatatatatatatatatatatagaaaacaacagagaggaagtattgaagtaacactaactaataaatatttattgagcacggttgcacagatactcccaagtcaatactatagatgttggccaat

SEQ ID NO: 8826 - DNA, 1069 bp, Glycine max
  Gm_smallRNAprecursor_1659
atttcaaaaaacaaaattttcaatgttttacaaatggaaccagaatactgggacaagaatcctttcaaattaaccgccaaagtattccccccgggattccattacaggccaacagccacaaacaaaacccgcaaattctacgaattcattctaatagatacgaactcagtatctattaaacacttcaaagaccccaaagatccaaatctaaatacccattccacaatccaaatcctaaaggttatgcagccacgacgttatggccccaacttaaaccaacccaagaaattttctgcaccatttgaccccgaaggatataattattgggattacattgacgcctggaccaatgtgttctggcatcaaaatagtaaattcaagcattcatggctaatttacttcaaaaataacactgtgtataatttttcaaattggttcctccaatggtggaactacttcggaccaattccacagatattcccagaagaagtccaatagggattccaacaattcaacaagctctacaacagcaaggaatcatgaattccgacagatttgaagtacttttccagttttgccttgtcatggattttttcatggcaatacaggtacggaaaaaccgaaaacaacaaacagtatccaccatcgcagagacacgcctttgtaaaatggtggtcacaatttgatacctcaaaggctgctccagaacaagtcaagaactggttccagagcaatcctgagttcctcaaacctgctgacccggagacatctttgtttctgaatcagaagtcgcaacttgcagcattcttagcaagctcaaaatctaaagagagtcttgctcagaatctcaaagaagttctccaactacttcaacaggaagtggaagaagaaccccccaagaaggaagccgaatcatctgagacaaatgatgaccaagaagattatatatatatatatatatatagaaaacaacagagaggaagtattgaagtaacactaactaataaatatttattgagcacggttgcacagatactcccaagtcaatactatagatgttggccaatct

SEQ ID NO: 8827 - DNA, 1086 bp, Glycine max
  Gm_smallRNAprecursor_1660
caaattaaccgccaaagtattccccccgggattccattacaggccaacagccacaaacaaaacccgcaaattctacgaattcattctaatagatacgaactcagtatctattaaacacttcaaagaccccaaagatccaaatctaaatacccattccacaatccaaatcctaaaggttatgcagccacgacgttatggccccaacttaaaccaacccaagaaattttctgcaccatttgaccccgaaggatataattattgggattacattgacgcctggaccaatgtgttctggcatcaaaatagtaaattcaagcattcatggctaatttacttcaaaaataacactgtgtataatttttcaaattggttcctccaatggtggaactacttcggaccaattccacagatattcccagaagaagtccaatagggattccaacaattcaacaagctctacaacagcaaggaatcatgaattccgacagatttgaagtacttttccagttttgccttgtcatggattttttcatggcaatacaggtacggaaaaaccgaaaacaacaaacagtatccaccatcgcagagacacgcctttgtaaaatggtggtcacaatttgatacctcaaaggctgctccagaacaagtcaagaactggttccagagcaatcctgagttcctcaaacctgctgacccggagacatctttgtttctgaatcagaagtcgcaacttgcagcattcttagcaagctcaaaatctaaagagagtcttgctcagaatctcaaagaagttctccaactacttcaacaggaagtggaagaagaaccccccaagaaggaagccgaatcatctgagacaaatgatgaccaagaagattatatatatatatatatatatagaaaacaacagagaggaagtattgaagtaacactaactaataaatatttattgagcacggttgcacagatactcccaagtcaatactatagatgttggccaatcttggtgctttctaactagtctcaaataacttcactcaatcaaataatcaaatgaaaaatcaactcatgtctcgtgcacattaa

SEQ ID NO: 8828 - DNA, 1086 bp, Glycine max; identical to SEQ ID NO: 8827
  Gm_smallRNAprecursor_1661

SEQ ID NO: 8829 - DNA, 1137 bp, Glycine max
  Gm_smallRNAprecursor_1662
caaattaaccgccaaagtattccccccgggattccattacaggccaacagccacaaacaaaacccgcaaattctacgaattcattctaatagatacgaactcagtatctattaaacacttcaaagaccccaaagatccaaatctaaatacccattccacaatccaaatcctaaaggttatgcagccacgacgttatggccccaacttaaaccaacccaagaaattttctgcaccatttgaccccgaaggatataattattgggattacattgacgcctggaccaatgtgttctggcatcaaaatagtaaattcaagcattcatggctaatttacttcaaaaataacactgtgtataatttttcaaattggttcctccaatggtggaactacttcggaccaattccacagatattcccagaagaagtccaatagggattccaacaattcaacaagctctacaacagcaaggaatcatgaattccgacagatttgaagtacttttccagttttgccttgtcatggattttttcatggcaatacaggtacggaaaaaccgaaaacaacaaacagtatccaccatcgcagagacacgcctttgtaaaatggtggtcacaatttgatacctcaaaggctgctccagaacaagtcaagaactggttccagagcaatcctgagttcctcaaacctgctgacccggagacatctttgtttctgaatcagaagtcgcaacttgcagcattcttagcaagctcaaaatctaaagagagtcttgctcagaatctcaaagaagttctccaactacttcaacaggaagtggaagaagaaccccccaagaaggaagccgaatcatctgagacaaatgatgaccaagaagattatatatatatatatatatatagaaaacaacagagaggaagtattgaagtaacactaactaataaatatttattgagcacggttgcacagatactcccaagtcaatactatagatgttggccaatcttggtgctttctaactagtctcaaataacttcactcaatcaaataatcaaatgaaaaatcaactcatgtctcgtgcacattaatttttcccttcaccatatacaattataaaatccttttttcataagctataa

SEQ ID NO: 8830 - DNA, 1085 bp, Glycine max
  Gm_smallRNAprecursor_1663
aaattaaccgccaaagtattccccccgggattccattacaggccaacagccacaaacaaaacccgcaaattctacgaattcattctaatagatacgaactcagtatctattaaacacttcaaagaccccaaagatccaaatctaaatacccattccacaatccaaatcctaaaggttatgcagccacgacgttatggccccaacttaaaccaacccaagaaattttctgcaccatttgaccccgaaggatataattattgggattacattgacgcctggaccaatgtgttctggcatcaaaatagtaaattcaagcattcatggctaatttacttcaaaaataacactgtgtataatttttcaaattggttcctccaatggtggaactacttcggaccaattccacagatattcccagaagaagtccaatagggattccaacaattcaacaagctctacaacagcaaggaatcatgaattccgacagatttgaagtacttttccagttttgccttgtcatggattttttcatggcaatacaggtacggaaaaaccgaaaacaacaaacagtatccaccatcgcagagacacgcctttgtaaaatggtggtcacaatttgatacctcaaaggctgctccagaacaagtcaagaactggttccagagcaatcctgagttcctcaaacctgctgacccggagacatctttgtttctgaatcagaagtcgcaacttgcagcattcttagcaagctcaaaatctaaagagagtcttgctcagaatctcaaagaagttctccaactacttcaacaggaagtggaagaagaaccccccaagaaggaagccgaatcatctgagacaaatgatgaccaagaagattatatatatatatatatatatagaaaacaacagagaggaagtattgaagtaacactaactaataaatatttattgagcacggttgcacagatactcccaagtcaatactatagatgttggccaatcttggtgctttctaactagtctcaaataacttcactcaatcaaataatcaaatgaaaaatcaactcatgtctcgtgcacattaa

SEQ ID NO: 8831 - DNA, 1085 bp, Glycine max; identical to SEQ ID NO: 8830
  Gm_smallRNAprecursor_1664

SEQ ID NO: 8832 - DNA, 1136 bp, Glycine max
  Gm_smallRNAprecursor_1665
aaattaaccgccaaagtattccccccgggattccattacaggccaacagccacaaacaaaacccgcaaattctacgaattcattctaatagatacgaactcagtatctattaaacacttcaaagaccccaaagatccaaatctaaatacccattccacaatccaaatcctaaaggttatgcagccacgacgttatggccccaacttaaaccaacccaagaaattttctgcaccatttgaccccgaaggatataattattgggattacattgacgcctggaccaatgtgttctggcatcaaaatagtaaattcaagcattcatggctaatttacttcaaaaataacactgtgtataatttttcaaattggttcctccaatggtggaactacttcggaccaattccacagatattcccagaagaagtccaatagggattccaacaattcaacaagctctacaacagcaaggaatcatgaattccgacagatttgaagtacttttccagttttgccttgtcatggattttttcatggcaatacaggtacggaaaaaccgaaaacaacaaacagtatccaccatcgcagagacacgcctttgtaaaatggtggtcacaatttgatacctcaaaggctgctccagaacaagtcaagaactggttccagagcaatcctgagttcctcaaacctgctgacccggagacatctttgtttctgaatcagaagtcgcaacttgcagcattcttagcaagctcaaaatctaaagagagtcttgctcagaatctcaaagaagttctccaactacttcaacaggaagtggaagaagaaccccccaagaaggaagccgaatcatctgagacaaatgatgaccaagaagattatatatatatatatatatatagaaaacaacagagaggaagtattgaagtaacactaactaataaatatttattgagcacggttgcacagatactcccaagtcaatactatagatgttggccaatcttggtgctttctaactagtctcaaataacttcactcaatcaaataatcaaatgaaaaatcaactcatgtctcgtgcacattaatttttcccttcaccatatacaattataaaatccttttttcataagctataa

SEQ ID NO: 8833 - DNA, 1149 bp, Glycine max
  Gm_smallRNAprecursor_1666
attaaccgccaaagtattccccccgggattccattacaggccaacagccacaaacaaaacccgcaaattctacgaattcattctaatagatacgaactcagtatctattaaacacttcaaagaccccaaagatccaaatctaaatacccattccacaatccaaatcctaaaggttatgcagccacgacgttatggccccaacttaaaccaacccaagaaattttctgcaccatttgaccccgaaggatataattattgggattacattgacgcctggaccaatgtgttctggcatcaaaatagtaaattcaagcattcatggctaatttacttcaaaaataacactgtgtataatttttcaaattggttcctccaatggtggaactacttcggaccaattccacagatattcccagaagaagtccaatagggattccaacaattcaacaagctctacaacagcaaggaatcatgaattccgacagatttgaagtacttttccagttttgccttgtcatggattttttcatggcaatacaggtacggaaaaaccgaaaacaacaaacagtatccaccatcgcagagacacgcctttgtaaaatggtggtcacaatttgatacctcaaaggctgctccagaacaagtcaagaactggttccagagcaatcctgagttcctcaaacctgctgacccggagacatctttgtttctgaatcagaagtcgcaacttgcagcattcttagcaagctcaaaatctaaagagagtcttgctcagaatctcaaagaagttctccaactacttcaacaggaagtggaagaagaaccccccaagaaggaagccgaatcatctgagacaaatgatgaccaagaagattatatatatatatatatatatagaaaacaacagagaggaagtattgaagtaacactaactaataaatatttattgagcacggttgcacagatactcccaagtcaatactatagatgttggccaatcttggtgctttctaactagtctcaaataacttcactcaatcaaataatcaaatgaaaaatcaactcatgtctcgtgcacattaatttttcccttcaccatatacaattataaaatccttttttcataagctataaatcaaatacttatat

SEQ ID NO: 8834 - DNA, 1165 bp, Glycine max
  Gm_smallRNAprecursor_1667
ctaatagatacgaactcagtatctattaaacacttcaaagaccccaaagatccaaatctaaatacccattccacaatccaaatcctaaaggttatgcagccacgacgttatggccccaacttaaaccaacccaagaaattttctgcaccatttgaccccgaaggatataattattgggattacattgacgcctggaccaatgtgttctggcatcaaaatagtaaattcaagcattcatggctaatttacttcaaaaataacactgtgtataatttttcaaattggttcctccaatggtggaactacttcggaccaattccacagatattcccagaagaagtccaatagggattccaacaattcaacaagctctacaacagcaaggaatcatgaattccgacagatttgaagtacttttccagttttgccttgtcatggattttttcatggcaatacaggtacggaaaaaccgaaaacaacaaacagtatccaccatcgcagagacacgcctttgtaaaatggtggtcacaatttgatacctcaaaggctgctccagaacaagtcaagaactggttccagagcaatcctgagttcctcaaacctgctgacccggagacatctttgtttctgaatcagaagtcgcaacttgcagcattcttagcaagctcaaaatctaaagagagtcttgctcagaatctcaaagaagttctccaactacttcaacaggaagtggaagaagaaccccccaagaaggaagccgaatcatctgagacaaatgatgaccaagaagattatatatatatatatatatatagaaaacaacagagaggaagtattgaagtaacactaactaataaatatttattgagcacggttgcacagatactcccaagtcaatactatagatgttggccaatcttggtgctttctaactagtctcaaataacttcactcaatcaaataatcaaatgaaaaatcaactcatgtctcgtgcacattaatttttcccttcaccatatacaattataaaatccttttttcataagctataaatcaaatacttatatatcaattgaaaaaatcccataaggtaaaatctaatccaacctgtaccataagctttgtttatgcaagtcaaacacaaatatatactcgttttgtactc

SEQ ID NO: 8835 - DNA, 1157 bp, Glycine max
  Gm_smallRNAprecursor_1668
gatccaaatctaaatacccattccacaatccaaatcctaaaggttatgcagccacgacgttatggccccaacttaaaccaacccaagaaattttctgcaccatttgaccccgaaggatataattattgggattacattgacgcctggaccaatgtgttctggcatcaaaatagtaaattcaagcattcatggctaatttacttcaaaaataacactgtgtataatttttcaaattggttcctccaatggtggaactacttcggaccaattccacagatattcccagaagaagtccaatagggattccaacaattcaacaagctctacaacagcaaggaatcatgaattccgacagatttgaagtacttttccagttttgccttgtcatggattttttcatggcaatacaggtacggaaaaaccgaaaacaacaaacagtatccaccatcgcagagacacgcctttgtaaaatggtggtcacaatttgatacctcaaaggctgctccagaacaagtcaagaactggttccagagcaatcctgagttcctcaaacctgctgacccggagacatctttgtttctgaatcagaagtcgcaacttgcagcattcttagcaagctcaaaatctaaagagagtcttgctcagaatctcaaagaagttctccaactacttcaacaggaagtggaagaagaaccccccaagaaggaagccgaatcatctgagacaaatgatgaccaagaagattatatatatatatatatatatagaaaacaacagagaggaagtattgaagtaacactaactaataaatatttattgagcacggttgcacagatactcccaagtcaatactatagatgttggccaatcttggtgctttctaactagtctcaaataacttcactcaatcaaataatcaaatgaaaaatcaactcatgtctcgtgcacattaatttttcccttcaccatatacaattataaaatccttttttcataagctataaatcaaatacttatatatcaattgaaaaaatcccataaggtaaaatctaatccaacctgtaccataagctttgtttatgcaagtcaaacacaaatatatactcgttttgtactctgcattaatacacattattcctgtcggttgttaataacac

SEQ ID NO: 8836 - DNA, 1137 bp, Glycine max
  Gm_smallRNAprecursor_1669
taaatacccattccacaatccaaatcctaaaggttatgcagccacgacgttatggccccaacttaaaccaacccaagaaattttctgcaccatttgaccccgaaggatataattattgggattacattgacgcctggaccaatgtgttctggcatcaaaatagtaaattcaagcattcatggctaatttacttcaaaaataacactgtgtataatttttcaaattggttcctccaatggtggaactacttcggaccaattccacagatattcccagaagaagtccaatagggattccaacaattcaacaagctctacaacagcaaggaatcatgaattccgacagatttgaagtacttttccagttttgccttgtcatggattttttcatggcaatacaggtacggaaaaaccgaaaacaacaaacagtatccaccatcgcagagacacgcctttgtaaaatggtggtcacaatttgatacctcaaaggctgctccagaacaagtcaagaactggttccagagcaatcctgagttcctcaaacctgctgacccggagacatctttgtttctgaatcagaagtcgcaacttgcagcattcttagcaagctcaaaatctaaagagagtcttgctcagaatctcaaagaagttctccaactacttcaacaggaagtggaagaagaaccccccaagaaggaagccgaatcatctgagacaaatgatgaccaagaagattatatatatatatatatatatagaaaacaacagagaggaagtattgaagtaacactaactaataaatatttattgagcacggttgcacagatactcccaagtcaatactatagatgttggccaatcttggtgctttctaactagtctcaaataacttcactcaatcaaataatcaaatgaaaaatcaactcatgtctcgtgcacattaatttttcccttcaccatatacaattataaaatccttttttcataagctataaatcaaatacttatatatcaattgaaaaaatcccataaggtaaaatctaatccaacctgtaccataagctttgtttatgcaagtcaaacacaaatatatactcgttttgtactctgcattaatacacattattcctgtcggttg

SEQ ID NO: 8837 - DNA, 1121 bp, Glycine max
  Gm_smallRNAprecursor_1670
cattccacaatccaaatcctaaaggttatgcagccacgacgttatggccccaacttaaaccaacccaagaaattttctgcaccatttgaccccgaaggatataattattgggattacattgacgcctggaccaatgtgttctggcatcaaaatagtaaattcaagcattcatggctaatttacttcaaaaataacactgtgtataatttttcaaattggttcctccaatggtggaactacttcggaccaattccacagatattcccagaagaagtccaatagggattccaacaattcaacaagctctacaacagcaaggaatcatgaattccgacagatttgaagtacttttccagttttgccttgtcatggattttttcatggcaatacaggtacggaaaaaccgaaaacaacaaacagtatccaccatcgcagagacacgcctttgtaaaatggtggtcacaatttgatacctcaaaggctgctccagaacaagtcaagaactggttccagagcaatcctgagttcctcaaacctgctgacccggagacatctttgtttctgaatcagaagtcgcaacttgcagcattcttagcaagctcaaaatctaaagagagtcttgctcagaatctcaaagaagttctccaactacttcaacaggaagtggaagaagaaccccccaagaaggaagccgaatcatctgagacaaatgatgaccaagaagattatatatatatatatatatatagaaaacaacagagaggaagtattgaagtaacactaactaataaatatttattgagcacggttgcacagatactcccaagtcaatactatagatgttggccaatcttggtgctttctaactagtctcaaataacttcactcaatcaaataatcaaatgaaaaatcaactcatgtctcgtgcacattaatttttcccttcaccatatacaattataaaatccttttttcataagctataaatcaaatacttatatatcaattgaaaaaatcccataaggtaaaatctaatccaacctgtaccataagctttgtttatgcaagtcaaacacaaatatatactcgttttgtactctgcattaatacacattattcct

SEQ ID NO: 8838 - DNA, 1098 bp, Glycine max
  Gm_smallRNAprecursor_1671
attccacaatccaaatcctaaaggttatgcagccacgacgttatggccccaacttaaaccaacccaagaaattttctgcaccatttgaccccgaaggatataattattgggattacattgacgcctggaccaatgtgttctggcatcaaaatagtaaattcaagcattcatggctaatttacttcaaaaataacactgtgtataatttttcaaattggttcctccaatggtggaactacttcggaccaattccacagatattcccagaagaagtccaatagggattccaacaattcaacaagctctacaacagcaaggaatcatgaattccgacagatttgaagtacttttccagttttgccttgtcatggattttttcatggcaatacaggtacggaaaaaccgaaaacaacaaacagtatccaccatcgcagagacacgcctttgtaaaatggtggtcacaatttgatacctcaaaggctgctccagaacaagtcaagaactggttccagagcaatcctgagttcctcaaacctgctgacccggagacatctttgtttctgaatcagaagtcgcaacttgcagcattcttagcaagctcaaaatctaaagagagtcttgctcagaatctcaaagaagttctccaactacttcaacaggaagtggaagaagaaccccccaagaaggaagccgaatcatctgagacaaatgatgaccaagaagattatatatatatatatatatatagaaaacaacagagaggaagtattgaagtaacactaactaataaatatttattgagcacggttgcacagatactcccaagtcaatactatagatgttggccaatcttggtgctttctaactagtctcaaataacttcactcaatcaaataatcaaatgaaaaatcaactcatgtctcgtgcacattaatttttcccttcaccatatacaattataaaatccttttttcataagctataaatcaaatacttatatatcaattgaaaaaatcccataaggtaaaatctaatccaacctgtaccataagctttgtttatgcaagtcaaacacaaatatatactcgttttgtactc

SEQ ID NO: 8839 - DNA, 1120 bp, Glycine max
  Gm_smallRNAprecursor_1672
attccacaatccaaatcctaaaggttatgcagccacgacgttatggccccaacttaaaccaacccaagaaattttctgcaccatttgaccccgaaggatataattattgggattacattgacgcctggaccaatgtgttctggcatcaaaatagtaaattcaagcattcatggctaatttacttcaaaaataacactgtgtataatttttcaaattggttcctccaatggtggaactacttcggaccaattccacagatattcccagaagaagtccaatagggattccaacaattcaacaagctctacaacagcaaggaatcatgaattccgacagatttgaagtacttttccagttttgccttgtcatggattttttcatggcaatacaggtacggaaaaaccgaaaacaacaaacagtatccaccatcgcagagacacgcctttgtaaaatggtggtcacaatttgatacctcaaaggctgctccagaacaagtcaagaactggttccagagcaatcctgagttcctcaaacctgctgacccggagacatctttgtttctgaatcagaagtcgcaacttgcagcattcttagcaagctcaaaatctaaagagagtcttgctcagaatctcaaagaagttctccaactacttcaacaggaagtggaagaagaaccccccaagaaggaagccgaatcatctgagacaaatgatgaccaagaagattatatatatatatatatatatagaaaacaacagagaggaagtattgaagtaacactaactaataaatatttattgagcacggttgcacagatactcccaagtcaatactatagatgttggccaatcttggtgctttctaactagtctcaaataacttcactcaatcaaataatcaaatgaaaaatcaactcatgtctcgtgcacattaatttttcccttcaccatatacaattataaaatccttttttcataagctataaatcaaatacttatatatcaattgaaaaaatcccataaggtaaaatctaatccaacctgtaccataagctttgtttatgcaagtcaaacacaaatatatactcgttttgtactctgcattaatacacattattcct

SEQ ID NO: 8840 - DNA, 1177 bp, Glycine max
  Gm_smallRNAprecursor_1673
gtgtccaatctgttatgctcctatctatgaacacacatcttgtgcatctaacattattccttttagaatacctttcttatgctttattattctcatcaatgttgttaaatagcattattgcgctattgcattgtggaattccttggatgtgctattgtgactccagccgcaattgtggccgctatggatgtcgtggttgcggcatgtgtcttgcattcctcttatcatctctggagagctatgaagcacaaatttcgacactgacaccagaacgacactgacaccaacaccgcgacatggctaaattctaaaacataagacacggggacacaacatatgtgtgtgtgtgtgtatatatatatatataataagcataaaaaaattatattaagtagcactattataattgaaaagaaaatttcacaagacaaaaactttgtctctttaaaaaataatctaaagaaacgtgctaatatctttaataaagagtctcaccttaaaaaagtaccaagataaatcatcataattgaaaagataaataagaaactgttaatcctaatctatctaagttctttcttttccttcttgatcatcatcattaaaaaacacactcaagaaggaagaggaagaacttagatagattaagattaacaattttttatttatcttttcaattatgatgatttatcttggtacttttttaggtgaaactctttattaaatatattagcaagtttgtttttagattattttttaaagagacaaagtttttgccttgtgaaattttcttttgaatgataatggtgctacttaatatgattttttgatgcttattatgtgtgtgtgtgtgtgttgtgtccctatgtcttatgttttagaatttagccgtgtcctgtgcttcataggttgtcagcatttaatgattttagattgtgcttctggtcatgttctattggtgaagaattttaattgtgtctgacttttaaccttctaacagaggtatgatatgcattggacagaagcgctttcagaaggcattggaccttctgcataatgtaagtaatctacatacaattatacttgtattgatcatggtttgttcatatctgcgttttggttcagcatttgtaatagcttattggttatatattccaggttgtaactgctcccatgtcta

SEQ ID NO: 8841 - DNA, 1164 bp, Glycine max
  Gm_smallRNAprecursor_1674
ccaattttgctcaaattggatcctacaagtcctaaatcatgtataaatcatatttaaaccaaaaacaagcttcaaaccaaggcaattcaaaatctaggtatctaaaacccatcaatttaatggattttcaaggtttgagaagtgaaaatgagaattgggtaattttggggtaactctcatctcaatcaagtctataacattgatttagacttgctcaaactggttttaaggaaaaaactccaccgattcaaaatttgatccctcaacacccaatttaccctagaaatggctcttgctttcacctttgtcactcattttttctcatttgctctgcccaagcttacctacaagtcctaattgacattttaaactaggatcaactcactttagattccaattaccactaaccccaaatttggcttttcaaaccctcaaaatctcacacttttccactcacatcactaccattctcatatttaaccctaggttaactctccccatcatctctaccagttttctaccaacaatttcaacatacaaatatcacaaagcatcatcataaaaccctaaaacagaatgggtagttttactcacatcaaacatgtcaagtttagcacgctttcaacaaattctttcacaaataactaccttaaggcattaacctagtagaactacccatcatatctcccaaagacccaatacccacgaatttcatgtgagaagaagtccacccatacctgaaatttgaagccccacaacgtagaggtgtgcttcacgactccaaaaatggcttcctattgcaatttggagtagaagtgatgagcaattttggagctttaatggaggcttcaatggagaggaagaagaaaagaaaagcaacgtggtaagggggaggaaaaattttctgaatttatgctgaaggaagagagagaatttggcttttataaaaaaaaaatgattttctctttccgttttctaaaagcaatgccacatgtctcattttgagtggagcaaaaggggcccacctcttccccttgatgtgacttcatactcagccacaaggagagaaaaatttgaccttttgaatgcaaaaatttggcctaggctaattaacttcgtctttagtctacaatatttgctaatgtggccttgttttcttaactt

SEQ ID NO: 8842 - DNA, 1182 bp, Glycine max
  Gm_smallRNAprecursor_1675
caaacggctcaaaattaaaaattaattttaagctatcaaatgcaatcattgaaacccaaggtcttaggatcaacacaaactttcttctggtaaaaaaccttaagaatgaagtaatcttaggaacgcccttcattagagccctgtttcccatccaaatatctaatgaaggaataaccacaaattatttaggaagaaagattatatttaatttttctactaaaccaatttccagaaatataaatttcatagaaaataagattaatcaaattaacttcttaaaagaagaagtatcttttaataatattcagatacaactaggaaaaccccaagtaaaagataaaattcaatctttactaaatcatattgaatcaactgtctgttctgatttgccacatgcattttgggacaaaaagaaacatattgttgatctcccctatgagaaagactttagggaaaaacaaattcccacaaaagccagaccgatccaaatgaatgaagaacttcttcaatactgtcaaaaggaaatcaaggatttgcttgataaaggcctaatccggaaaagcaaaagcccatggtcttgtgcggctttttatgtcaacaaacaatctgagattgagcgtggaacaccccgcttagtcataaattacaaaccactaaatcaagcattacaatggattagatatcctattccaaacaaaagagatttgcttaacagattaaattctgcaaagatattttcaaagtttgatatgaaatctggattttggcaaatccaaatccaagaatcagataggtacaaaacagcgtttactgtacctttcgggcaatatgagtggaacgtaatgccattcggactgaagaatgccccttcagaatttcaaaaaattatgaatgatatttttaatccctattcaaaatttgtcattgtctacatagatgatgttttaatcttttcccaaaacattgaccagcatttcaaacatctccaaactttcatccatatcatcaaacaaaatggtttggcagtctccaaatcaaaaatcaatcttttccaaacacgaattcgattccttcgtcacaatatttatcaaggtacaattgttccaatcgaaaggtcaattgagtttgctagcaaattccccaaccaaatcttagacaaaacccagttacaaagatttctag

SEQ ID NO: 8843 - DNA, 1234 bp, Glycine max
  Gm_smallRNAprecursor_1676
acaaaaagaaacatattgttgatctcccctatgagaaagactttagggaaaaacaaattcccacaaaagccagaccgatccaaatgaatgaagaacttcttcaatactgtcaaaaggaaatcaaggatttgcttgataaaggcctaatccggaaaagcaaaagcccatggtcttgtgcggctttttatgtcaacaaacaatctgagattgagcgtggaacaccccgcttagtcataaattacaaaccactaaatcaagcattacaatggattagatatcctattccaaacaaaagagatttgcttaacagattaaattctgcaaagatattttcaaagtttgatatgaaatctggattttggcaaatccaaatccaagaatcagataggtacaaaacagcgtttactgtacctttcgggcaatatgagtggaacgtaatgccattcggactgaagaatgccccttcagaatttcaaaaaattatgaatgatatttttaatccctattcaaaatttgtcattgtctacatagatgatgttttaatcttttcccaaaacattgaccagcatttcaaacatctccaaactttcatccatatcatcaaacaaaatggtttggcagtctccaaatcaaaaatcaatcttttccaaacacgaattcgattccttcgtcacaatatttatcaaggtacaattgttccaatcgaaaggtcaattgagtttgctagcaaattccccaaccaaatcttagacaaaacccagttacaaagatttctaggttgtctaaattacgtaggtgaatttgtcccctacttaaacaatattgtcaaaccattgcatgataggctaaagaaaaatccgcctccttggtctgacctccatacccaaacagttaaagaaatcaaagtcaaagtccaatccataaaatgtctgtatcttcccattccacaggcattaaaaattgttgaaactgatgcatcagacatcggttacggtggcatcctcaaacaacaagtacatggtcaagaacatgtcatcgcatatacttcaaaacactggaatcctgcacaattaaagtattcaactgttaaaaaagaagttttagcaattgttttgtgcatttccaaatttcaatctgatttattaaatcaaaaatttttagtaagagttgactgcaaatcagccaaagatattttacagaaggatgtaaaaaaccttgcctcaaaacagatttt

SEQ ID NO: 8844 - DNA, 1049 bp, Glycine max
  Gm_smallRNAprecursor_1677
caatgttttacaaatggaaccagaatactgggacaagaatcctttcaaagcaaccgccaaagtattcccccagggattccattacaggccaatagccgcaaacaaaactcgcaaattctacgaattcatcctaatagatacaaactcagtatctattaaacacttcaaagaccccaaagatccaaatttaaatacccattccacaatccaaatcctgaaggttatgcagccacgacattatggctcaaacttaaaccaacccaaaaaattctctgcaccatttgatcatgcagggtataattattgggattacgttggcgcctggaccaatgtgttctggcatcaaaatagtaaattcaagcattcatggctgatttacttcaaaaataatactgcatataattttccaaattggttcttccaatggtggaactacttcggaccaattccacaaatatttccagaagaagtccaacagggattcgaacaattcaacaagctctataatagcaaggaatcacgaattccggcagatttaaagtatttttccagttttgccttgtcatggatcttttcatggcaatacagatacggaaaaactgaaaacaacaagcaatatccaccgttacagagacacgcctttgtaaaatggtggtcacaatttgatacttcaaaggctgctccagatcaagtcaagaactggttccagagcaatcctgagttccttaaacctgctgatccggagacatctttgtttctaaatcagaagtcgcaactagcagcattcttagcaagctcaaaatctaaagaaagtcttgctcagaatctcaaagaagttctccaactacttcaacaggaagtggaagaagaaccttccaagaaggaaactgaatcataagagactaatgatgaccaagaagatgatccattctaccagaatgaagatgactgttttggtatatcattggacgacgattaattagttgtaataatcatgaattattgtaactaacttgtcagtttcttttaaataatgtaatttgtaaaaa

SEQ ID NO: 8845 - DNA, 1131 bp, Glycine max
  Gm_smallRNAprecursor_1678
caatgttttacaaatggaaccagaatactgggacaagaatcctttcaaagcaaccgccaaagtattcccccagggattccattacaggccaatagccgcaaacaaaactcgcaaattctacgaattcatcctaatagatacaaactcagtatctattaaacacttcaaagaccccaaagatccaaatttaaatacccattccacaatccaaatcctgaaggttatgcagccacgacattatggctcaaacttaaaccaacccaaaaaattctctgcaccatttgatcatgcagggtataattattgggattacgttggcgcctggaccaatgtgttctggcatcaaaatagtaaattcaagcattcatggctgatttacttcaaaaataatactgcatataattttccaaattggttcttccaatggtggaactacttcggaccaattccacaaatatttccagaagaagtccaacagggattcgaacaattcaacaagctctataatagcaaggaatcacgaattccggcagatttaaagtatttttccagttttgccttgtcatggatcttttcatggcaatacagatacggaaaaactgaaaacaacaagcaatatccaccgttacagagacacgcctttgtaaaatggtggtcacaatttgatacttcaaaggctgctccagatcaagtcaagaactggttccagagcaatcctgagttccttaaacctgctgatccggagacatctttgtttctaaatcagaagtcgcaactagcagcattcttagcaagctcaaaatctaaagaaagtcttgctcagaatctcaaagaagttctccaactacttcaacaggaagtggaagaagaaccttccaagaaggaaactgaatcataagagactaatgatgaccaagaagatgatccattctaccagaatgaagatgactgttttggtatatcattggacgacgattaattagttgtaataatcatgaattattgtaactaacttgtcagtttcttttaaataatgtaatttgtaaaaagttttgtaacagttccgataaacattaccgatagtgtagaaacagtaaaaattgggtctatttaaaggagtcctcgtcccct

SEQ ID NO: 8846 - DNA, 1131 bp, Glycine max; identical to SEQ ID NO: 8845
  Gm_smallRNAprecursor_1679

SEQ ID NO: 8847 - DNA, 1086 bp, Glycine max
  Gm_smallRNAprecursor_1680
caaagcaaccgccaaagtattcccccagggattccattacaggccaatagccgcaaacaaaactcgcaaattctacgaattcatcctaatagatacaaactcagtatctattaaacacttcaaagaccccaaagatccaaatttaaatacccattccacaatccaaatcctgaaggttatgcagccacgacattatggctcaaacttaaaccaacccaaaaaattctctgcaccatttgatcatgcagggtataattattgggattacgttggcgcctggaccaatgtgttctggcatcaaaatagtaaattcaagcattcatggctgatttacttcaaaaataatactgcatataattttccaaattggttcttccaatggtggaactacttcggaccaattccacaaatatttccagaagaagtccaacagggattcgaacaattcaacaagctctataatagcaaggaatcacgaattccggcagatttaaagtatttttccagttttgccttgtcatggatcttttcatggcaatacagatacggaaaaactgaaaacaacaagcaatatccaccgttacagagacacgcctttgtaaaatggtggtcacaatttgatacttcaaaggctgctccagatcaagtcaagaactggttccagagcaatcctgagttccttaaacctgctgatccggagacatctttgtttctaaatcagaagtcgcaactagcagcattcttagcaagctcaaaatctaaagaaagtcttgctcagaatctcaaagaagttctccaactacttcaacaggaagtggaagaagaaccttccaagaaggaaactgaatcataagagactaatgatgaccaagaagatgatccattctaccagaatgaagatgactgttttggtatatcattggacgacgattaattagttgtaataatcatgaattattgtaactaacttgtcagtttcttttaaataatgtaatttgtaaaaagttttgtaacagttccgataaacattaccgatagtgtagaaacagtaaaaattgggtctatttaaaggagtcctcgtcccct

SEQ ID NO: 8848 - DNA, 1086 bp, Glycine max; identical to SEQ ID NO: 8847
  Gm_smallRNAprecursor_1681

SEQ ID NO: 8849 - DNA, 1085 bp, Glycine max
  Gm_smallRNAprecursor_1682
aaagcaaccgccaaagtattcccccagggattccattacaggccaatagccgcaaacaaaactcgcaaattctacgaattcatcctaatagatacaaactcagtatctattaaacacttcaaagaccccaaagatccaaatttaaatacccattccacaatccaaatcctgaaggttatgcagccacgacattatggctcaaacttaaaccaacccaaaaaattctctgcaccatttgatcatgcagggtataattattgggattacgttggcgcctggaccaatgtgttctggcatcaaaatagtaaattcaagcattcatggctgatttacttcaaaaataatactgcatataattttccaaattggttcttccaatggtggaactacttcggaccaattccacaaatatttccagaagaagtccaacagggattcgaacaattcaacaagctctataatagcaaggaatcacgaattccggcagatttaaagtatttttccagttttgccttgtcatggatcttttcatggcaatacagatacggaaaaactgaaaacaacaagcaatatccaccgttacagagacacgcctttgtaaaatggtggtcacaatttgatacttcaaaggctgctccagatcaagtcaagaactggttccagagcaatcctgagttccttaaacctgctgatccggagacatctttgtttctaaatcagaagtcgcaactagcagcattcttagcaagctcaaaatctaaagaaagtcttgctcagaatctcaaagaagttctccaactacttcaacaggaagtggaagaagaaccttccaagaaggaaactgaatcataagagactaatgatgaccaagaagatgatccattctaccagaatgaagatgactgttttggtatatcattggacgacgattaattagttgtaataatcatgaattattgtaactaacttgtcagtttcttttaaataatgtaatttgtaaaaagttttgtaacagttccgataaacattaccgatagtgtagaaacagtaaaaattgggtctatttaaaggagtcctcgtcccct

SEQ ID NO: 8850 - DNA, 1085 bp, Glycine max; identical to SEQ ID NO: 8849
  Gm_smallRNAprecursor_1683

SEQ ID NO: 8851 - DNA, 1149 bp, Glycine max
  Gm_smallRNAprecursor_1684
agcaaccgccaaagtattcccccagggattccattacaggccaatagccgcaaacaaaactcgcaaattctacgaattcatcctaatagatacaaactcagtatctattaaacacttcaaagaccccaaagatccaaatttaaatacccattccacaatccaaatcctgaaggttatgcagccacgacattatggctcaaacttaaaccaacccaaaaaattctctgcaccatttgatcatgcagggtataattattgggattacgttggcgcctggaccaatgtgttctggcatcaaaatagtaaattcaagcattcatggctgatttacttcaaaaataatactgcatataattttccaaattggttcttccaatggtggaactacttcggaccaattccacaaatatttccagaagaagtccaacagggattcgaacaattcaacaagctctataatagcaaggaatcacgaattccggcagatttaaagtatttttccagttttgccttgtcatggatcttttcatggcaatacagatacggaaaaactgaaaacaacaagcaatatccaccgttacagagacacgcctttgtaaaatggtggtcacaatttgatacttcaaaggctgctccagatcaagtcaagaactggttccagagcaatcctgagttccttaaacctgctgatccggagacatctttgtttctaaatcagaagtcgcaactagcagcattcttagcaagctcaaaatctaaagaaagtcttgctcagaatctcaaagaagttctccaactacttcaacaggaagtggaagaagaaccttccaagaaggaaactgaatcataagagactaatgatgaccaagaagatgatccattctaccagaatgaagatgactgttttggtatatcattggacgacgattaattagttgtaataatcatgaattattgtaactaacttgtcagtttcttttaaataatgtaatttgtaaaaagttttgtaacagttccgataaacattaccgatagtgtagaaacagtaaaaattgggtctatttaaaggagtcctcgtcccctttgtgaggcaccctttcagatagactcagaatcaggttttagagagagaagctctgcctagggaaa

SEQ ID NO: 8852 - DNA, 1137 bp, Glycine max
  Gm_smallRNAprecursor_1685
taaatacccattccacaatccaaatcctgaaggttatgcagccacgacattatggctcaaacttaaaccaacccaaaaaattctctgcaccatttgatcatgcagggtataattattgggattacgttggcgcctggaccaatgtgttctggcatcaaaatagtaaattcaagcattcatggctgatttacttcaaaaataatactgcatataattttccaaattggttcttccaatggtggaactacttcggaccaattccacaaatatttccagaagaagtccaacagggattcgaacaattcaacaagctctataatagcaaggaatcacgaattccggcagatttaaagtatttttccagttttgccttgtcatggatcttttcatggcaatacagatacggaaaaactgaaaacaacaagcaatatccaccgttacagagacacgcctttgtaaaatggtggtcacaatttgatacttcaaaggctgctccagatcaagtcaagaactggttccagagcaatcctgagttccttaaacctgctgatccggagacatctttgtttctaaatcagaagtcgcaactagcagcattcttagcaagctcaaaatctaaagaaagtcttgctcagaatctcaaagaagttctccaactacttcaacaggaagtggaagaagaaccttccaagaaggaaactgaatcataagagactaatgatgaccaagaagatgatccattctaccagaatgaagatgactgttttggtatatcattggacgacgattaattagttgtaataatcatgaattattgtaactaacttgtcagtttcttttaaataatgtaatttgtaaaaagttttgtaacagttccgataaacattaccgatagtgtagaaacagtaaaaattgggtctatttaaaggagtcctcgtcccctttgtgaggcaccctttcagatagactcagaatcaggttttagagagagaagctctgcctagggaaaaactctttgtaagcttttctttcggtttcaataaatttcaagttctatttttcatatctcccttctcccctcaccgatcctgtgcggcgctaccgccgcttcggtttctttgttttcaaaaacttggg

SEQ ID NO: 8853 - DNA, 1121 bp, Glycine max
  Gm_smallRNAprecursor_1686
cattccacaatccaaatcctgaaggttatgcagccacgacattatggctcaaacttaaaccaacccaaaaaattctctgcaccatttgatcatgcagggtataattattgggattacgttggcgcctggaccaatgtgttctggcatcaaaatagtaaattcaagcattcatggctgatttacttcaaaaataatactgcatataattttccaaattggttcttccaatggtggaactacttcggaccaattccacaaatatttccagaagaagtccaacagggattcgaacaattcaacaagctctataatagcaaggaatcacgaattccggcagatttaaagtatttttccagttttgccttgtcatggatcttttcatggcaatacagatacggaaaaactgaaaacaacaagcaatatccaccgttacagagacacgcctttgtaaaatggtggtcacaatttgatacttcaaaggctgctccagatcaagtcaagaactggttccagagcaatcctgagttccttaaacctgctgatccggagacatctttgtttctaaatcagaagtcgcaactagcagcattcttagcaagctcaaaatctaaagaaagtcttgctcagaatctcaaagaagttctccaactacttcaacaggaagtggaagaagaaccttccaagaaggaaactgaatcataagagactaatgatgaccaagaagatgatccattctaccagaatgaagatgactgttttggtatatcattggacgacgattaattagttgtaataatcatgaattattgtaactaacttgtcagtttcttttaaataatgtaatttgtaaaaagttttgtaacagttccgataaacattaccgatagtgtagaaacagtaaaaattgggtctatttaaaggagtcctcgtcccctttgtgaggcaccctttcagatagactcagaatcaggttttagagagagaagctctgcctagggaaaaactctttgtaagcttttctttcggtttcaataaatttcaagttctatttttcatatctcccttctcccctcaccgatcctgtgcggcgctaccgccgcttcggtttctttgttttcaaa

SEQ ID NO: 8854 - DNA, 1048 bp, Glycine max
  Gm_smallRNAprecursor_1687
attccacaatccaaatcctgaaggttatgcagccacgacattatggctcaaacttaaaccaacccaaaaaattctctgcaccatttgatcatgcagggtataattattgggattacgttggcgcctggaccaatgtgttctggcatcaaaatagtaaattcaagcattcatggctgatttacttcaaaaataatactgcatataattttccaaattggttcttccaatggtggaactacttcggaccaattccacaaatatttccagaagaagtccaacagggattcgaacaattcaacaagctctataatagcaaggaatcacgaattccggcagatttaaagtatttttccagttttgccttgtcatggatcttttcatggcaatacagatacggaaaaactgaaaacaacaagcaatatccaccgttacagagacacgcctttgtaaaatggtggtcacaatttgatacttcaaaggctgctccagatcaagtcaagaactggttccagagcaatcctgagttccttaaacctgctgatccggagacatctttgtttctaaatcagaagtcgcaactagcagcattcttagcaagctcaaaatctaaagaaagtcttgctcagaatctcaaagaagttctccaactacttcaacaggaagtggaagaagaaccttccaagaaggaaactgaatcataagagactaatgatgaccaagaagatgatccattctaccagaatgaagatgactgttttggtatatcattggacgacgattaattagttgtaataatcatgaattattgtaactaacttgtcagtttcttttaaataatgtaatttgtaaaaagttttgtaacagttccgataaacattaccgatagtgtagaaacagtaaaaattgggtctatttaaaggagtcctcgtcccctttgtgaggcaccctttcagatagactcagaatcaggttttagagagagaagctctgcctagggaaaaactctttgtaagcttttctttcggtttcaataaatttcaagttctat

SEQ ID NO: 8855 - DNA, 1048 bp, Glycine max; identical to SEQ ID NO: 8854
  Gm_smallRNAprecursor_1688

SEQ ID NO: 8856 - DNA, 1120 bp, Glycine max
  Gm_smallRNAprecursor_1689
attccacaatccaaatcctgaaggttatgcagccacgacattatggctcaaacttaaaccaacccaaaaaattctctgcaccatttgatcatgcagggtataattattgggattacgttggcgcctggaccaatgtgttctggcatcaaaatagtaaattcaagcattcatggctgatttacttcaaaaataatactgcatataattttccaaattggttcttccaatggtggaactacttcggaccaattccacaaatatttccagaagaagtccaacagggattcgaacaattcaacaagctctataatagcaaggaatcacgaattccggcagatttaaagtatttttccagttttgccttgtcatggatcttttcatggcaatacagatacggaaaaactgaaaacaacaagcaatatccaccgttacagagacacgcctttgtaaaatggtggtcacaatttgatacttcaaaggctgctccagatcaagtcaagaactggttccagagcaatcctgagttccttaaacctgctgatccggagacatctttgtttctaaatcagaagtcgcaactagcagcattcttagcaagctcaaaatctaaagaaagtcttgctcagaatctcaaagaagttctccaactacttcaacaggaagtggaagaagaaccttccaagaaggaaactgaatcataagagactaatgatgaccaagaagatgatccattctaccagaatgaagatgactgttttggtatatcattggacgacgattaattagttgtaataatcatgaattattgtaactaacttgtcagtttcttttaaataatgtaatttgtaaaaagttttgtaacagttccgataaacattaccgatagtgtagaaacagtaaaaattgggtctatttaaaggagtcctcgtcccctttgtgaggcaccctttcagatagactcagaatcaggttttagagagagaagctctgcctagggaaaaactctttgtaagcttttctttcggtttcaataaatttcaagttctatttttcatatctcccttctcccctcaccgatcctgtgcggcgctaccgccgcttcggtttctttgttttcaaa

SEQ ID NO: 8857 - DNA, 1070 bp, Glycine max
  Gm_smallRNAprecursor_1690
tcaaacttaaaccaacccaaaaaattctctgcaccatttgatcatgcagggtataattattgggattacgttggcgcctggaccaatgtgttctggcatcaaaatagtaaattcaagcattcatggctgatttacttcaaaaataatactgcatataattttccaaattggttcttccaatggtggaactacttcggaccaattccacaaatatttccagaagaagtccaacagggattcgaacaattcaacaagctctataatagcaaggaatcacgaattccggcagatttaaagtatttttccagttttgccttgtcatggatcttttcatggcaatacagatacggaaaaactgaaaacaacaagcaatatccaccgttacagagacacgcctttgtaaaatggtggtcacaatttgatacttcaaaggctgctccagatcaagtcaagaactggttccagagcaatcctgagttccttaaacctgctgatccggagacatctttgtttctaaatcagaagtcgcaactagcagcattcttagcaagctcaaaatctaaagaaagtcttgctcagaatctcaaagaagttctccaactacttcaacaggaagtggaagaagaaccttccaagaaggaaactgaatcataagagactaatgatgaccaagaagatgatccattctaccagaatgaagatgactgttttggtatatcattggacgacgattaattagttgtaataatcatgaattattgtaactaacttgtcagtttcttttaaataatgtaatttgtaaaaagttttgtaacagttccgataaacattaccgatagtgtagaaacagtaaaaattgggtctatttaaaggagtcctcgtcccctttgtgaggcaccctttcagatagactcagaatcaggttttagagagagaagctctgcctagggaaaaactctttgtaagcttttctttcggtttcaataaatttcaagttctatttttcatatctcccttctcccctcaccgatcctgtgcggcgctaccgccgcttcggtttctttgttttc

SEQ ID NO: 8858 - DNA, 1071 bp, Glycine max
  Gm_smallRNAprecursor_1691
tcaaacttaaaccaacccaaaaaattctctgcaccatttgatcatgcagggtataattattgggattacgttggcgcctggaccaatgtgttctggcatcaaaatagtaaattcaagcattcatggctgatttacttcaaaaataatactgcatataattttccaaattggttcttccaatggtggaactacttcggaccaattccacaaatatttccagaagaagtccaacagggattcgaacaattcaacaagctctataatagcaaggaatcacgaattccggcagatttaaagtatttttccagttttgccttgtcatggatcttttcatggcaatacagatacggaaaaactgaaaacaacaagcaatatccaccgttacagagacacgcctttgtaaaatggtggtcacaatttgatacttcaaaggctgctccagatcaagtcaagaactggttccagagcaatcctgagttccttaaacctgctgatccggagacatctttgtttctaaatcagaagtcgcaactagcagcattcttagcaagctcaaaatctaaagaaagtcttgctcagaatctcaaagaagttctccaactacttcaacaggaagtggaagaagaaccttccaagaaggaaactgaatcataagagactaatgatgaccaagaagatgatccattctaccagaatgaagatgactgttttggtatatcattggacgacgattaattagttgtaataatcatgaattattgtaactaacttgtcagtttcttttaaataatgtaatttgtaaaaagttttgtaacagttccgataaacattaccgatagtgtagaaacagtaaaaattgggtctatttaaaggagtcctcgtcccctttgtgaggcaccctttcagatagactcagaatcaggttttagagagagaagctctgcctagggaaaaactctttgtaagcttttctttcggtttcaataaatttcaagttctatttttcatatctcccttctcccctcaccgatcctgtgcggcgctaccgccgcttcggtttctttgttttca

SEQ ID NO: 8859 - DNA, 1189 bp, Glycine max
  Gm_smallRNAprecursor_1692
atggaggccggaaacacatacgtttcacatgagatgcagagagtgtactattactctacaagacgtctctgtattgttaggtataagtgtggatggtttaccattaatcggtccaacaaatcttgattgggctgatttatgtgaggaattattgggagtcagaccacaagaaggtgaaattaaaggtagtgtgattaaattaagttggctggctcaccattttgcacaaataaataatgacgacgacgaagaacaagtacgaaggtttgcccgtgcatggatactgagattcattggaggtgtcttgtccgttgacaaaaccagtaacaaagtttcgctaaggtaccttcaatttttacgtgactttgaagaatgtggcacatatgcatggggagcttccgtacttgcttttctatacagagagatgtacagtgccaccgattataaaactaaatcaatcggaggtatgtgcatcttactacaaatgtgggcatgagaacgatgtccaaccttggctccaaagaggactccttcccaagtagaaaatacaccactggggcacaggtcagtcatttttaacagcgtctttcatttcaatagaataaatggttttagggtatattaaattttaatctttgtaggtggctgcgacgtggaaaccaacatatcggcaatgatgatgtgagagtttttcgtcgcaagttggatattatgaaacgtcatgaggtaagaacatgctattgtatttgtaaaataaaaaattatatgtgttattttactacaatgttcacaactatgttgttatatgcagtttgtgtgggagccttacccatcaaccgttatatcactgttgcctcccgtttgtttagtcggaagtctcgcgtggtacgcggtggtgccactaatttgtttccaagttattgagtggcaccaaccggacagagtgttgagaaaatttgggatgcaacaaccagtttcagagtctccttcacaacccttatacattcatggcataacattaaaagggaaacatgacgaaaattggaggcaattgttcaccccaatgattcatcagtggaataatcgccatgcatttagggtcgacggttatccctgataagaaggcctattgagctttaactcggactacatggtctggtataggcaaaagacaaagatgtttgttgac

SEQ ID NO: 8860 - DNA, 1051 bp, Glycine max
  Gm_smallRNAprecursor_1693
tttaagatattttttgggttaatatatattttaaaatctgaattttgtataataatacatttattttagtaaatatttattttgtataataatctgaatttttaaatttttaatttaactattttattaaatataattagtttgtttatgttattagatttaattaaaaatgataaaactaaagcttttaacaatttatttatataagaacattatactatgtcatcaataaaatatttaaacaatgacatttgtctaaggaaaaactaagatgaggatacattaggacaattatttctgttatgaccatgttgccggcaaagtccacatttttttctacttgctctttcattttcgtcttcgtccatctcagtaggaatgcgagttgaaacgggacgaccctttgcagtcctctttctccttggatcaggaccccactgatctccttcatattcttgccacattgatttgtgtggcaataaaccaaaggagttgtcgtagatgtgcaaaatgtgttgtaaagtgaatatcatcggcacataggtcataggatcaacattgacagatttacaggcagtcatgacgtgagaacacggtaaatgtttagcctgaaattcaccacaatcacacttttgggattgtaacattactctaaaccttccaggtggtctgggtgtttcaagtggggattgagtctctattataataaaagtgtgattgtgtctgtcgaattcatttacaatgtgtgtattagattcttgttgatcactattgattgcatcgaagacgacttcagaatactgtgagccggagttgatcattgcctgagtttgtcgacctctattagcaaagagttgtgcggtcttgaaataggtctcctcaaccaatgatgacaccggcaaatgtcttgtgtttttgaacatgtaattaacagactctgacaaattggtagtcatatgtccccaatgtttcccctcatcaaagcattgtactcatttttgtttggataattgatcaagtcattcagctgcacttggcttattcgcacgaa

SEQ ID NO: 8861 - DNA, 1167 bp, Glycine max
  Gm_smallRNAprecursor_1694
aataatacatttattttagtaaatatttattttgtataataatctgaatttttaaatttttaatttaactattttattaaatataattagtttgtttatgttattagatttaattaaaaatgataaaactaaagcttttaacaatttatttatataagaacattatactatgtcatcaataaaatatttaaacaatgacatttgtctaaggaaaaactaagatgaggatacattaggacaattatttctgttatgaccatgttgccggcaaagtccacatttttttctacttgctctttcattttcgtcttcgtccatctcagtaggaatgcgagttgaaacgggacgaccctttgcagtcctctttctccttggatcaggaccccactgatctccttcatattcttgccacattgatttgtgtggcaataaaccaaaggagttgtcgtagatgtgcaaaatgtgttgtaaagtgaatatcatcggcacataggtcataggatcaacattgacagatttacaggcagtcatgacgtgagaacacggtaaatgtttagcctgaaattcaccacaatcacacttttgggattgtaacattactctaaaccttccaggtggtctgggtgtttcaagtggggattgagtctctattataataaaagtgtgattgtgtctgtcgaattcatttacaatgtgtgtattagattcttgttgatcactattgattgcatcgaagacgacttcagaatactgtgagccggagttgatcattgcctgagtttgtcgacctctattagcaaagagttgtgcggtcttgaaataggtctcctcaaccaatgatgacaccggcaaatgtcttgtgtttttgaacatgtaattaacagactctgacaaattggtagtcatatgtccccaatgtttcccctcatcaaagcattgtactcatttttgtttggataattgatcaagtcattcagctgcacttggcttattcgcacgaatatccccaagatgtcgccagtgcatcttctccgtgtgtatgcgtaccctgtaaatatttaatcaatgtattatgttataaaatttgattgaaagaaaattataacgaataaataaaatagattctcaccagccaacataagtggtttctttaaatgtttgtagttt

SEQ ID NO: 8862 - DNA, 1092 bp, Glycine max
  Gm_smallRNAprecursor_1695
ggacaattatttctgttatgaccatgttgccggcaaagtccacatttttttctacttgctctttcattttcgtcttcgtccatctcagtaggaatgcgagttgaaacgggacgaccctttgcagtcctctttctccttggatcaggaccccactgatctccttcatattcttgccacattgatttgtgtggcaataaaccaaaggagttgtcgtagatgtgcaaaatgtgttgtaaagtgaatatcatcggcacataggtcataggatcaacattgacagatttacaggcagtcatgacgtgagaacacggtaaatgtttagcctgaaattcaccacaatcacacttttgggattgtaacattactctaaaccttccaggtggtctgggtgtttcaagtggggattgagtctctattataataaaagtgtgattgtgtctgtcgaattcatttacaatgtgtgtattagattcttgttgatcactattgattgcatcgaagacgacttcagaatactgtgagccggagttgatcattgcctgagtttgtcgacctctattagcaaagagttgtgcggtcttgaaataggtctcctcaaccaatgatgacaccggcaaatgtcttgtgtttttgaacatgtaattaacagactctgacaaattggtagtcatatgtccccaatgtttcccctcatcaaagcattgtactcatttttgtttggataattgatcaagtcattcagctgcacttggcttattcgcacgaatatccccaagatgtcgccagtgcatcttctccgtgtgtatgcgtaccctgtaaatatttaatcaatgtattatgttataaaatttgattgaaagaaaattataacgaataaataaaatagattctcaccagccaacataagtggtttctttaaatgtttgtagtttgagttaccacgaagaaagttttgtgcaatgtggcgcaggcaaaagaaatgggatgtgtcctggacccataagttacttgggttgttgtaggcacttataattgaggggtgtcggtctgaaataagagaaatgttaatttgcggagtaacatgtcttctca

SEQ ID NO: 8863 - DNA, 1235 bp, Glycine max
  Gm_smallRNAprecursor_1696
gcttttcttcttccttcttctccaccattgaagcctccattgaagctccaaaattgctcatcatttctactccaaaatgcaaagagaagccattttcggagtcttgaagcacacctctacttcatgaggcttcaaatttcaagtatgggtggacttcttctcacatgaaattcatgggtgttgggtttttgggagtaatgatgggtagttctactaggttattgccttagggtagttatttgtgaaggaatttgttgaaatcatgctaaacttgacatgtttgatgtgagtaaagctacccattctgttttaaggttttatgatgatgctttgtgatatttgtatgctaaaattgttgatagaaaactggtagagatgatggggagagttaacttagggttaaatgtgagaatgataatgttgtaggtagaaaagtgtgagattttgagggttagagaagccaaatttggggttagtggaaattggagtctaaagtgagttgatcctagtttaaaatgtcaattaggacttgtagaaaagcttgggcaaagcaaataagaaaaaaatgagtgacaaatgtgaaagaaaagagccatttcttgggtgaattggtgttgagaggtcaaattttgaattggtggagttttcaccttaaaaccagtttgagcaagtctaaatcaatgttatagacttgattgagatgagattttaccccaaaattatccaattctcattttcactcttcaaaccttgaaaattcactaaattgaggggttttggatacctatattttgatttaccttggtctgaagtttgcttttggtttaaatatgatttatacatgatttaggacttgtaggatccaatttgagaaaaattggatgtgggcaagttggatttcgaaatctgccattttatgcagaacaatgctgtcaaaattgtgcaacagttttttacatagagcagaaaaatatttatgcattgctagtcacaggaagggtagtacacctcgggttccaggcattttctagcagatcccaacggtcaaaatttagatttctgaattagcaacctccagcaaaaatttcaaggcgatccaacgtttaacgaatcggaactaagagaatgttactgagtaaattttgcctattatgcaaaaaaaatggtgctgcagtgcaggtcaggggaaaggtagtatatatcgtgttctagaaattttctagcatatcccaacg

SEQ ID NO: 8864 - DNA, 1157 bp, Glycine max
  Gm_smallRNAprecursor_1697
aggttattgccttagggtagttatttgtgaaggaatttgttgaaatcatgctaaacttgacatgtttgatgtgagtaaagctacccattctgttttaaggttttatgatgatgctttgtgatatttgtatgctaaaattgttgatagaaaactggtagagatgatggggagagttaacttagggttaaatgtgagaatgataatgttgtaggtagaaaagtgtgagattttgagggttagagaagccaaatttggggttagtggaaattggagtctaaagtgagttgatcctagtttaaaatgtcaattaggacttgtagaaaagcttgggcaaagcaaataagaaaaaaatgagtgacaaatgtgaaagaaaagagccatttcttgggtgaattggtgttgagaggtcaaattttgaattggtggagttttcaccttaaaaccagtttgagcaagtctaaatcaatgttatagacttgattgagatgagattttaccccaaaattatccaattctcattttcactcttcaaaccttgaaaattcactaaattgaggggttttggatacctatattttgatttaccttggtctgaagtttgcttttggtttaaatatgatttatacatgatttaggacttgtaggatccaatttgagaaaaattggatgtgggcaagttggatttcgaaatctgccattttatgcagaacaatgctgtcaaaattgtgcaacagttttttacatagagcagaaaaatatttatgcattgctagtcacaggaagggtagtacacctcgggttccaggcattttctagcagatcccaacggtcaaaatttagatttctgaattagcaacctccagcaaaaatttcaaggcgatccaacgtttaacgaatcggaactaagagaatgttactgagtaaattttgcctattatgcaaaaaaaatggtgctgcagtgcaggtcaggggaaaggtagtatatatcgtgttctagaaattttctagcatatcccaacggtcacaatttagatttctgtattaggaacctccagtaaacatttcaaggcgatccaacggttagcgaattggaacgaagagaatgttactgaggtatgtgactaggaaaaactatggaatttgaatgagttttggac

SEQ ID NO: 8865 - DNA, 1170 bp, Glycine max
  Gm_smallRNAprecursor_1698
aagtcaaataaagggataaaggtgggcccttattgctccacttaaaatgggacatgtggcattactaaaaaaaaaggaaaagaaaatctgtttttacaaaaaaaacagcccaaaatcttctctctcttcattcagaaatttcagcagctcttcttctcccttccacgtagcttttcttcttccttcttctccaccattgaagcctccattgaagctccaaaattgctcatcatttctactccaaattgcaaagagaagccattttcggagtcttgaagcacacctctacttcgtggggcttcaaatttcaggtatgggtggacttcttctcacatgaaattcgtgggtgttgggtttttgggagttatgatgggtagttctactaagtttttgccttagggtagttatttgtgaaggaatttgttgaaatcatgctaaacttgacatgtttgatgtgagtaaagctacccattctgttttagggttttatgatgatgctttgtgatatttgtatgctgaaattgttgatagaaaactggtagagatgatggggagagttaacttagggttaaatgtgagaatgataatgttgtaggtagaaaagtgtgagattttgagggttagagaagccaaatttggggttagtggaaattggagtctaaagtgagttgatcctagtttaaaatgtcaattaggacttgtagaaaagcttgagcagagcaaataagaaaaaaatgagtgacaaatgtgaaagaaaagagccatttcttgggtgaattgggtgttgagaggtcaaattttgaatcggtggagtttcaccttaaaaccagtttgagcaagtctaaatcaatgttatagacttgattgagatgagagtttaccccaaaattatccaattctcattttcactcttcaaaccttgaaaattcactaaattgaggggttttggatacctatattttgatttgccttggtctgaagtttgcttttggtttaaatatgatttatacacgatttaggacttgtaggatccaatttgagcaaaattggatgtgggcaagttggattttgaaatctgtcattatatgcagaacaatgctgtcaaaattgtgcagcagtttttttacatagtgcagaaaaatgcttatgcattgctagtcacaggaaggg

SEQ ID NO: 8866 - DNA, 1235 bp, Glycine max
  Gm_smallRNAprecursor_1699
gcttttcttcttccttcttctccaccattgaagcctccattgaagctccaaaattgctcatcatttctactccaaattgcaaagagaagccattttcggagtcttgaagcacacctctacttcgtggggcttcaaatttcaggtatgggtggacttcttctcacatgaaattcgtgggtgttgggtttttgggagttatgatgggtagttctactaagtttttgccttagggtagttatttgtgaaggaatttgttgaaatcatgctaaacttgacatgtttgatgtgagtaaagctacccattctgttttagggttttatgatgatgctttgtgatatttgtatgctgaaattgttgatagaaaactggtagagatgatggggagagttaacttagggttaaatgtgagaatgataatgttgtaggtagaaaagtgtgagattttgagggttagagaagccaaatttggggttagtggaaattggagtctaaagtgagttgatcctagtttaaaatgtcaattaggacttgtagaaaagcttgagcagagcaaataagaaaaaaatgagtgacaaatgtgaaagaaaagagccatttcttgggtgaattgggtgttgagaggtcaaattttgaatcggtggagtttcaccttaaaaccagtttgagcaagtctaaatcaatgttatagacttgattgagatgagagtttaccccaaaattatccaattctcattttcactcttcaaaccttgaaaattcactaaattgaggggttttggatacctatattttgatttgccttggtctgaagtttgcttttggtttaaatatgatttatacacgatttaggacttgtaggatccaatttgagcaaaattggatgtgggcaagttggattttgaaatctgtcattatatgcagaacaatgctgtcaaaattgtgcagcagtttttttacatagtgcagaaaaatgcttatgcattgctagtcacaggaagggtagtacatctcgggttctaggcattttcttgcagatcccaacggtcaaaatttatatttctgtattaggaacctccatcaaaagtttcaacgcgatccaatggttaacaaatcggaacgaagagaatgttactaagtaaattttgcctattatgcagaaaaatggtggtgcagtgcaggtcaggggaaaaagtagtatatatcgtgttctggatattttctagaagatcccaac

SEQ ID NO: 8867 - DNA, 1083 bp, Glycine max
  Gm_smallRNAprecursor_1700
gaagaagctgatatgttcttactggataggaatatgattcatataatgtgggtagtcactacggtggactagcatagatgcattcgagtctgatttcagcaaaaaaaagttatattggtttttttttctcatttttttgttggggtgatatatattctgttcgcctgaaaggtaatgtcaactttgttcttcagcatttgcttcatcagatgaagcttgtataattttctccaatcttttcaatgtaataggaattcttcttgacaggaatttatccatacagttgccttctcttatcatttttttttcttttttgattcctcttgttttccccaacaggtatatttcattaatcatagtagagctacaaaggagtgttgctaggtgcacccagtattattgctggtacacccaacatttaattaaaataccaaaactacccctacacttttttcgcatttgtgatgggtgtgtgtgagtgtgatctgtaaatcgtacggatcaagttgatccgtaagattgatacggatcaacttgatccgtaagctttttacggaacaatacggatcaacatgatccgtaaaagtcttacggatcaagttgatccgtaaaaagcttacggatcacgttgatccgtattgttccgtaaaaggtttacggatcaagttgatccataaggtttctacggattaagttgatccgtaagacttttacggatcaacttaaatggcttacggatcaagggtattttcgttattttaccttaagtgctgggtgtatcagcaataatgttgggtgcacctagcaacacccgctacaaagttatccacgaagcccctcacacaatctcacataggcctagcccttacacggggaatccatgaaaactaatgtaaagttttgtaaatggaatcgttactctattccttgtgttggattatcatctaagcacatatacatttttaatgtaaagacatattttcaaaggtacattttatacacgagtaacgtaatcttgtcaaataaggattttagtacttacgaaaaatcatgcttaacttctcatgaaaacacttagtaaaa

SEQ ID NO: 8868 - DNA, 1046 bp, Glycine max
  Gm_smallRNAprecursor_1701
aggtatgtcgaatggttagcaaatatagtccctgtcattaaaaagaatggaactcttagagtatgcatagattttagggatttaaataatgctacacctaaagatgaatatgctatgccagtagcggaaatgttggtagattcagcagctggcttcgaatttttaagcatgttagatggttattctggttataaccaaatatttattgctgaaagtgatgtgtcaaaaacagcatttcgatgccctggtgctttaggcacttatgaatgggtggttatgccctttgggttgaaaaatgctggggccacttatcaaagggccatgaattccatgtttcatgattttattgacacatttatgcaagtttatattgatgatataatcatcaaatcctcctcagaagatagccatttggattaccttaggcaatctttcgaacgaatgaggaaacatggattaaaaatgaatccattaaagtgtgctttttgtgtgcgtgcaggagatttccttggttttgtggtgcataaaaaaggcattgagataaatcaaaacaagacaaaggctattcttgagacgaagcctccttcgaccaaaaaacagcttcagtctttgctaggaaaaatcaacttcttgaggcgattcatttcgaatctaagtggcaaagctcaaactttttcgccattacttcgactcaagaaagatgaaccattcaaatgggatgaagtgcatcaaaaggctttcgatgaaattaaagaatatctgatcaagcctcctgtgttaatgcctcctagtcgaaacaagactatgaagttgtatattgctgcgtctgacaagaccattggtagcatgttggctcaggaagatgatgatggcgtagagcatgcaatttattatcttagtcgtgtactaaatgatgcagaaactagatatactgccatagaaaaactttgtctttgtttgtatttctcttgtgcaaaacttaagcaatatataaagcctgttgatgtttatgtatattctcattatgatattattaagcacatgtt

SEQ ID NO: 8869 - DNA, 1064 bp, Glycine max
  Gm_smallRNAprecursor_1702
gtgcatcacgtagtagccacattcagtgattcctttttgtctattacactaaatacataatgaaatttggatattaattaaacattaactacaattagtgtacacacacataaaatatatataagtagaatttttatttaaatcacgtaccttaacaacaatccacctaacagcaaccttggaattaggttgtggagtatcatcaagtcctttcaaagcactagtgttgaatatgaggaacattaaaatattgatgtcgttgagttatgtcaatgaaaatgtattgtaaacaatactgacctgttaattattcccttaaggtagttgtctggcctattatgtaaagaacaaaaccagacaactaggttttccttaggcagaatgacgaccatttgccagtgtccgctgcaatagagacgaatatgagttattgtagtagtatagattatttaaattcaattgttgtgtttgacttacccattcaggtaggctccaaggtaaacatctcattttgaactctgtatccaactcttaatgtaactttcagattcaaattgtgattgcccagatctctgaatggactgtggctcgacgaatccatacacatcagaattccccgctcgcacacttgtctcagtcagatggctgtgttgttaagccaaatttaattatgtatgaatttaaaacaattactttggtaattaacagtaatctaaaatgacttatagaatctacaactgtataacagatatgctgagacattgaccaccgtgtgcaatttcagagagatcttcgtgctttatatataacgggaagttttgattaaacaccccgaatatggtagcatcccacataacctggagaggcttcaaaaacagttgtgggatggtcaatgtcatcaggtacaggggatcatcgacctcttcatccaggctttctggaggttttgctggagacatagctgcctgttgatcaaacatagttaattagcaagttttgattacagtgaacaaattaattgaaaaaaataaacatataatcagagaaaaatacatgttctgata

SEQ ID NO: 8870 - DNA, 1036 bp, Glycine max
  Gm_smallRNAprecursor_1703
tttggatattaattaaacattaactacaattagtgtacacacacataaaatatatataagtagaatttttatttaaatcacgtaccttaacaacaatccacctaacagcaaccttggaattaggttgtggagtatcatcaagtcctttcaaagcactagtgttgaatatgaggaacattaaaatattgatgtcgttgagttatgtcaatgaaaatgtattgtaaacaatactgacctgttaattattcccttaaggtagttgtctggcctattatgtaaagaacaaaaccagacaactaggttttccttaggcagaatgacgaccatttgccagtgtccgctgcaatagagacgaatatgagttattgtagtagtatagattatttaaattcaattgttgtgtttgacttacccattcaggtaggctccaaggtaaacatctcattttgaactctgtatccaactcttaatgtaactttcagattcaaattgtgattgcccagatctctgaatggactgtggctcgacgaatccatacacatcagaattccccgctcgcacacttgtctcagtcagatggctgtgttgttaagccaaatttaattatgtatgaatttaaaacaattactttggtaattaacagtaatctaaaatgacttatagaatctacaactgtataacagatatgctgagacattgaccaccgtgtgcaatttcagagagatcttcgtgctttatatataacgggaagttttgattaaacaccccgaatatggtagcatcccacataacctggagaggcttcaaaaacagttgtgggatggtcaatgtcatcaggtacaggggatcatcgacctcttcatccaggctttctggaggttttgctggagacatagctgcctgttgatcaaacatagttaattagcaagttttgattacagtgaacaaattaattgaaaaaaataaacatataatcagagaaaaatacatgttctgataaacgcttcacaagatgtgttggccaagcaaggaaggt

SEQ ID NO: 8871 - DNA, 1053 bp, Glycine max
  Gm_smallRNAprecursor_1704
ctgagggagcaacacaactctcctttgtgctgacacgaggacctgagggaccaacctttggctctggaggtagtgcaagtccttgtgattgcatctgagactgaaactgggactgcatctggctgaaggatgccatcatctttcgagtcactttttctgtgattgactcctccagttggtctctgatttgttgggtcagctgttctaggtcttcaggaggcatggaggaagaactgcgggatgttcgtgaagccgatccaaagtattgcttaatggtgacaccggctccaacaacacgagcacgaccagggtgctctggtcgcccaatggtagcagccaggatatcctgacgtccatgggggacgaaagatccctgtgacgcctgctcgtccaaagaatcatgtaccgaacacatatttgtccaaggaattcacaaaatacacaaagataattacaattattaattaaaaatgacttacaatcctgtcagctatttcctttgctgcctcagacgtcatctgtccagttttcttcatgcgggccatcttccatttcacgtggcgtctgatgggagatggagggtcaatgatgctctcagtgcttccaaactgggcagcttcttccagttttttctttgtcttctcagccatgagcttttcttctaaatattcataacccccacgagacaatacgtggggggcagtgttttgcttctgggaggcctgttcctttttccgcacatcctgcaaaattttaacattaatgaaaatgattattacaataaattataagaagtgattttgttgtggaaaacaactaaaatgacaaagtacatacctcccatgaggggtctctgcgggtctgacaaaactgggcccatttctccttgctaatgccatatttttcacagacaatgtcgtccacatcgtccttgtcggctacaagtgcccatttcctagtcaagtcagatctaaactgcctccagcgctcgtcgacaatttgaagaattttcttctttgtcctactgtcagaagcttcagggatttcaaattc

SEQ ID NO: 8872 - DNA, 1183 bp, Glycine max
  Gm_smallRNAprecursor_1705
acttagacgttcataccatgcccttggggcttgtttcaaaccatataaagcctttttcaatctataaacatgatttggcttatctgatatttcaaatcctggaggttgttcaacatatacttcttcttgaattaatccatttagaaaagcacttttaacatccatttgataaagcttaaaattcattatagatgcataggctaaaagcattctaatggcttttaatcttgcaactggagcatatgtttcttcataatctataccttcttcttgattgtatccttttgcaactaatctagccttattcctaatgattatgccatgttcatctaacttattcctaaatacccattttgttcctatgatagggtagttttcaggtttctttactgattcccatacattgtttctttcaaactaatttagttcttcttgcatagcaactatccaatgatcatctagtatggcttcatttatatttttaggttcaaccatagacacaaaagtcatattattgcataaatctttaagagaatgtctagttgttacccctttagagatatcaccaataatgttgtcaaggggatgattttttgaagctttccattcttttggaagttcatcattggatttgacttcttctggaggatcttcattgcttcctataccttttcctttagaatcttgtccatgaatatgcatttgttctaaagattctgcaacatcatctaaaatatcttttcttggagaaatagcattagactcatcaaaggaaacatgaatagattcttcaatagtcatagttcttttattatatattctataggctttactatgcaatgaatatccaagaaagatgccttcatcagacttagcatcaaattttcctagattatctttaccattattaagcacaaaacatttgcacccaaaaacatgaagatgtgaaatgttgggttttctaccattaaacaattcatatggagttttctttaaaatgggtcttattaaagccctattcaagatataacatgcagtattaacggcttaagcccaaaaatattttggaagaggagtatcattcaataaggttctagcaatctcttccaaagacctatttttcctttcaacaactccattttgttgaggggttctaggtgcagaaaaattatgttcaatgtca

SEQ ID NO: 8873 - DNA, 1165 bp, Glycine max
  Gm_smallRNAprecursor_1706
gttctttgattcagttgagattaattctcactttgggatttcgttacatttaaaaataataatttttacttgaggatgtattttgtagaaataaaattgggtcttcctcggcaaattaagcttaattgagctaacccattgggtgtagcttatagcatttgattactccccggcaaggaaaggacgtagagtgttgctaggtgcacccagtattctaagaaaatgacgaaattgtccttgtttggttttcctcttccggatcaacttaatccgtaacttccagatcaacttaatctggaagtctcttacggatcaagttgatctggaagagacttctggatcaacttgatccgaaagaggaaaaataaaaattttgttaattatacaagatatttaaagatatttatttcattaattataatataattaaatatatttatttattttattaattataatatatttataaatattgatttattataaataattaatgctaatcaatcataatcataattcatgctaatcaatcaataatgttaatcaatcataattccctaaaagaggatataaataatttcagagttagtaatcataatgcagtttttgaaattgctaattctgaaattatttatatcctcttttagggaattatgattgattagcatgaattatgattatgattgattagtattaattatttataataatttaatatttataaatatattataattaataaaataaataaatatatttaattatattataattaatgaaataaatatcttgtataattaacaaaaattttatttttcctcttccggatcaacttgattcgtaagagacttccggattaagttgatccagaagttacggatcaacttgatccggaagaggaaaaccaaacaaggataattttgttatttttttagaatgctgggtgcaccaacaataatgctgggtgcacctagcaacactcaagaagtatcgaggaatgaaaatatggaacgatatattcacgtgcgaaggaaaaaaatcatgtttggttgagaaaaaaaaaatgaagagattggtcgagaacaaagtgaaggaaaaaaaaatcatgtttggttgagaaaaaaaaatgaagagattgacttttaagtttttttttttttttttg

SEQ ID NO: 8874 - DNA, 1093 bp, Glycine max
  Gm_smallRNAprecursor_1707
cagacatctatgttaaaggaatgagagttgctaggtgcacccagcaatattactggtgcacccagcaatttattgaaactaccattttacccttcattaaaaaagtttaaaatatttaaatagttttcttctcctctctcggaatcactcagccacttcttctttcttatgcttttcttcctttactcacctcttccgcgagccttctcctccaccgcgagcccagctgctgctttttcggttggacgccatttccgttcgaggtaggtgtccctaatcttccctttgcttttattatgcactgtagttgtagcatttagggtaggttagaagaaccttagattaggggaaccttagggtagaagacgagagcaggagacgccggaaaaaatggggaaatggctgacggcggagtcttccggaagacccgttaggggttcttccggaagaaccttttccggaaagtttccggaagaagtgttcttccggaagtaaccaaacgtcttccggaagaacacttcttccggaagactctcgaaaaaggttcttccgagaactttccagaagaagtggttcatccggaagaaatccggaagacgccctcttccggaagaacttttaaattttcggaagacctttccggaagaaccacttcttccggaatgtttccggaagaaccacttcttccggaagtggtttttttgtttcttttttttgctttttattttttttataatttttttaaacagaaattgttttgttttttttttaaaatgaattattgtatttattttggttattttgttttttagattttatgaaaaatgaggtttgggtttttgatgtgatgttttttttataatttaaattgtgtatttttactaaatattaatttgtaaattatttgttttattacaaatgaagtattttattttctaaaaaaattgtggatgtttactaaataatttttttttacattagttgtttaattttttttaaaattaagttgtggatgtttagtaatgaattatttttatattagttgtgttttttttataaatgaagttgtttattttttttttttaaaaattaa

SEQ ID NO: 8875 - DNA, 1080 bp, Glycine max
  Gm_smallRNAprecursor_1708
atgatttcgttttagaaacaatggtcctattcgacacaggggctgattcaaactgcattttagaaggattaattcctacaaaattctttgagaaaacctcagaaaaattaagtacggcaaacggctcaaaattaaaaattaattttaagttatcaaatgcaatcattgaaaaccaaggtcttaagattaacacaaactttcttctggtaaaaaaccttaagaatgaagtaatcttaggaacgcccttcattagagccctgtttcccatccaaatatctaatgaaggaataaccacaaattatttaggaagaaaaattatatttaatttttctactaaaccaatttccagaaatataaatcttatagaaaataagattaatcaaattaacttcttaaaagaagaagtatcttttaataatattcaaatacaactggaaaaaccccaggtaaaagaaaaaattcaatctttattaaatcatattgaatcgaccgtctgttctgaattgccacatgcattttgggacagaaagaaacatattgttgatctcccttatgagaaagactttagagaaaaacaaattcccacaaaagccagaccaatccaaatgaatgaagaacttcttcaatactgtcaaaaagaaatcaaggatttgcttgacaaaggcctaatccggaaaagcaaaagcccatggtcttgtgcggctttttatgtcaacaaacaatctaagattgagcgtggaacaccccgtttagtcataaattacaaacgtctaaatcaagcattacaatggattagatatcctgttccaaacaaaaaagatttgcttaacagattaaattctgcaaagatattttcaaaatttgatatgaaatctggattttggcaaatccaaatccaagagtcagataggtacaaaacaacttttactgtacctttcgggcaatatgaatggaatgtgatgccattcggattgaagaatgccccttcagaatttcaaaaaattatgaatgatatttttaatccttattcaaaatttgtcattgtctacatagatgatgttttaatcttttcctaaaata

SEQ ID NO: 8876 - DNA, 1038 bp, Glycine max
  Gm_smallRNAprecursor_1709
tacctttcgggcaatatgaatggaatgtgatgccattcggattgaagaatgccccttcagaatttcaaaaaattatgaatgatatttttaatccttattcaaaatttgtcattgtctacatagatgatgttttaatcttttcctaaaatattgaccaacatttcaaacatctccaaaccttcatccatatcatcaaacaaaatggtttggcagtctccaaatcaaaaatcaatcttttccaaactcgaattcgattccttggtcacaatatttatcaaggcacaatcattccaatagaaaggtcaatagagtttactagcaaatttcccaaccaaatcttagacaaaacccagttacaaagatttctaggttgtctaaattacgtaggagaatttgtcccctacttaaacaatgttgtcaagccattgcatgatagactaaagaaaaatctgcctccttgatctgacctccatacccaaacagttaaagaaatcaaaaacaaagtccaatccataaaatgtctgtatcttcccattccacaggcattcaaaattgtcgaaactgatgcatcagacatcggttacggtggcatcctcaaacaacaagtaaatggtcaagaacatgtcatcgcatatacttcaaaacattggaatcctgcacaattaaaatattcaactgttaaaaaagaagttttagcaattgttttgtgcatttccaaatttcaatctgatctattaaatcaaaaaattttagtaagggttgactgcaaatcagccaaagacattttacagaaggatgtaaaaaaccttgcctcaaaacagatttttgcaagatggcaagctattttaagcatctttgattttaatatagaatatatcaagggctcttccaactctctacctgactacctcacccgtgaatttttacagaaaattcccgatgcctcctaaggtgtctagttcctccggcagaggagggagatccagtacaaaaggaaaaaaggttctattggctctaccagagccaataaccaaaaag

SEQ ID NO: 8877 - DNA, 1121 bp, Glycine max
  Gm_smallRNAprecursor_1710
gtgatgccattcggattgaagaatgccccttcagaatttcaaaaaattatgaatgatatttttaatccttattcaaaatttgtcattgtctacatagatgatgttttaatcttttcctaaaatattgaccaacatttcaaacatctccaaaccttcatccatatcatcaaacaaaatggtttggcagtctccaaatcaaaaatcaatcttttccaaactcgaattcgattccttggtcacaatatttatcaaggcacaatcattccaatagaaaggtcaatagagtttactagcaaatttcccaaccaaatcttagacaaaacccagttacaaagatttctaggttgtctaaattacgtaggagaatttgtcccctacttaaacaatgttgtcaagccattgcatgatagactaaagaaaaatctgcctccttgatctgacctccatacccaaacagttaaagaaatcaaaaacaaagtccaatccataaaatgtctgtatcttcccattccacaggcattcaaaattgtcgaaactgatgcatcagacatcggttacggtggcatcctcaaacaacaagtaaatggtcaagaacatgtcatcgcatatacttcaaaacattggaatcctgcacaattaaaatattcaactgttaaaaaagaagttttagcaattgttttgtgcatttccaaatttcaatctgatctattaaatcaaaaaattttagtaagggttgactgcaaatcagccaaagacattttacagaaggatgtaaaaaaccttgcctcaaaacagatttttgcaagatggcaagctattttaagcatctttgattttaatatagaatatatcaagggctcttccaactctctacctgactacctcacccgtgaatttttacagaaaattcccgatgcctcctaaggtgtctagttcctccggcagaggagggagatccagtacaaaaggaaaaaaggttctattggctctaccagagccaataaccaaaaaggcaactacatcatcttctgggtcacctacccagactgggtcatcaacccagaaaggaaagcttgaagggtcattgacccagataactaccgtcaaacctgagtcatcaa

SEQ ID NO: 8878 - DNA, 1122 bp, Glycine max
  Gm_smallRNAprecursor_1711
gtgatgccattcggattgaagaatgccccttcagaatttcaaaaaattatgaatgatatttttaatccttattcaaaatttgtcattgtctacatagatgatgttttaatcttttcctaaaatattgaccaacatttcaaacatctccaaaccttcatccatatcatcaaacaaaatggtttggcagtctccaaatcaaaaatcaatcttttccaaactcgaattcgattccttggtcacaatatttatcaaggcacaatcattccaatagaaaggtcaatagagtttactagcaaatttcccaaccaaatcttagacaaaacccagttacaaagatttctaggttgtctaaattacgtaggagaatttgtcccctacttaaacaatgttgtcaagccattgcatgatagactaaagaaaaatctgcctccttgatctgacctccatacccaaacagttaaagaaatcaaaaacaaagtccaatccataaaatgtctgtatcttcccattccacaggcattcaaaattgtcgaaactgatgcatcagacatcggttacggtggcatcctcaaacaacaagtaaatggtcaagaacatgtcatcgcatatacttcaaaacattggaatcctgcacaattaaaatattcaactgttaaaaaagaagttttagcaattgttttgtgcatttccaaatttcaatctgatctattaaatcaaaaaattttagtaagggttgactgcaaatcagccaaagacattttacagaaggatgtaaaaaaccttgcctcaaaacagatttttgcaagatggcaagctattttaagcatctttgattttaatatagaatatatcaagggctcttccaactctctacctgactacctcacccgtgaatttttacagaaaattcccgatgcctcctaaggtgtctagttcctccggcagaggagggagatccagtacaaaaggaaaaaaggttctattggctctaccagagccaataaccaaaaaggcaactacatcatcttctgggtcacctacccagactgggtcatcaacccagaaaggaaagcttgaagggtcattgacccagataactaccgtcaaacctgagtcatcaac

SEQ ID NO: 8879 - DNA, 1108 bp, Glycine max
  Gm_smallRNAprecursor_1712
aagcatctttgattttaatatagaatatatcaagggctcttccaactctctacctgactacctcacccgtgaatttttacagaaaattcccgatgcctcctaaggtgtctagttcctccggcagaggagggagatccagtacaaaaggaaaaaaggttctattggctctaccagagccaataaccaaaaaggcaactacatcatcttctgggtcacctacccagactgggtcatcaacccagaaaggaaagcttgaagggtcattgacccagataactaccgtcaaacctgagtcatcaactcaggaatccccaaaaccaacaacaaccaaacagaccgtggctgactatgcctggtcaatacaaactctcttggccttagaagatataggcctcaccaaaataccaaaattggccaaaaagacctgggcagaaatggcctcagaatcagacgatgattctgaaacagatctgcaaaaacaaatccaaaaggccaaacagaccaaaactgtctgtaaccaaaaaccaagtcaatcgttgactcaacaagaatcaacaccacaacccagcaacagttatatttcaaaaaacaaatttttcaatgttttacaaatggaaccagaatactgggacaagaatcctttcaaagcaaccgccaaagtattccccccgggattccattacaggccaacaaccacaaacaaaacccgcaaattctacgaattcattctaatagatacaaactcagtatctattaaacacttgaaagaccccagagatccaaatctaaatacccattccacaatccaaatcttaaaggttatgcagccacgatattatggctcaaacttaaaccaacccaaaaaattttctgcaccatttgaccctgcagaatataattattgggattacattgacgcctggaccaatgtgttctggcatcaaaataataaattcaagcattcatggctaatttacttcaaaaataacactgtgtataattttccaaattggttcctccaatggtggaactacttcggaccaattccacagatattcccagaagaagtccaacagggattccaacaattcaacaagctctataatag

SEQ ID NO: 8880 - DNA, 1071 bp, Glycine max
  Gm_smallRNAprecursor_1713
caaacagaccaaaactgtctgtaaccaaaaaccaagtcaatcgttgactcaacaagaatcaacaccacaacccagcaacagttatatttcaaaaaacaaatttttcaatgttttacaaatggaaccagaatactgggacaagaatcctttcaaagcaaccgccaaagtattccccccgggattccattacaggccaacaaccacaaacaaaacccgcaaattctacgaattcattctaatagatacaaactcagtatctattaaacacttgaaagaccccagagatccaaatctaaatacccattccacaatccaaatcttaaaggttatgcagccacgatattatggctcaaacttaaaccaacccaaaaaattttctgcaccatttgaccctgcagaatataattattgggattacattgacgcctggaccaatgtgttctggcatcaaaataataaattcaagcattcatggctaatttacttcaaaaataacactgtgtataattttccaaattggttcctccaatggtggaactacttcggaccaattccacagatattcccagaagaagtccaacagggattccaacaattcaacaagctctataatagcaaggaatcacgtattccggcagatttaaagtacttttccagttttgccttgtcatggattttttcatggcaatacagatacgaaaaaaccgaaaacagaaaatagtatccaccgttgcaaagacacgcctttgtaaaatggtggtcacaattcgatacttcaaaggctgctccagaacaagtcaagaactagttccagagcaatcctgagttcctcaaacctactgatccggagacatctttgtttttgaatcagaagtcgcaacttgcagcattcttagcaagctcaaaatctaaagagagtcttgcccagaatctcaaagaagttctccaactacttcaacaggaagcgaaagaagaacctcccaagaaggaagccgaatcaccggagactaacgatgaccaagaagatgatccattctaccagaatgaagatgactgttttggtatatcgtt

SEQ ID NO: 8881 - DNA, 1191 bp, Glycine max
  Gm_smallRNAprecursor_1714
gttatatttcaaaaaacaaatttttcaatgttttacaaatggaaccagaatactgggacaagaatcctttcaaagcaaccgccaaagtattccccccgggattccattacaggccaacaaccacaaacaaaacccgcaaattctacgaattcattctaatagatacaaactcagtatctattaaacacttgaaagaccccagagatccaaatctaaatacccattccacaatccaaatcttaaaggttatgcagccacgatattatggctcaaacttaaaccaacccaaaaaattttctgcaccatttgaccctgcagaatataattattgggattacattgacgcctggaccaatgtgttctggcatcaaaataataaattcaagcattcatggctaatttacttcaaaaataacactgtgtataattttccaaattggttcctccaatggtggaactacttcggaccaattccacagatattcccagaagaagtccaacagggattccaacaattcaacaagctctataatagcaaggaatcacgtattccggcagatttaaagtacttttccagttttgccttgtcatggattttttcatggcaatacagatacgaaaaaaccgaaaacagaaaatagtatccaccgttgcaaagacacgcctttgtaaaatggtggtcacaattcgatacttcaaaggctgctccagaacaagtcaagaactagttccagagcaatcctgagttcctcaaacctactgatccggagacatctttgtttttgaatcagaagtcgcaacttgcagcattcttagcaagctcaaaatctaaagagagtcttgcccagaatctcaaagaagttctccaactacttcaacaggaagcgaaagaagaacctcccaagaaggaagccgaatcaccggagactaacgatgaccaagaagatgatccattctaccagaatgaagatgactgttttggtatatcgttagacgacgattaattagttgtagtaatcatgaattattgtaactaatttgtctgtacctcttattaatgtaatttgtaaaagttttgtaatagttccgataaacattaccgacattgtagaaacagtaaaaattgagtctatttaaaggagtcctcgttccctttgtggggcaccctttcagatagtctcaaaaccaggt

SEQ ID NO: 8882 - DNA, 1066 bp, Glycine max
  Gm_smallRNAprecursor_1715
atttcaaaaaacaaatttttcaatgttttacaaatggaaccagaatactgggacaagaatcctttcaaagcaaccgccaaagtattccccccgggattccattacaggccaacaaccacaaacaaaacccgcaaattctacgaattcattctaatagatacaaactcagtatctattaaacacttgaaagaccccagagatccaaatctaaatacccattccacaatccaaatcttaaaggttatgcagccacgatattatggctcaaacttaaaccaacccaaaaaattttctgcaccatttgaccctgcagaatataattattgggattacattgacgcctggaccaatgtgttctggcatcaaaataataaattcaagcattcatggctaatttacttcaaaaataacactgtgtataattttccaaattggttcctccaatggtggaactacttcggaccaattccacagatattcccagaagaagtccaacagggattccaacaattcaacaagctctataatagcaaggaatcacgtattccggcagatttaaagtacttttccagttttgccttgtcatggattttttcatggcaatacagatacgaaaaaaccgaaaacagaaaatagtatccaccgttgcaaagacacgcctttgtaaaatggtggtcacaattcgatacttcaaaggctgctccagaacaagtcaagaactagttccagagcaatcctgagttcctcaaacctactgatccggagacatctttgtttttgaatcagaagtcgcaacttgcagcattcttagcaagctcaaaatctaaagagagtcttgcccagaatctcaaagaagttctccaactacttcaacaggaagcgaaagaagaacctcccaagaaggaagccgaatcaccggagactaacgatgaccaagaagatgatccattctaccagaatgaagatgactgttttggtatatcgttagacgacgattaattagttgtagtaatcatgaattattgtaactaatttgtctgtacctcttattaatgtaatttgtaaa

SEQ ID NO: 8883 - DNA, 1067 bp, Glycine max
  Gm_smallRNAprecursor_1716
atttcaaaaaacaaatttttcaatgttttacaaatggaaccagaatactgggacaagaatcctttcaaagcaaccgccaaagtattccccccgggattccattacaggccaacaaccacaaacaaaacccgcaaattctacgaattcattctaatagatacaaactcagtatctattaaacacttgaaagaccccagagatccaaatctaaatacccattccacaatccaaatcttaaaggttatgcagccacgatattatggctcaaacttaaaccaacccaaaaaattttctgcaccatttgaccctgcagaatataattattgggattacattgacgcctggaccaatgtgttctggcatcaaaataataaattcaagcattcatggctaatttacttcaaaaataacactgtgtataattttccaaattggttcctccaatggtggaactacttcggaccaattccacagatattcccagaagaagtccaacagggattccaacaattcaacaagctctataatagcaaggaatcacgtattccggcagatttaaagtacttttccagttttgccttgtcatggattttttcatggcaatacagatacgaaaaaaccgaaaacagaaaatagtatccaccgttgcaaagacacgcctttgtaaaatggtggtcacaattcgatacttcaaaggctgctccagaacaagtcaagaactagttccagagcaatcctgagttcctcaaacctactgatccggagacatctttgtttttgaatcagaagtcgcaacttgcagcattcttagcaagctcaaaatctaaagagagtcttgcccagaatctcaaagaagttctccaactacttcaacaggaagcgaaagaagaacctcccaagaaggaagccgaatcaccggagactaacgatgaccaagaagatgatccattctaccagaatgaagatgactgttttggtatatcgttagacgacgattaattagttgtagtaatcatgaattattgtaactaatttgtctgtacctcttattaatgtaatttgtaaaa

SEQ ID NO: 8884 - DNA, 1069 bp, Glycine max
  Gm_smallRNAprecursor_1717
atttcaaaaaacaaatttttcaatgttttacaaatggaaccagaatactgggacaagaatcctttcaaagcaaccgccaaagtattccccccgggattccattacaggccaacaaccacaaacaaaacccgcaaattctacgaattcattctaatagatacaaactcagtatctattaaacacttgaaagaccccagagatccaaatctaaatacccattccacaatccaaatcttaaaggttatgcagccacgatattatggctcaaacttaaaccaacccaaaaaattttctgcaccatttgaccctgcagaatataattattgggattacattgacgcctggaccaatgtgttctggcatcaaaataataaattcaagcattcatggctaatttacttcaaaaataacactgtgtataattttccaaattggttcctccaatggtggaactacttcggaccaattccacagatattcccagaagaagtccaacagggattccaacaattcaacaagctctataatagcaaggaatcacgtattccggcagatttaaagtacttttccagttttgccttgtcatggattttttcatggcaatacagatacgaaaaaaccgaaaacagaaaatagtatccaccgttgcaaagacacgcctttgtaaaatggtggtcacaattcgatacttcaaaggctgctccagaacaagtcaagaactagttccagagcaatcctgagttcctcaaacctactgatccggagacatctttgtttttgaatcagaagtcgcaacttgcagcattcttagcaagctcaaaatctaaagagagtcttgcccagaatctcaaagaagttctccaactacttcaacaggaagcgaaagaagaacctcccaagaaggaagccgaatcaccggagactaacgatgaccaagaagatgatccattctaccagaatgaagatgactgttttggtatatcgttagacgacgattaattagttgtagtaatcatgaattattgtaactaatttgtctgtacctcttattaatgtaatttgtaaaagt

SEQ ID NO: 8885 - DNA, 1049 bp, Glycine max
  Gm_smallRNAprecursor_1718
caatgttttacaaatggaaccagaatactgggacaagaatcctttcaaagcaaccgccaaagtattccccccgggattccattacaggccaacaaccacaaacaaaacccgcaaattctacgaattcattctaatagatacaaactcagtatctattaaacacttgaaagaccccagagatccaaatctaaatacccattccacaatccaaatcttaaaggttatgcagccacgatattatggctcaaacttaaaccaacccaaaaaattttctgcaccatttgaccctgcagaatataattattgggattacattgacgcctggaccaatgtgttctggcatcaaaataataaattcaagcattcatggctaatttacttcaaaaataacactgtgtataattttccaaattggttcctccaatggtggaactacttcggaccaattccacagatattcccagaagaagtccaacagggattccaacaattcaacaagctctataatagcaaggaatcacgtattccggcagatttaaagtacttttccagttttgccttgtcatggattttttcatggcaatacagatacgaaaaaaccgaaaacagaaaatagtatccaccgttgcaaagacacgcctttgtaaaatggtggtcacaattcgatacttcaaaggctgctccagaacaagtcaagaactagttccagagcaatcctgagttcctcaaacctactgatccggagacatctttgtttttgaatcagaagtcgcaacttgcagcattcttagcaagctcaaaatctaaagagagtcttgcccagaatctcaaagaagttctccaactacttcaacaggaagcgaaagaagaacctcccaagaaggaagccgaatcaccggagactaacgatgaccaagaagatgatccattctaccagaatgaagatgactgttttggtatatcgttagacgacgattaattagttgtagtaatcatgaattattgtaactaatttgtctgtacctcttattaatgtaatttgtaaaagt

SEQ ID NO: 8886 - DNA, 1157 bp, Glycine max
  Gm_smallRNAprecursor_1719
gatccaaatctaaatacccattccacaatccaaatcttaaaggttatgcagccacgatattatggctcaaacttaaaccaacccaaaaaattttctgcaccatttgaccctgcagaatataattattgggattacattgacgcctggaccaatgtgttctggcatcaaaataataaattcaagcattcatggctaatttacttcaaaaataacactgtgtataattttccaaattggttcctccaatggtggaactacttcggaccaattccacagatattcccagaagaagtccaacagggattccaacaattcaacaagctctataatagcaaggaatcacgtattccggcagatttaaagtacttttccagttttgccttgtcatggattttttcatggcaatacagatacgaaaaaaccgaaaacagaaaatagtatccaccgttgcaaagacacgcctttgtaaaatggtggtcacaattcgatacttcaaaggctgctccagaacaagtcaagaactagttccagagcaatcctgagttcctcaaacctactgatccggagacatctttgtttttgaatcagaagtcgcaacttgcagcattcttagcaagctcaaaatctaaagagagtcttgcccagaatctcaaagaagttctccaactacttcaacaggaagcgaaagaagaacctcccaagaaggaagccgaatcaccggagactaacgatgaccaagaagatgatccattctaccagaatgaagatgactgttttggtatatcgttagacgacgattaattagttgtagtaatcatgaattattgtaactaatttgtctgtacctcttattaatgtaatttgtaaaagttttgtaatagttccgataaacattaccgacattgtagaaacagtaaaaattgagtctatttaaaggagtcctcgttccctttgtggggcaccctttcagatagtctcaaaaccaggttttagagagagaagctctgcctagggaaaaagtctttgtaagcttttctttcggtttcaataaatttcaagctttatttttcatatctcccttctcccctcaccgatcctgtgcggctctgccgtcgcttcggtttctttgttttcataaacctgggtttgtaagccgt

SEQ ID NO: 8887 - DNA, 1172 bp, Glycine max
  Gm_smallRNAprecursor_1720
gaccaatgtgttctggcatcaaaataataaattcaagcattcatggctaatttacttcaaaaataacactgtgtataattttccaaattggttcctccaatggtggaactacttcggaccaattccacagatattcccagaagaagtccaacagggattccaacaattcaacaagctctataatagcaaggaatcacgtattccggcagatttaaagtacttttccagttttgccttgtcatggattttttcatggcaatacagatacgaaaaaaccgaaaacagaaaatagtatccaccgttgcaaagacacgcctttgtaaaatggtggtcacaattcgatacttcaaaggctgctccagaacaagtcaagaactagttccagagcaatcctgagttcctcaaacctactgatccggagacatctttgtttttgaatcagaagtcgcaacttgcagcattcttagcaagctcaaaatctaaagagagtcttgcccagaatctcaaagaagttctccaactacttcaacaggaagcgaaagaagaacctcccaagaaggaagccgaatcaccggagactaacgatgaccaagaagatgatccattctaccagaatgaagatgactgttttggtatatcgttagacgacgattaattagttgtagtaatcatgaattattgtaactaatttgtctgtacctcttattaatgtaatttgtaaaagttttgtaatagttccgataaacattaccgacattgtagaaacagtaaaaattgagtctatttaaaggagtcctcgttccctttgtggggcaccctttcagatagtctcaaaaccaggttttagagagagaagctctgcctagggaaaaagtctttgtaagcttttctttcggtttcaataaatttcaagctttatttttcatatctcccttctcccctcaccgatcctgtgcggctctgccgtcgcttcggtttctttgttttcataaacctgggtttgtaagccgtttcggtgtgcccttgatatctgctttacaagtttatatttttcatttatcatattgcattcttacttcctagctgtccgtttgatcttattccgctgattttttatttatattatatatatatatatatatatggggtagttgggagtagtttggaaaaat

SEQ ID NO: 8888 - DNA, 1053 bp, Glycine max
  Gm_smallRNAprecursor_1721
ttggttcctccaatggtggaactacttcggaccaattccacagatattcccagaagaagtccaacagggattccaacaattcaacaagctctataatagcaaggaatcacgtattccggcagatttaaagtacttttccagttttgccttgtcatggattttttcatggcaatacagatacgaaaaaaccgaaaacagaaaatagtatccaccgttgcaaagacacgcctttgtaaaatggtggtcacaattcgatacttcaaaggctgctccagaacaagtcaagaactagttccagagcaatcctgagttcctcaaacctactgatccggagacatctttgtttttgaatcagaagtcgcaacttgcagcattcttagcaagctcaaaatctaaagagagtcttgcccagaatctcaaagaagttctccaactacttcaacaggaagcgaaagaagaacctcccaagaaggaagccgaatcaccggagactaacgatgaccaagaagatgatccattctaccagaatgaagatgactgttttggtatatcgttagacgacgattaattagttgtagtaatcatgaattattgtaactaatttgtctgtacctcttattaatgtaatttgtaaaagttttgtaatagttccgataaacattaccgacattgtagaaacagtaaaaattgagtctatttaaaggagtcctcgttccctttgtggggcaccctttcagatagtctcaaaaccaggttttagagagagaagctctgcctagggaaaaagtctttgtaagcttttctttcggtttcaataaatttcaagctttatttttcatatctcccttctcccctcaccgatcctgtgcggctctgccgtcgcttcggtttctttgttttcataaacctgggtttgtaagccgtttcggtgtgcccttgatatctgctttacaagtttatatttttcatttatcatattgcattcttacttcctagctgtccgtttgatcttattccgctgattttttatttatattatatatatatatatat

SEQ ID NO: 8889 - DNA, 1123 bp, Glycine max
  Gm_smallRNAprecursor_1722
gaagaagtccaacagggattccaacaattcaacaagctctataatagcaaggaatcacgtattccggcagatttaaagtacttttccagttttgccttgtcatggattttttcatggcaatacagatacgaaaaaaccgaaaacagaaaatagtatccaccgttgcaaagacacgcctttgtaaaatggtggtcacaattcgatacttcaaaggctgctccagaacaagtcaagaactagttccagagcaatcctgagttcctcaaacctactgatccggagacatctttgtttttgaatcagaagtcgcaacttgcagcattcttagcaagctcaaaatctaaagagagtcttgcccagaatctcaaagaagttctccaactacttcaacaggaagcgaaagaagaacctcccaagaaggaagccgaatcaccggagactaacgatgaccaagaagatgatccattctaccagaatgaagatgactgttttggtatatcgttagacgacgattaattagttgtagtaatcatgaattattgtaactaatttgtctgtacctcttattaatgtaatttgtaaaagttttgtaatagttccgataaacattaccgacattgtagaaacagtaaaaattgagtctatttaaaggagtcctcgttccctttgtggggcaccctttcagatagtctcaaaaccaggttttagagagagaagctctgcctagggaaaaagtctttgtaagcttttctttcggtttcaataaatttcaagctttatttttcatatctcccttctcccctcaccgatcctgtgcggctctgccgtcgcttcggtttctttgttttcataaacctgggtttgtaagccgtttcggtgtgcccttgatatctgctttacaagtttatatttttcatttatcatattgcattcttacttcctagctgtccgtttgatcttattccgctgattttttatttatattatatatatatatatatatatggggtagttgggagtagtttggaaaaatagtttgcaataatatattaaaaaaaaaaggctgtaattgattagaaaaaaattgatgaaaccaaaatgtggcaataatgatttaaaaatg

SEQ ID NO: 8890 - DNA, 1076 bp, Glycine max
  Gm_smallRNAprecursor_1723
tttggggatgtgaacaaatgccctacacccaaacaccttgagatgattgtgtgaagctttcttgcccgtccaaacttcctctggaatagccccttccaaaggaattgacggtgtaaggttgacaatgtcaaccacggccattatagcttctccccaaaatgatttaggtaatttagcatgagaaagcacgcatcgaactctttcttcaattgtttgattcattctctcagctagcccattcaactgtggtgtcttgggtgaagtcttctctagcctaatgccatatttcttgcaataggcttcaaagggacctctatactcacctccattgtcagatcgtatgttcttgatctttcttccagtctcacgctccactagagcatggaattctttgaaggcgtcaagcacttgatcctttgattttaacaggtgcagccacaccttccttgaatgatcatcaatgaaggtgacaaagtacaatgcaccaccaatggatctctcggacattgaacacacatcggtgtgtacaaggtcaagaatgttctttctccttgtgggcggagaagatcttttgaaaacaactctgtgttgttttccagctaaacagtgagcacaaggatcaagtggcttacctttcacgttagggaggagttgtttccgagctagcatgtgaagacccttctcactaatatgcccaagtcgtttatgccatacttccatatcatcagtggttatgtttacctctcctttgtagagcttagcttgcatcacatatagtgatccttccttctttcctcgagccatgactagacttcctttggtgagcttccactttccttcaccaaagtagttcatcagaccagcatcgtctagcttcccagcggagataagattgaggcgcatagccgggacatgcctcacatcttttaggacaagcttgcatccggtgcttgttgtcagggtgatgtttcctatcccaacaatcttgctcctatcttgatttcccatttgcaccgtaccaaagtcaccgctttggtaggatgagaagaaacttccatgtggagtaacatggaagg

SEQ ID NO: 8891 - DNA, 1146 bp, Glycine max
  Gm_smallRNAprecursor_1724
ccaaagcgatgaccaaaccaatgacgagggtgttggtagaccaacgacacctctgtcacctccgttgcaatatcaacaacctaggtgtccagtagacttgaactttgatcacctatcacactacattgatcgacaccattttgttcatcggcaacacaatgtacaaccaccagtcggtatactcgaggttggcatgaccttcaatgacaaagcacaatgtattcgagcagtcaaagaatacaacatcagaaatcattttgattgcagaacaatttactctgaccagagaaggctaaacttcatctgcaagttatatgaaaatggttgtacatggagtttgggcgcatgcaattcaaagaggcataacaaatggattatcaagagtatcagaggtcatcacacttgtctcgttccgatgctcagacaagatcatcgccaactcgacaaacacgtcatagcacaaatcatccaaccaattgtcaaaacaaacccaaccgtctccatcaagacgttgattgcagagatcaaaacgttcatgaattataccccatcctacaagaagacatggttagaaaagcaaagagcgttggagatgattcatggaaatttggaagaatcatatgccaaactgtcaaaatttttcggagctttgcaatcttgtgttcccgggactatggtcgctgctcaacataatccttgtatgaggggggagaaatagtaccaggcaaaagattgtttaaacgtgtcttttggtcatttggtccatgcattaatggatttgcatattgcaaacccatagtacaagtagatggtacatgggtttacgggggaagtatactgacacattgttgatagctactgcacaagatggagctaaccatgtcttcccgattgcctatgccattgtagaaggggagacaacttcagcttgagagttttttctaaagaatttgagaagacatgttattccgcaaattaacatttctcttatttcagaccgacacccctcaattataagtgcctgcaacaacccaagtaacttatgggtccaggacacatcccatttcttttgtctgcgccacattgcacaaaactttcttcgcggtaactcaaattgcaaacatttaaagaaaccactaatgttga

SEQ ID NO: 8892 - DNA, 1187 bp, Glycine max
  Gm_smallRNAprecursor_1725
tctagctgcatatcttatcctctgtcttcaatcttcatacttcttttcttcatttttaagaacaatattttgggatgcttccagtttaggattttttttcttcattatttccacttggctgctctaacttgagataatgaaacttctgattcagtattactatgaatgtgtgatctgtgatgttggtggcaacttactgtgctgtgacagttgtcctcgcacttatcatttacaatgtcttgatcctcctcttaaggtatgttcaaatctggttttatgctgtgctttcattttttggtgacttgggctatctatcaactacaaagtcacgattcttgggattttttttatctgattttgctttcaatcatttgggattttgtctcttgaagcgcatccctaatgggaagtggcaatgtccaagttgctttgaaggaaaagatcaacgaatgcccataaaccacctggatcccatttcaaaacgagcaaggacaaagattgtcactacaaaatcaaaagatcaagttagctcacttaaccttgaaaaagtttttggaactaaacttatttcaaagaaaaggtcctcaagcaaaggaaaacctatttcaagcatgggagccaatttttttggaaagaatttattgtcttccccagctgatgaaacttgtagcaacaaacctattgacccatctcttgagagtcctatggaaggaacttcatcaggtgtgaatgctgatgaaaaaaaattgagcttggcatcaacagaatccccgatggacaggaagtcaacttcacctgccaaggaagatgaaccgctctctaaaattactagtttagaagcaaatgatgaacagctggagggaaaaactgatttatcttgcaataagattcctttaaggaaaacacttgttcttgctattgctgctagtggagaggaagtgagaaaaaggaagaataaagttgttaatgataatactagtcaaaagaaacgaaagactgaaaaggggaaaaaaattgtcaatccttcttctataaagtccaagtctgggaataacaaagtacacaagaagcagaagtctataacccatagtatttctgcatctgtatcaaaagaggatgttgggaacaagaattctaatgcccaacaaaaagatgaggtacttgttctgctctctaatgtcttattt

SEQ ID NO: 8893 - DNA, 1140 bp, Glycine max
  Gm_smallRNAprecursor_1726
tcaacctcaaattccctgtccccacctttttttctcactgctatgaaagtggtttgtcatgatggtgtcatacaaaaaacaacaaaaatagccttatcctactatgtatggttggctacatagattacatgatgccattggactcaataagtgactagatgttctccttgcttcttaaaacaagtgttcataattgtgaaatcatacatcattcacaaatcaagaataaactgtccttcctcgattagatatccaaaaccactataagatatgggaattgttttatctcactaccaacatgtccatttaaattcccacctacaaaattctttttctcgtggaaagccttgaaccaaaccctccaattcttcccaaaacttttctttcaaaagtgcttttgattcaccttgtggtgcataaacactaattatattgatagtctcccatgcaaccaattaattttaaagataaacttatgtccctaatcctttttacatccaccacactttccttcttatccttgtccacaataatactcaagtatcaaagtttaaatcttatagtgtctagctccttagctttttctccatgagaaaagttagaggaaagattgaaagaattatatgagcattattgtggacaaggattggaaggaaagtgtggtggatgtaaaaaggattagggacataaatttatctttaaaattaattggttgcacgggagactatcaatataattagtgcttatgcaccacaaggtggatcaaaagcacttttgaaaaaaaaagttttgggaagatttggagggttcggttcaaggctttcctctaattttaaagataaacttatgtccctaatcctttttacatccaccacagtttccttccaattcttgtccacaataatactcatgtaatattttcaatctttcctctaactttcctcatgtaacaaagtttaaatcttatagtgctagctcagctttttctccagcccatttagtttcttgaagacacacgatattaatcctgttacgaatcatggtgcccaccaactccaaatacttacttgtcatagtaccaatatttcaagtaccaaacctaataaggcactcttggactcatattgttgcccatattgc

SEQ ID NO: 8894 - DNA, 1146 bp, Glycine max
  Gm_smallRNAprecursor_1727
tgaccaaagtgatgaccaaaccaatgacaagggtgttggcagaccaacgacacatccgtcacctctgttgtaatatcagcaacctaggtgtccagtagacttgaactttgaccacctatcacactacattgatcgacaccattttgttcatcaataacacaatgtacaaccaccagtcggtatactcgaggttggcataaccttcgatgacaaagtacaatgtatttgagcaatcaaagaatacagcatcagaaatcattttgattgtagaacaatttactctgactagagaaggctaaactttgtctgcaagttacatgaaaatggttgtacatggagcttgggcgcatgcaattcaaagagacataacaaatggattatcaaaagtatcagaggtcatcacatttgtctcgtgccgatgctcagacaagatcatcgccaactcgacaagatcatagcacagatcatccaaccaattatcaaaacaaacccaaccgtctccatcaagacgttgattgcagagatcaaaacaatcataaattataccccatcctacaagaagacatggttagcaaaacaaagagcgttggagatgattcatggaaactggaaagaatcatatgccaaactgccaaaactttttggagctttgcaatcttgtgttctcgggactgtggtcgctgctcaaacagatccttttatgaggggggagaaatagtaccgggtaaaaggttgtttaaacgtgtcttttggtcatttggttcatgcattaatggttttgcatattgcaaacccatagtacaagtagatggtacatggctttacgggaagtatactaacacattgttgatagctaccgcatggagctaaccatatcttcccgattgcctacgccattgtagaaggggagacaacttcagcttgggggttttatctaaagaatttgagaagacatgttactccgcaaattaacatttctctcatttcagaccgatacccctcaattataagttcctacaacaacccacataacgtatgggtaacttatgggtccaagacacatcccatttcttttgcctgcgccacattgcacaaaactttgttcgtggtaactcaaactacaaacatttaaagaaaccactcatg

SEQ ID NO: 8895 - DNA, 1107 bp, Glycine max
  Gm_smallRNAprecursor_1728
gaaaaatagggaaacacaaagaagctagaagtcattttgaaaagataaccgtttgtttaaaaaatattattacatccaaaaattaatagattttcaagcatggactaattcttcatagaagtgccttcaaattaatgatgaaaactaaaacttttcaattttctctattttagccacacacacatatgtaaacaaattgattcattcatcactaaagttctagcttgggatttgggagaaggtagcatattcacacgcgtaatataaacgaaggtaatgaaaatacaacctttacaaaacaagattgccaccagtgagttgaaaattctgaccctgcaaaaacaaactgtaaaaagagcttttttgttgttgttgttgtgtgtgtgtgcaaattgagagaaagatgaaaggaagagaaagccttaccataagggcatgcaagaaagatatgaaaatggagagaaagaaactgaaaggaatagaaaacaaaagttgggtggggggaatgaagcctggtccgagaatcattttttctgtgtgtgtgttaagagggtaaatttccattggaaactttcactgatctcagtactctcctcttcctccatgacctcgagccagacaacattcctctcaacctcacctttgcaaggaaacatctcaagttctcaaccacacacatgacgtgtgtgtagagagatccttcaaaataaagagagaagctagctaggtacgtagctacacctatgatcttgtggtttgaagtttgaagtataaacaaatgaaggaagtacttttgaggggaatgaagcctggtccgaagccttatagttccatccactgtgaacctcctttgtgaaaagcctcgagccagccaacattcccctcaataccaacccatctcaacacaacacccttcaaaaccctaacccgcattatatatagcgagcccatgtgatgtgagtgagatgagagagaaaaaccaagcactgactcacttaccacactaagtgtgctttttagccacccattcagatgttccaaaattaggcttatgcaaaacggaacttaaactctaactactcatgagctgtaagataagaatatgat

SEQ ID NO: 8896 - DNA, 1107 bp, Glycine max; identical to SEQ ID NO: 8895
  Gm_smallRNAprecursor_1729

SEQ ID NO: 8897 - DNA, 1108 bp, Glycine max
  Gm_smallRNAprecursor_1730
gaaaaatagggaaacacaaagaagctagaagtcattttgaaaagataaccgtttgtttaaaaaatattattacatccaaaaattaatagattttcaagcatggactaattcttcatagaagtgccttcaaattaatgatgaaaactaaaacttttcaattttctctattttagccacacacacatatgtaaacaaattgattcattcatcactaaagttctagcttgggatttgggagaaggtagcatattcacacgcgtaatataaacgaaggtaatgaaaatacaacctttacaaaacaagattgccaccagtgagttgaaaattctgaccctgcaaaaacaaactgtaaaaagagcttttttgttgttgttgttgtgtgtgtgtgcaaattgagagaaagatgaaaggaagagaaagccttaccataagggcatgcaagaaagatatgaaaatggagagaaagaaactgaaaggaatagaaaacaaaagttgggtggggggaatgaagcctggtccgagaatcattttttctgtgtgtgtgttaagagggtaaatttccattggaaactttcactgatctcagtactctcctcttcctccatgacctcgagccagacaacattcctctcaacctcacctttgcaaggaaacatctcaagttctcaaccacacacatgacgtgtgtgtagagagatccttcaaaataaagagagaagctagctaggtacgtagctacacctatgatcttgtggtttgaagtttgaagtataaacaaatgaaggaagtacttttgaggggaatgaagcctggtccgaagccttatagttccatccactgtgaacctcctttgtgaaaagcctcgagccagccaacattcccctcaataccaacccatctcaacacaacacccttcaaaaccctaacccgcattatatatagcgagcccatgtgatgtgagtgagatgagagagaaaaaccaagcactgactcacttaccacactaagtgtgctttttagccacccattcagatgttccaaaattaggcttatgcaaaacggaacttaaactctaactactcatgagctgtaagataagaatatgata

SEQ ID NO: 8898 - DNA, 1108 bp, Glycine max; identical to SEQ ID NO: 8897
  Gm_smallRNAprecursor_1731

SEQ ID NO: 8899 - DNA, 1109 bp, Glycine max
  Gm_smallRNAprecursor_1732
gaaaaatagggaaacacaaagaagctagaagtcattttgaaaagataaccgtttgtttaaaaaatattattacatccaaaaattaatagattttcaagcatggactaattcttcatagaagtgccttcaaattaatgatgaaaactaaaacttttcaattttctctattttagccacacacacatatgtaaacaaattgattcattcatcactaaagttctagcttgggatttgggagaaggtagcatattcacacgcgtaatataaacgaaggtaatgaaaatacaacctttacaaaacaagattgccaccagtgagttgaaaattctgaccctgcaaaaacaaactgtaaaaagagcttttttgttgttgttgttgtgtgtgtgtgcaaattgagagaaagatgaaaggaagagaaagccttaccataagggcatgcaagaaagatatgaaaatggagagaaagaaactgaaaggaatagaaaacaaaagttgggtggggggaatgaagcctggtccgagaatcattttttctgtgtgtgtgttaagagggtaaatttccattggaaactttcactgatctcagtactctcctcttcctccatgacctcgagccagacaacattcctctcaacctcacctttgcaaggaaacatctcaagttctcaaccacacacatgacgtgtgtgtagagagatccttcaaaataaagagagaagctagctaggtacgtagctacacctatgatcttgtggtttgaagtttgaagtataaacaaatgaaggaagtacttttgaggggaatgaagcctggtccgaagccttatagttccatccactgtgaacctcctttgtgaaaagcctcgagccagccaacattcccctcaataccaacccatctcaacacaacacccttcaaaaccctaacccgcattatatatagcgagcccatgtgatgtgagtgagatgagagagaaaaaccaagcactgactcacttaccacactaagtgtgctttttagccacccattcagatgttccaaaattaggcttatgcaaaacggaacttaaactctaactactcatgagctgtaagataagaatatgataa

SEQ ID NO: 8900 - DNA, 1192 bp, Glycine max
  Gm_smallRNAprecursor_1733
aattcttcatagaagtgccttcaaattaatgatgaaaactaaaacttttcaattttctctattttagccacacacacatatgtaaacaaattgattcattcatcactaaagttctagcttgggatttgggagaaggtagcatattcacacgcgtaatataaacgaaggtaatgaaaatacaacctttacaaaacaagattgccaccagtgagttgaaaattctgaccctgcaaaaacaaactgtaaaaagagcttttttgttgttgttgttgtgtgtgtgtgcaaattgagagaaagatgaaaggaagagaaagccttaccataagggcatgcaagaaagatatgaaaatggagagaaagaaactgaaaggaatagaaaacaaaagttgggtggggggaatgaagcctggtccgagaatcattttttctgtgtgtgtgttaagagggtaaatttccattggaaactttcactgatctcagtactctcctcttcctccatgacctcgagccagacaacattcctctcaacctcacctttgcaaggaaacatctcaagttctcaaccacacacatgacgtgtgtgtagagagatccttcaaaataaagagagaagctagctaggtacgtagctacacctatgatcttgtggtttgaagtttgaagtataaacaaatgaaggaagtacttttgaggggaatgaagcctggtccgaagccttatagttccatccactgtgaacctcctttgtgaaaagcctcgagccagccaacattcccctcaataccaacccatctcaacacaacacccttcaaaaccctaacccgcattatatatagcgagcccatgtgatgtgagtgagatgagagagaaaaaccaagcactgactcacttaccacactaagtgtgctttttagccacccattcagatgttccaaaattaggcttatgcaaaacggaacttaaactctaactactcatgagctgtaagataagaatatgataaacaaaaaacaacaaacaaaagcaaagcatcgtacgtagttaactcatcaccacaaaagacggagaaattctttcaacaaacaacatccaagtgacttcgatttgtttcatgtcacgagatttactcaaattttactaaattcagttacctaaagtgagcgcacacagttaaattcatccacacccactt

SEQ ID NO: 8901 - DNA, 1192 bp, Glycine max; identical to SEQ ID NO: 8900
  Gm_smallRNAprecursor_1734

SEQ ID NO: 8902 - DNA, 1191 bp, Glycine max
  Gm_smallRNAprecursor_1735
attcttcatagaagtgccttcaaattaatgatgaaaactaaaacttttcaattttctctattttagccacacacacatatgtaaacaaattgattcattcatcactaaagttctagcttgggatttgggagaaggtagcatattcacacgcgtaatataaacgaaggtaatgaaaatacaacctttacaaaacaagattgccaccagtgagttgaaaattctgaccctgcaaaaacaaactgtaaaaagagcttttttgttgttgttgttgtgtgtgtgtgcaaattgagagaaagatgaaaggaagagaaagccttaccataagggcatgcaagaaagatatgaaaatggagagaaagaaactgaaaggaatagaaaacaaaagttgggtggggggaatgaagcctggtccgagaatcattttttctgtgtgtgtgttaagagggtaaatttccattggaaactttcactgatctcagtactctcctcttcctccatgacctcgagccagacaacattcctctcaacctcacctttgcaaggaaacatctcaagttctcaaccacacacatgacgtgtgtgtagagagatccttcaaaataaagagagaagctagctaggtacgtagctacacctatgatcttgtggtttgaagtttgaagtataaacaaatgaaggaagtacttttgaggggaatgaagcctggtccgaagccttatagttccatccactgtgaacctcctttgtgaaaagcctcgagccagccaacattcccctcaataccaacccatctcaacacaacacccttcaaaaccctaacccgcattatatatagcgagcccatgtgatgtgagtgagatgagagagaaaaaccaagcactgactcacttaccacactaagtgtgctttttagccacccattcagatgttccaaaattaggcttatgcaaaacggaacttaaactctaactactcatgagctgtaagataagaatatgataaacaaaaaacaacaaacaaaagcaaagcatcgtacgtagttaactcatcaccacaaaagacggagaaattctttcaacaaacaacatccaagtgacttcgatttgtttcatgtcacgagatttactcaaattttactaaattcagttacctaaagtgagcgcacacagttaaattcatccacacccactt

SEQ ID NO: 8903 - DNA, 1191 bp, Glycine max; identical to SEQ ID NO: 8902
  Gm_smallRNAprecursor_1736

SEQ ID NO: 8904 - DNA, 1190 bp, Glycine max
  Gm_smallRNAprecursor_1737
ttcttcatagaagtgccttcaaattaatgatgaaaactaaaacttttcaattttctctattttagccacacacacatatgtaaacaaattgattcattcatcactaaagttctagcttgggatttgggagaaggtagcatattcacacgcgtaatataaacgaaggtaatgaaaatacaacctttacaaaacaagattgccaccagtgagttgaaaattctgaccctgcaaaaacaaactgtaaaaagagcttttttgttgttgttgttgtgtgtgtgtgcaaattgagagaaagatgaaaggaagagaaagccttaccataagggcatgcaagaaagatatgaaaatggagagaaagaaactgaaaggaatagaaaacaaaagttgggtggggggaatgaagcctggtccgagaatcattttttctgtgtgtgtgttaagagggtaaatttccattggaaactttcactgatctcagtactctcctcttcctccatgacctcgagccagacaacattcctctcaacctcacctttgcaaggaaacatctcaagttctcaaccacacacatgacgtgtgtgtagagagatccttcaaaataaagagagaagctagctaggtacgtagctacacctatgatcttgtggtttgaagtttgaagtataaacaaatgaaggaagtacttttgaggggaatgaagcctggtccgaagccttatagttccatccactgtgaacctcctttgtgaaaagcctcgagccagccaacattcccctcaataccaacccatctcaacacaacacccttcaaaaccctaacccgcattatatatagcgagcccatgtgatgtgagtgagatgagagagaaaaaccaagcactgactcacttaccacactaagtgtgctttttagccacccattcagatgttccaaaattaggcttatgcaaaacggaacttaaactctaactactcatgagctgtaagataagaatatgataaacaaaaaacaacaaacaaaagcaaagcatcgtacgtagttaactcatcaccacaaaagacggagaaattctttcaacaaacaacatccaagtgacttcgatttgtttcatgtcacgagatttactcaaattttactaaattcagttacctaaagtgagcgcacacagttaaattcatccacacccactt

SEQ ID NO: 8905 - DNA, 1190 bp, Glycine max; identical to SEQ ID NO: 8904
  Gm_smallRNAprecursor_1738

SEQ ID NO: 8906 - DNA, 1064 bp, Glycine max
  Gm_smallRNAprecursor_1739
aacaagattgccaccagtgagttgaaaattctgaccctgcaaaaacaaactgtaaaaagagcttttttgttgttgttgttgtgtgtgtgtgcaaattgagagaaagatgaaaggaagagaaagccttaccataagggcatgcaagaaagatatgaaaatggagagaaagaaactgaaaggaatagaaaacaaaagttgggtggggggaatgaagcctggtccgagaatcattttttctgtgtgtgtgttaagagggtaaatttccattggaaactttcactgatctcagtactctcctcttcctccatgacctcgagccagacaacattcctctcaacctcacctttgcaaggaaacatctcaagttctcaaccacacacatgacgtgtgtgtagagagatccttcaaaataaagagagaagctagctaggtacgtagctacacctatgatcttgtggtttgaagtttgaagtataaacaaatgaaggaagtacttttgaggggaatgaagcctggtccgaagccttatagttccatccactgtgaacctcctttgtgaaaagcctcgagccagccaacattcccctcaataccaacccatctcaacacaacacccttcaaaaccctaacccgcattatatatagcgagcccatgtgatgtgagtgagatgagagagaaaaaccaagcactgactcacttaccacactaagtgtgctttttagccacccattcagatgttccaaaattaggcttatgcaaaacggaacttaaactctaactactcatgagctgtaagataagaatatgataaacaaaaaacaacaaacaaaagcaaagcatcgtacgtagttaactcatcaccacaaaagacggagaaattctttcaacaaacaacatccaagtgacttcgatttgtttcatgtcacgagatttactcaaattttactaaattcagttacctaaagtgagcgcacacagttaaattcatccacacccacttatgtaacaatgctactataataaataatttataggatttaatgttggctagcgagagtaattt

SEQ ID NO: 8907 - DNA, 1064 bp, Glycine max; identical to SEQ ID NO: 8906
  Gm_smallRNAprecursor_1740

SEQ ID NO: 8908 - DNA, 1065 bp, Glycine max
  Gm_smallRNAprecursor_1741
aacaagattgccaccagtgagttgaaaattctgaccctgcaaaaacaaactgtaaaaagagcttttttgttgttgttgttgtgtgtgtgtgcaaattgagagaaagatgaaaggaagagaaagccttaccataagggcatgcaagaaagatatgaaaatggagagaaagaaactgaaaggaatagaaaacaaaagttgggtggggggaatgaagcctggtccgagaatcattttttctgtgtgtgtgttaagagggtaaatttccattggaaactttcactgatctcagtactctcctcttcctccatgacctcgagccagacaacattcctctcaacctcacctttgcaaggaaacatctcaagttctcaaccacacacatgacgtgtgtgtagagagatccttcaaaataaagagagaagctagctaggtacgtagctacacctatgatcttgtggtttgaagtttgaagtataaacaaatgaaggaagtacttttgaggggaatgaagcctggtccgaagccttatagttccatccactgtgaacctcctttgtgaaaagcctcgagccagccaacattcccctcaataccaacccatctcaacacaacacccttcaaaaccctaacccgcattatatatagcgagcccatgtgatgtgagtgagatgagagagaaaaaccaagcactgactcacttaccacactaagtgtgctttttagccacccattcagatgttccaaaattaggcttatgcaaaacggaacttaaactctaactactcatgagctgtaagataagaatatgataaacaaaaaacaacaaacaaaagcaaagcatcgtacgtagttaactcatcaccacaaaagacggagaaattctttcaacaaacaacatccaagtgacttcgatttgtttcatgtcacgagatttactcaaattttactaaattcagttacctaaagtgagcgcacacagttaaattcatccacacccacttatgtaacaatgctactataataaataatttataggatttaatgttggctagcgagagtaatttt

SEQ ID NO: 8909 - DNA, 1091 bp, Glycine max
  Gm_smallRNAprecursor_1742
gcaaatcaaatgcaagcttttgaacaagaggtatcggtacggaatgaattgcacttgcgcaaaagttaaacttaaaccctttcattctaacctcctcgtaccatcaacaaacagatttgtagtgtccaacagccacagcggcagtgcacgtctaactgcaaaatacaaaggttaataatagccatcatatatacaagcaaattaatattaatatctatcagagaatatggtatgagaagaaagtttcaaactgcggctgccactgcagttttgttgcgttttaatattacataaaatcgttaacaaatacagttgatgtggctacaattgcaatagcgatgcagtcatggactcacagtttttttaaaacctgtgaacatcatattatacacgcatgagcatgcttattaaactaatttatatatgaattccagctccagtaactagatatatactaacagttggtgtagaggggtagtgagacagggaggctgaagggtgatgacagaagtatagagagcacaaaggagtgagatgcacaattcatgagttccctagctgctttttatataatatgcatatcatcatctgtgctctctatcttctgtcaacaaccttaattaccaactagtgcctcccgtctcaccttttccccataaaaatagagataggaaagggatgatgatcatcaaagagagataaaagagaagagattcgagtttggaactttgggagatgttagatttctcactgggcaggagcacctacttataggaaaaatgcgaaaagaatgggtaaaagggcctccaaataatattcctctagatcagtcagctagctagtacaaatgcaatgacactttccatgtactcttcattttgttgtaaccgcttctcacgagataaaacaccctctaaaaaggacaccttatatatgtaacttaacaacccattcacgtactccacgttaatccacttgtcaaatatgcatgcacatagattttaatctcacaccccttacttaacttacatacatggaacccactacataggaatattatagtgttgttatttttgagacactaaaggcgt

SEQ ID NO: 8910 - DNA, 1086 bp, Glycine max
  Gm_smallRNAprecursor_1743
aaatcaaatgcaagcttttgaacaagaggtatcggtacggaatgaattgcacttgcgcaaaagttaaacttaaaccctttcattctaacctcctcgtaccatcaacaaacagatttgtagtgtccaacagccacagcggcagtgcacgtctaactgcaaaatacaaaggttaataatagccatcatatatacaagcaaattaatattaatatctatcagagaatatggtatgagaagaaagtttcaaactgcggctgccactgcagttttgttgcgttttaatattacataaaatcgttaacaaatacagttgatgtggctacaattgcaatagcgatgcagtcatggactcacagtttttttaaaacctgtgaacatcatattatacacgcatgagcatgcttattaaactaatttatatatgaattccagctccagtaactagatatatactaacagttggtgtagaggggtagtgagacagggaggctgaagggtgatgacagaagtatagagagcacaaaggagtgagatgcacaattcatgagttccctagctgctttttatataatatgcatatcatcatctgtgctctctatcttctgtcaacaaccttaattaccaactagtgcctcccgtctcaccttttccccataaaaatagagataggaaagggatgatgatcatcaaagagagataaaagagaagagattcgagtttggaactttgggagatgttagatttctcactgggcaggagcacctacttataggaaaaatgcgaaaagaatgggtaaaagggcctccaaataatattcctctagatcagtcagctagctagtacaaatgcaatgacactttccatgtactcttcattttgttgtaaccgcttctcacgagataaaacaccctctaaaaaggacaccttatatatgtaacttaacaacccattcacgtactccacgttaatccacttgtcaaatatgcatgcacatagattttaatctcacaccccttacttaacttacatacatggaacccactacataggaatattatagtgttgttatttttgagacactaaagg

SEQ ID NO: 8911 - DNA, 1164 bp, Glycine max
  Gm_smallRNAprecursor_1744
atttacatgagaataaagtaggtgtagcggagatgaggatgttgcggtggatgtgtggtaagactcgacaggataaaattagaaacgaagctattagagagagggttggagtagcgcctattgtagagaagatggtggaaaatagacttaggtggtttgggcatgtagagagaagaccggtagactctgtagtgaggagagtagaccagatggagagaagacaaacaattcgaggcagaggaagacccaaaaagactataagagaggttatcaaaaaggatctcgaacttaatgatttggatagaagtatggtacttgatagaacattatggcggaagttgatccatgtagccgaccccacctagtgggataaggcgttgttattgttgttgttgttgtatttctatatgccgttaatgtttttttctttctcaacctagtattatttgccccaacatacacttattcaatactatattttgagagggggactgctaacctactcccctacttgccttttaggagtatgctagcaatataccactttggatttgatatacttctaaaggtgtaacttgtttaatctaataatttttaggagtatattaaacgagttacacctctagaagtagatcaaatccaaagttgtatattgctaacatactcctaaaaggcaagtaggggagtaggttagcaggtcccctctcaaaatatacttgaccattcatgagtaatacttaacagtcaatatttatttttcttactttcatataaaagcaagtttctcgtttgaaatgtctcctgcagggtgattaactttaaactcttcaccctttcttgtgatcaaacactgtatcattataaaagtgcatggctattctggtagatgagcttatttgatattactttgtttattcctttatgatgtattcagcttgttactgccactggttgctacaatatgaccaagtgtccaagggaaatgcgggagattgaggcagtgatggcaggggcaccatggccagctcagaagatctaagtttgacctcacctcacctgtccttgatctgaactggtctgctaagtttgtattttttttattaaataaatattagaaagtaactccactctcccagatcctccatgtaatcacgtgattagtgg

SEQ ID NO: 8912 - DNA, 1165 bp, Glycine max
  Gm_smallRNAprecursor_1745
atttacatgagaataaagtaggtgtagcggagatgaggatgttgcggtggatgtgtggtaagactcgacaggataaaattagaaacgaagctattagagagagggttggagtagcgcctattgtagagaagatggtggaaaatagacttaggtggtttgggcatgtagagagaagaccggtagactctgtagtgaggagagtagaccagatggagagaagacaaacaattcgaggcagaggaagacccaaaaagactataagagaggttatcaaaaaggatctcgaacttaatgatttggatagaagtatggtacttgatagaacattatggcggaagttgatccatgtagccgaccccacctagtgggataaggcgttgttattgttgttgttgttgtatttctatatgccgttaatgtttttttctttctcaacctagtattatttgccccaacatacacttattcaatactatattttgagagggggactgctaacctactcccctacttgccttttaggagtatgctagcaatataccactttggatttgatatacttctaaaggtgtaacttgtttaatctaataatttttaggagtatattaaacgagttacacctctagaagtagatcaaatccaaagttgtatattgctaacatactcctaaaaggcaagtaggggagtaggttagcaggtcccctctcaaaatatacttgaccattcatgagtaatacttaacagtcaatatttatttttcttactttcatataaaagcaagtttctcgtttgaaatgtctcctgcagggtgattaactttaaactcttcaccctttcttgtgatcaaacactgtatcattataaaagtgcatggctattctggtagatgagcttatttgatattactttgtttattcctttatgatgtattcagcttgttactgccactggttgctacaatatgaccaagtgtccaagggaaatgcgggagattgaggcagtgatggcaggggcaccatggccagctcagaagatctaagtttgacctcacctcacctgtccttgatctgaactggtctgctaagtttgtattttttttattaaataaatattagaaagtaactccactctcccagatcctccatgtaatcacgtgattagtggc

SEQ ID NO: 8913 - DNA, 1165 bp, Glycine max; identical to SEQ ID NO: 8912
  Gm_smallRNAprecursor_1746

SEQ ID NO: 8914 - DNA, 1163 bp, Glycine max
  Gm_smallRNAprecursor_1747
tttacatgagaataaagtaggtgtagcggagatgaggatgttgcggtggatgtgtggtaagactcgacaggataaaattagaaacgaagctattagagagagggttggagtagcgcctattgtagagaagatggtggaaaatagacttaggtggtttgggcatgtagagagaagaccggtagactctgtagtgaggagagtagaccagatggagagaagacaaacaattcgaggcagaggaagacccaaaaagactataagagaggttatcaaaaaggatctcgaacttaatgatttggatagaagtatggtacttgatagaacattatggcggaagttgatccatgtagccgaccccacctagtgggataaggcgttgttattgttgttgttgttgtatttctatatgccgttaatgtttttttctttctcaacctagtattatttgccccaacatacacttattcaatactatattttgagagggggactgctaacctactcccctacttgccttttaggagtatgctagcaatataccactttggatttgatatacttctaaaggtgtaacttgtttaatctaataatttttaggagtatattaaacgagttacacctctagaagtagatcaaatccaaagttgtatattgctaacatactcctaaaaggcaagtaggggagtaggttagcaggtcccctctcaaaatatacttgaccattcatgagtaatacttaacagtcaatatttatttttcttactttcatataaaagcaagtttctcgtttgaaatgtctcctgcagggtgattaactttaaactcttcaccctttcttgtgatcaaacactgtatcattataaaagtgcatggctattctggtagatgagcttatttgatattactttgtttattcctttatgatgtattcagcttgttactgccactggttgctacaatatgaccaagtgtccaagggaaatgcgggagattgaggcagtgatggcaggggcaccatggccagctcagaagatctaagtttgacctcacctcacctgtccttgatctgaactggtctgctaagtttgtattttttttattaaataaatattagaaagtaactccactctcccagatcctccatgtaatcacgtgattagtgg

SEQ ID NO: 8915 - DNA, 1163 bp, Glycine max; identical to SEQ ID NO: 8914
  Gm_smallRNAprecursor_1748

SEQ ID NO: 8916 - DNA, 1164 bp, Glycine max
  Gm_smallRNAprecursor_1749
tttacatgagaataaagtaggtgtagcggagatgaggatgttgcggtggatgtgtggtaagactcgacaggataaaattagaaacgaagctattagagagagggttggagtagcgcctattgtagagaagatggtggaaaatagacttaggtggtttgggcatgtagagagaagaccggtagactctgtagtgaggagagtagaccagatggagagaagacaaacaattcgaggcagaggaagacccaaaaagactataagagaggttatcaaaaaggatctcgaacttaatgatttggatagaagtatggtacttgatagaacattatggcggaagttgatccatgtagccgaccccacctagtgggataaggcgttgttattgttgttgttgttgtatttctatatgccgttaatgtttttttctttctcaacctagtattatttgccccaacatacacttattcaatactatattttgagagggggactgctaacctactcccctacttgccttttaggagtatgctagcaatataccactttggatttgatatacttctaaaggtgtaacttgtttaatctaataatttttaggagtatattaaacgagttacacctctagaagtagatcaaatccaaagttgtatattgctaacatactcctaaaaggcaagtaggggagtaggttagcaggtcccctctcaaaatatacttgaccattcatgagtaatacttaacagtcaatatttatttttcttactttcatataaaagcaagtttctcgtttgaaatgtctcctgcagggtgattaactttaaactcttcaccctttcttgtgatcaaacactgtatcattataaaagtgcatggctattctggtagatgagcttatttgatattactttgtttattcctttatgatgtattcagcttgttactgccactggttgctacaatatgaccaagtgtccaagggaaatgcgggagattgaggcagtgatggcaggggcaccatggccagctcagaagatctaagtttgacctcacctcacctgtccttgatctgaactggtctgctaagtttgtattttttttattaaataaatattagaaagtaactccactctcccagatcctccatgtaatcacgtgattagtggc

SEQ ID NO: 8917 - DNA, 1164 bp, Glycine max; identical to SEQ ID NO: 8916
  Gm_smallRNAprecursor_1750

SEQ ID NO: 8918 - DNA, 1071 bp, Glycine max
  Gm_smallRNAprecursor_1751
ccctttcatttctcaaaaaaataccacgtgtaacccctccccgcaaaaaatctcttatgcatgcagcagatacaagtaactgcacttattggcaagtggcaagtacaatccaccaggggagtgcaggtaggcctaggccctcgcttattaccttaactttgttgagttatagtcgcacaatttattaatgacaaacgacccatgaatcgttatccataaataagggagaaaactaaaaaatgagacagattttcaccgttgcaaaatggacatgaaagaagtacctgccatttaattctctcctttctggaaattaaggtgtgacaggcattatccaatctcgccaagggagattgagcaatgcaaattggccgtataaaaacccaacgttgggctcagaaagaaactaaggatatatatatggaaatgtattgattactgaaggtgagaaacaagatgaacttctttgtgctaagcaatctcgccaaggaacagtttatttactcctccccaagggcctctagctagtctcgctcttggacccaatgatcacgcactaattggttcaagcgagaagcccttgagggagagtgaacaaccaaccccttcatcgattatctcttgacttggccttgttaattattgattccttgaagagggttcatatatatataacacaagccctttttatactgcactactgaatagaagctgcctaaaaatgtcgttgacttttatcatgtggggtctccatatcttgttttgtggcaagatattgcttcacaagatcaggatctccctttctccatttatcttagaggcatgatcaaacacacacgcacttctcgttggaatctttggcatcgggaacaaatatagtttacaaaaagaaaacatgcatgcatgtatggttttaataattaacaggatggcctttagagatcatgaagggcagtaacacagaatatagcagcttgcatgcctcaagtcaattagggcatctcaacgttatctttaatcccataagcattaattgctgtttgacattccttgtgtctcgtccctgtcttt

SEQ ID NO: 8919 - DNA, 1071 bp, Glycine max; identical to SEQ ID NO: 8918
  Gm_smallRNAprecursor_1752

SEQ ID NO: 8920 - DNA, 1070 bp, Glycine max
  Gm_smallRNAprecursor_1753
cctttcatttctcaaaaaaataccacgtgtaacccctccccgcaaaaaatctcttatgcatgcagcagatacaagtaactgcacttattggcaagtggcaagtacaatccaccaggggagtgcaggtaggcctaggccctcgcttattaccttaactttgttgagttatagtcgcacaatttattaatgacaaacgacccatgaatcgttatccataaataagggagaaaactaaaaaatgagacagattttcaccgttgcaaaatggacatgaaagaagtacctgccatttaattctctcctttctggaaattaaggtgtgacaggcattatccaatctcgccaagggagattgagcaatgcaaattggccgtataaaaacccaacgttgggctcagaaagaaactaaggatatatatatggaaatgtattgattactgaaggtgagaaacaagatgaacttctttgtgctaagcaatctcgccaaggaacagtttatttactcctccccaagggcctctagctagtctcgctcttggacccaatgatcacgcactaattggttcaagcgagaagcccttgagggagagtgaacaaccaaccccttcatcgattatctcttgacttggccttgttaattattgattccttgaagagggttcatatatatataacacaagccctttttatactgcactactgaatagaagctgcctaaaaatgtcgttgacttttatcatgtggggtctccatatcttgttttgtggcaagatattgcttcacaagatcaggatctccctttctccatttatcttagaggcatgatcaaacacacacgcacttctcgttggaatctttggcatcgggaacaaatatagtttacaaaaagaaaacatgcatgcatgtatggttttaataattaacaggatggcctttagagatcatgaagggcagtaacacagaatatagcagcttgcatgcctcaagtcaattagggcatctcaacgttatctttaatcccataagcattaattgctgtttgacattccttgtgtctcgtccctgtcttt

SEQ ID NO: 8921 - DNA, 1070 bp, Glycine max; identical to SEQ ID NO: 8920
  Gm_smallRNAprecursor_1754

SEQ ID NO: 8922 - DNA, 1141 bp, Glycine max
  Gm_smallRNAprecursor_1755
gttgtagtcttaagtcgtacagaatattcccttttccttagtctcaactgtccaagactaaatctcgtcgtcgtcattcatgctcagtaaggtgaggaatgacaattaacacgaacgacgatgagcttcagtcttggttagtttgagactttgagaaaagaaaaagtttggggatatgacttaggactacaatataagacacatagatagcataactatttatatttgagtcgggtgttgggttcatgagttccaaacttgatgagctcaactaaacccaatagttatgctatctatgtttcctgtgttgtaatcctaagtcgtacccagacatttttttcctcaaaatcttaaactgtccaagacttaggctcgtcatcgtcgtcgttcgtgctcattgtgattcttcatcctactaagcacgaccgatgaacaacgatgaaaatgaacgacgacaagcttgaatcttcaacaatttgagactttgaagaaagaaaatgtttaagtgcgacctaggactacaacataggagacatggatagcataaatatttatatttgagtcgggtgttggattcatgagttccaaacttgatgaaccaaaccagacccaatagttatactatctatgcgtcctaggttgtagtcctaagttgtacccaaacattatatttcctcagagtctaaaactgtccaagactcaagcttgtcgttgttcatgctcatcatcattcttcaccctatagaacaccatccaccccaccactggtatgatcacaccaccctttttctttatttcattccctttatattctcaattttagttcccttgcataaagtatttaaagattatcatgttgtttctccactttttaaaatttctccacaagtactttaggagaagaaaataagaagataaaaatgtaaaatgaattgaactcctttcaagataaaatcaacttatgcactttagtttttggagaagttagacgagagagcttttgattttggctaataggaaaagttcaattcagttgacctccttattttcttctcataggtgcttatagtgaagtttatccaagcaatgccttaggtgatttttattggttgagtgtaaagtgtttatactaataatatat

SEQ ID NO: 8923 - DNA, 1112 bp, Glycine max
  Gm_smallRNAprecursor_1756
cttaagtcgtacagaatattcccttttccttagtctcaactgtccaagactaaatctcgtcgtcgtcattcatgctcagtaaggtgaggaatgacaattaacacgaacgacgatgagcttcagtcttggttagtttgagactttgagaaaagaaaaagtttggggatatgacttaggactacaatataagacacatagatagcataactatttatatttgagtcgggtgttgggttcatgagttccaaacttgatgagctcaactaaacccaatagttatgctatctatgtttcctgtgttgtaatcctaagtcgtacccagacatttttttcctcaaaatcttaaactgtccaagacttaggctcgtcatcgtcgtcgttcgtgctcattgtgattcttcatcctactaagcacgaccgatgaacaacgatgaaaatgaacgacgacaagcttgaatcttcaacaatttgagactttgaagaaagaaaatgtttaagtgcgacctaggactacaacataggagacatggatagcataaatatttatatttgagtcgggtgttggattcatgagttccaaacttgatgaaccaaaccagacccaatagttatactatctatgcgtcctaggttgtagtcctaagttgtacccaaacattatatttcctcagagtctaaaactgtccaagactcaagcttgtcgttgttcatgctcatcatcattcttcaccctatagaacaccatccaccccaccactggtatgatcacaccaccctttttctttatttcattccctttatattctcaattttagttcccttgcataaagtatttaaagattatcatgttgtttctccactttttaaaatttctccacaagtactttaggagaagaaaataagaagataaaaatgtaaaatgaattgaactcctttcaagataaaatcaacttatgcactttagtttttggagaagttagacgagagagcttttgattttggctaataggaaaagttcaattcagttgacctccttattttcttctcataggtgcttatagtgaagtttatccaagcaatgccttaggtgatttttattggttgagtgtaaa

SEQ ID NO: 8924 - DNA, 1115 bp, Glycine max
  Gm_smallRNAprecursor_1757
gtcgtacagaatattcccttttccttagtctcaactgtccaagactaaatctcgtcgtcgtcattcatgctcagtaaggtgaggaatgacaattaacacgaacgacgatgagcttcagtcttggttagtttgagactttgagaaaagaaaaagtttggggatatgacttaggactacaatataagacacatagatagcataactatttatatttgagtcgggtgttgggttcatgagttccaaacttgatgagctcaactaaacccaatagttatgctatctatgtttcctgtgttgtaatcctaagtcgtacccagacatttttttcctcaaaatcttaaactgtccaagacttaggctcgtcatcgtcgtcgttcgtgctcattgtgattcttcatcctactaagcacgaccgatgaacaacgatgaaaatgaacgacgacaagcttgaatcttcaacaatttgagactttgaagaaagaaaatgtttaagtgcgacctaggactacaacataggagacatggatagcataaatatttatatttgagtcgggtgttggattcatgagttccaaacttgatgaaccaaaccagacccaatagttatactatctatgcgtcctaggttgtagtcctaagttgtacccaaacattatatttcctcagagtctaaaactgtccaagactcaagcttgtcgttgttcatgctcatcatcattcttcaccctatagaacaccatccaccccaccactggtatgatcacaccaccctttttctttatttcattccctttatattctcaattttagttcccttgcataaagtatttaaagattatcatgttgtttctccactttttaaaatttctccacaagtactttaggagaagaaaataagaagataaaaatgtaaaatgaattgaactcctttcaagataaaatcaacttatgcactttagtttttggagaagttagacgagagagcttttgattttggctaataggaaaagttcaattcagttgacctccttattttcttctcataggtgcttatagtgaagtttatccaagcaatgccttaggtgatttttattggttgagtgtaaagtgtttat

SEQ ID NO: 8925 - DNA, 1044 bp, Glycine max
  Gm_smallRNAprecursor_1758
tggcagaccatgaaactaaattatctccaagataaacacaataaccggacgtggacctgcgggtgtccggacatcccccccagtcagcatcagtatatgtggtgagtttgtcaactgaggagggagagagatgtaaaccgtgagtgatggtgcctttgatgtatcgaatgattcgcttcaaggcagtcatgtgttgtgttcttggatcatgcatgaaaagacatacttgctgaacggcataagaaatatcaggtcttgtgaaagtaaggtattgcaaagcaccagcaagacttctatattcagatggatcatgatatgggttgccagaggttccactgagttttgcttttgtatccactggagttgaaaccggtttgcaggaggacatggaagctctctcaatgatttcttcagcatatttatgttgagagagaaacatactactggaatgcctggtaactgagatacctagaaaataactaagaggacccaaatctttcatagcaaattcggaactcagtttagacatgatagattggcgtagagtgtcagaggatgcagtgagaatgatatcatctacataaagaaggatgtaggccgtgtcattgccattgtggtaggtgaataatgagttatcacatatactatgagaaaagcccaaggtagcaacaaaatcagtgaagcgttggtaccaagcacgaggtgcttgtttaagaccatagagagacttcttcaacaagcatacataatcagggtattgcggatcgcggaagccagcaggttggtacatgtacacggtttcattgagattaccatgtaggaaagcatttttgacatccaactgatgaagaccccatgatttggaaagagcaatactgagaaccgttcgaatagttgctggtttaactacgggactaaaggtttctccgcaatcgacaccagtctgttgattcgaaccattacctactagccgagccttgtacctttcaaatgaaccatcagctttctttttatgcctgaaaatccacaaacttcggataacat

SEQ ID NO: 8926 - DNA, 1129 bp, Glycine max
  Gm_smallRNAprecursor_1759
tggcagaccatgaaactaaattatctccaagataaacacaataaccggacgtggacctgcgggtgtccggacatcccccccagtcagcatcagtatatgtggtgagtttgtcaactgaggagggagagagatgtaaaccgtgagtgatggtgcctttgatgtatcgaatgattcgcttcaaggcagtcatgtgttgtgttcttggatcatgcatgaaaagacatacttgctgaacggcataagaaatatcaggtcttgtgaaagtaaggtattgcaaagcaccagcaagacttctatattcagatggatcatgatatgggttgccagaggttccactgagttttgcttttgtatccactggagttgaaaccggtttgcaggaggacatggaagctctctcaatgatttcttcagcatatttatgttgagagagaaacatactactggaatgcctggtaactgagatacctagaaaataactaagaggacccaaatctttcatagcaaattcggaactcagtttagacatgatagattggcgtagagtgtcagaggatgcagtgagaatgatatcatctacataaagaaggatgtaggccgtgtcattgccattgtggtaggtgaataatgagttatcacatatactatgagaaaagcccaaggtagcaacaaaatcagtgaagcgttggtaccaagcacgaggtgcttgtttaagaccatagagagacttcttcaacaagcatacataatcagggtattgcggatcgcggaagccagcaggttggtacatgtacacggtttcattgagattaccatgtaggaaagcatttttgacatccaactgatgaagaccccatgatttggaaagagcaatactgagaaccgttcgaatagttgctggtttaactacgggactaaaggtttctccgcaatcgacaccagtctgttgattcgaaccattacctactagccgagccttgtacctttcaaatgaaccatcagctttctttttatgcctgaaaatccacaaacttcggataacattagcatcagttggacggggcactaagtcccacgtcttattttcaataagagcattatattcgtcggtcatggccattttccaatt

SEQ ID NO: 8927 - DNA, 1079 bp, Glycine max
  Gm_smallRNAprecursor_1760
tagcttatctctccctattttcttttcttgttccactaatgggaaattgttaaacgctactccggtgatgggccttcttaattcttgacattcaattatatttagtttcatgtttgttctttgatgttaagtcgatttttttatgtattgtttggaacataaagtaattcatcaatgctgacaaaatctttgtttggttttgaagatttgagatggattacttttaagttttgggttagaacaagtggtcgaaaaaactttgtagccaaaaacaggaaaacatgaattgcattatggatcgatcatatgctcattgtgaaatgaaataattgtgattttcaaatgggtgttgctaggtgcacccagcattattgctggtgcacctagcacttaaggtaaaatgacaaaaatactcttgatccgtaagccattaaagttgatccgtagaaaccttacggatcaacttgatccataagccttttacggaacaatacggatcaacatgatccgtaagctttttacggatcaacttgatccgtaagacttttacggatcatgttgatccgtattgttctgtaaaaggcttacggatcaagttgatcagtatcaatcttatggatcaacttgatccgtacgatttacggatcaccctcacacacacccatcacaaatgtgaaaaaagcgcagggacagttttggtattttaattaaatgttgggtgcacctagcaatactcttttcaaatttgggtcgggtgggcccccataggtgggggaagagcggaagatgggtttgcatggaaaatttaatcgtttcttattttatgggtcaatgtacactacagagtaccactcttggtctaatgggttcaaatgtccgaaagaccaattaataatttaacaaatttgggtcattgtcggcccaaacaacaatggttgtgcataacaggttcctgttttcttgggttatgttccattgatcaaattaatatggatatacttaaacctatagtgtttgtttcacgaattacttatttactctaaaaaatatgtggttggaaatttttattttcatgtttg

SEQ ID NO: 8928 - DNA, 1080 bp, Glycine max
  Gm_smallRNAprecursor_1761
tagcttatctctccctattttcttttcttgttccactaatgggaaattgttaaacgctactccggtgatgggccttcttaattcttgacattcaattatatttagtttcatgtttgttctttgatgttaagtcgatttttttatgtattgtttggaacataaagtaattcatcaatgctgacaaaatctttgtttggttttgaagatttgagatggattacttttaagttttgggttagaacaagtggtcgaaaaaactttgtagccaaaaacaggaaaacatgaattgcattatggatcgatcatatgctcattgtgaaatgaaataattgtgattttcaaatgggtgttgctaggtgcacccagcattattgctggtgcacctagcacttaaggtaaaatgacaaaaatactcttgatccgtaagccattaaagttgatccgtagaaaccttacggatcaacttgatccataagccttttacggaacaatacggatcaacatgatccgtaagctttttacggatcaacttgatccgtaagacttttacggatcatgttgatccgtattgttctgtaaaaggcttacggatcaagttgatcagtatcaatcttatggatcaacttgatccgtacgatttacggatcaccctcacacacacccatcacaaatgtgaaaaaagcgcagggacagttttggtattttaattaaatgttgggtgcacctagcaatactcttttcaaatttgggtcgggtgggcccccataggtgggggaagagcggaagatgggtttgcatggaaaatttaatcgtttcttattttatgggtcaatgtacactacagagtaccactcttggtctaatgggttcaaatgtccgaaagaccaattaataatttaacaaatttgggtcattgtcggcccaaacaacaatggttgtgcataacaggttcctgttttcttgggttatgttccattgatcaaattaatatggatatacttaaacctatagtgtttgtttcacgaattacttatttactctaaaaaatatgtggttggaaatttttattttcatgtttgt

SEQ ID NO: 8929 - DNA, 1052 bp, Glycine max
  Gm_smallRNAprecursor_1762
ttgttccactaatgggaaattgttaaacgctactccggtgatgggccttcttaattcttgacattcaattatatttagtttcatgtttgttctttgatgttaagtcgatttttttatgtattgtttggaacataaagtaattcatcaatgctgacaaaatctttgtttggttttgaagatttgagatggattacttttaagttttgggttagaacaagtggtcgaaaaaactttgtagccaaaaacaggaaaacatgaattgcattatggatcgatcatatgctcattgtgaaatgaaataattgtgattttcaaatgggtgttgctaggtgcacccagcattattgctggtgcacctagcacttaaggtaaaatgacaaaaatactcttgatccgtaagccattaaagttgatccgtagaaaccttacggatcaacttgatccataagccttttacggaacaatacggatcaacatgatccgtaagctttttacggatcaacttgatccgtaagacttttacggatcatgttgatccgtattgttctgtaaaaggcttacggatcaagttgatcagtatcaatcttatggatcaacttgatccgtacgatttacggatcaccctcacacacacccatcacaaatgtgaaaaaagcgcagggacagttttggtattttaattaaatgttgggtgcacctagcaatactcttttcaaatttgggtcgggtgggcccccataggtgggggaagagcggaagatgggtttgcatggaaaatttaatcgtttcttattttatgggtcaatgtacactacagagtaccactcttggtctaatgggttcaaatgtccgaaagaccaattaataatttaacaaatttgggtcattgtcggcccaaacaacaatggttgtgcataacaggttcctgttttcttgggttatgttccattgatcaaattaatatggatatacttaaacctatagtgtttgtttcacgaattacttatttactctaaaaaatatgtggttggaaatttttattttcatgtttg

SEQ ID NO: 8930 - DNA, 1053 bp, Glycine max
  Gm_smallRNAprecursor_1763
ttgttccactaatgggaaattgttaaacgctactccggtgatgggccttcttaattcttgacattcaattatatttagtttcatgtttgttctttgatgttaagtcgatttttttatgtattgtttggaacataaagtaattcatcaatgctgacaaaatctttgtttggttttgaagatttgagatggattacttttaagttttgggttagaacaagtggtcgaaaaaactttgtagccaaaaacaggaaaacatgaattgcattatggatcgatcatatgctcattgtgaaatgaaataattgtgattttcaaatgggtgttgctaggtgcacccagcattattgctggtgcacctagcacttaaggtaaaatgacaaaaatactcttgatccgtaagccattaaagttgatccgtagaaaccttacggatcaacttgatccataagccttttacggaacaatacggatcaacatgatccgtaagctttttacggatcaacttgatccgtaagacttttacggatcatgttgatccgtattgttctgtaaaaggcttacggatcaagttgatcagtatcaatcttatggatcaacttgatccgtacgatttacggatcaccctcacacacacccatcacaaatgtgaaaaaagcgcagggacagttttggtattttaattaaatgttgggtgcacctagcaatactcttttcaaatttgggtcgggtgggcccccataggtgggggaagagcggaagatgggtttgcatggaaaatttaatcgtttcttattttatgggtcaatgtacactacagagtaccactcttggtctaatgggttcaaatgtccgaaagaccaattaataatttaacaaatttgggtcattgtcggcccaaacaacaatggttgtgcataacaggttcctgttttcttgggttatgttccattgatcaaattaatatggatatacttaaacctatagtgtttgtttcacgaattacttatttactctaaaaaatatgtggttggaaatttttattttcatgtttgt

SEQ ID NO: 8931 - DNA, 1037 bp, Glycine max
  Gm_smallRNAprecursor_1764
ccatattcggggtgtttaatcaaaacttcccgttgtatataaagcacgaagatctctctgaaattgcacatggtggtcaatgtctcagcatatcaccagggatgggtgactcagacaagtgcggcctatatattgaagaaaatccttcccgcttggttgccctaggaagactttacgagggatccacaacagttcacaacatcccgttgttgcatggccaagtcaaggttggtgttgaggaggttaaagatacagaggcaatgtctcagaataaagcacagccatattcggggtgtttaatcaaaacttcccgttgtatataaagcacgaagatctctctgaaattgcacatggtggtcaatgtctcagcatatcagttatacagttgtggattctgtaagtcattttagattactattaattaccaaagtaattgttttaaattcatacataattaactttgacttaacaacacagccatctgactgagacaagtgtgcgagcggggaattctgatgtgtatggattcctcgagccacagtccattcagagatctggacaatcacaatttgaatccgaaagttacatcaagagttggatacagagttcaaaacgagatgtttaccttggagcctatctgaataggtaagtcaaacacaataattgaatttaaataatctatactactacaataaactatattcgtctctactgcagtggacactggcaaatggtcgtcattctacctaaggaaaacctagttgtctggttttgttctttgcataacaggccagacaactaccttaagggaataattaacaggtcagtattgttttcaatacattttcattggcataactcaacaacatcaatattttaatgttccttatattcaacactagtgctttgaaaggacttgatgatactccacaaccgaaatccaaggctgctgctaggtggattgttgttaaggtacgtgatttaaataaaagttctacttatatatattttatgtgtgtgtacactaattgtagtta

SEQ ID NO: 8932 - DNA, 1044 bp, Glycine max
  Gm_smallRNAprecursor_1765
tttactctaatttcgattttggtccccttataatttaattcacacatttggccccccagttttataaatccctttataaattgtttctacagaattggtcttttgaatggtttagccattgatgctagagacatggtaggtcttgataaatctcacacttctttttcattgcaagtttttcactcacttggaatccagagaaaaatcactttgtctctctcccacttccggggttgttcaacttgggagagtgacacatgaatcccaattgggtctgaaaagggatttataaaactgagggaccatatgtgtgaatttaattatatggggaccaaaatcgaaattggagtaaaactgagggaccaaaagtacaactttacctacaaaaaatgaagcctttataaggaatcactcagactttgacacgtggcattgacacgtgacaaccacacatgacattaacacgtgacagttacacatgacattgacacgtgacagtcaacgtctgaggttaacggtcaatgtctaaattgggcttccaggaccaattttgcagggatttataaaactgggagaccaaatttgtaaattaaattatagggggaccaaacccgtaattgaaaataaagtgggagaccaattttacaattttgccaaataaaaaagaattagcgcaacaccgagttgtttctatcatatactattgggatgcatacaatataaaaaatcatattaaactaatattactatgtacaccccaattatgaaataaattctaaaaatattacaattttagtgaaaaaatgtggacacatatgtgcaatatcacttgtgtttccactaattaaaagtaaaaattatatacaaaatataacacatatttattttcacttaattcaagggaataaaaatttacttaaagttacattaatatttaaattaatatgttgaattttttattataataattttaatttaaaattattttttatggttgtttatttcttaacttaaatactctattaaatattttgttttacaaac

SEQ ID NO: 8933 - DNA, 1031 bp, Glycine max
  Gm_smallRNAprecursor_1766
acaagtagttttgaccgggactttaatgactacaggacaggtagtattgtccagcattaattacacattagttacaaacagacggttttgtgaccgaaattaaatttaatctaaacagataccaaaacaatcatcttcgttttggtaaaagggatcttcttcgtcttcttcaacagaacttgtttcttccttctttgaggatgaagcttcttcttcctgttgtaacatttgtagaacttccttcagatttttagctaagacctcctttgatgtcgatcctgctaaaaatgctgccagatgagacttttggttcaagaacactgaagtctctggatcagccgctttgaggaattctggatgggatttgaaccatagttttacttgttctggatccgctttggatgagtcaaattgtgtccaccattttacaaatgcgtgtctttgtagtgatggatattgatttgtcttttcagtcttgctgtagcgatattgccatgagaatatccatgacagtgcaaagcttgaaaagtatttaagatctgctggaattcgtgattcctgcgaattgtattgtttcttaaattgggaaaatccttgttggaccgtttctgggaatatctctgggattggtccaaagaagtcccaccattgcaaaaaccaattgggaaaattgtaaattgtgttggtcttgaaatatattagccatgaatgcttgaagcgggtattttggtgccaaaacaccttggtccaagcatcaacgtaatcccaataggtataacctaccggatcaaatggaactgaaaatctcttccctttgttcaagtctgaaccaaagtgtcttggttgaagaacttttagtatttggatggttgaatgggtgtttaaggtttggtcttttggatctttgaaatgtttgatagatactgagtttgaatctaccaaaatcaattcataaaaagttcttgtcttcaggatggtggttggtttgtagtgaaatcctggtgggaaagccttggccgtcgccttgaagg

SEQ ID NO: 8934 - DNA, 1031 bp, Glycine max; identical to SEQ ID NO: 8933
  Gm_smallRNAprecursor_1767

SEQ ID NO: 8935 - DNA, 1114 bp, Glycine max
  Gm_smallRNAprecursor_1768
ggactttaatgactacaggacaggtagtattgtccagcattaattacacattagttacaaacagacggttttgtgaccgaaattaaatttaatctaaacagataccaaaacaatcatcttcgttttggtaaaagggatcttcttcgtcttcttcaacagaacttgtttcttccttctttgaggatgaagcttcttcttcctgttgtaacatttgtagaacttccttcagatttttagctaagacctcctttgatgtcgatcctgctaaaaatgctgccagatgagacttttggttcaagaacactgaagtctctggatcagccgctttgaggaattctggatgggatttgaaccatagttttacttgttctggatccgctttggatgagtcaaattgtgtccaccattttacaaatgcgtgtctttgtagtgatggatattgatttgtcttttcagtcttgctgtagcgatattgccatgagaatatccatgacagtgcaaagcttgaaaagtatttaagatctgctggaattcgtgattcctgcgaattgtattgtttcttaaattgggaaaatccttgttggaccgtttctgggaatatctctgggattggtccaaagaagtcccaccattgcaaaaaccaattgggaaaattgtaaattgtgttggtcttgaaatatattagccatgaatgcttgaagcgggtattttggtgccaaaacaccttggtccaagcatcaacgtaatcccaataggtataacctaccggatcaaatggaactgaaaatctcttccctttgttcaagtctgaaccaaagtgtcttggttgaagaacttttagtatttggatggttgaatgggtgtttaaggtttggtcttttggatctttgaaatgtttgatagatactgagtttgaatctaccaaaatcaattcataaaaagttcttgtcttcaggatggtggttggtttgtagtgaaatcctggtgggaaagccttggccgtcgccttgaagggatttttgtcccaaaattcaggttccatttgcaaaacagttaacaatttatttttataaatataattgttagtttgtttggtaggtggtgtttgagcttt

SEQ ID NO: 8936 - DNA, 1146 bp, Glycine max
  Gm_smallRNAprecursor_1769
tacaggacaggtagtattgtccagcattaattacacattagttacaaacagacggttttgtgaccgaaattaaatttaatctaaacagataccaaaacaatcatcttcgttttggtaaaagggatcttcttcgtcttcttcaacagaacttgtttcttccttctttgaggatgaagcttcttcttcctgttgtaacatttgtagaacttccttcagatttttagctaagacctcctttgatgtcgatcctgctaaaaatgctgccagatgagacttttggttcaagaacactgaagtctctggatcagccgctttgaggaattctggatgggatttgaaccatagttttacttgttctggatccgctttggatgagtcaaattgtgtccaccattttacaaatgcgtgtctttgtagtgatggatattgatttgtcttttcagtcttgctgtagcgatattgccatgagaatatccatgacagtgcaaagcttgaaaagtatttaagatctgctggaattcgtgattcctgcgaattgtattgtttcttaaattgggaaaatccttgttggaccgtttctgggaatatctctgggattggtccaaagaagtcccaccattgcaaaaaccaattgggaaaattgtaaattgtgttggtcttgaaatatattagccatgaatgcttgaagcgggtattttggtgccaaaacaccttggtccaagcatcaacgtaatcccaataggtataacctaccggatcaaatggaactgaaaatctcttccctttgttcaagtctgaaccaaagtgtcttggttgaagaacttttagtatttggatggttgaatgggtgtttaaggtttggtcttttggatctttgaaatgtttgatagatactgagtttgaatctaccaaaatcaattcataaaaagttcttgtcttcaggatggtggttggtttgtagtgaaatcctggtgggaaagccttggccgtcgccttgaagggatttttgtcccaaaattcaggttccatttgcaaaacagttaacaatttatttttataaatataattgttagtttgtttggtaggtggtgtttgagctttggctaaaggtagttttcctttagtattggtggctgttttggtcat

SEQ ID NO: 8937 - DNA, 1146 bp, Glycine max; identical to SEQ ID NO: 8936
  Gm_smallRNAprecursor_1770

SEQ ID NO: 8938 - DNA, 1147 bp, Glycine max
  Gm_smallRNAprecursor_1771
tacaggacaggtagtattgtccagcattaattacacattagttacaaacagacggttttgtgaccgaaattaaatttaatctaaacagataccaaaacaatcatcttcgttttggtaaaagggatcttcttcgtcttcttcaacagaacttgtttcttccttctttgaggatgaagcttcttcttcctgttgtaacatttgtagaacttccttcagatttttagctaagacctcctttgatgtcgatcctgctaaaaatgctgccagatgagacttttggttcaagaacactgaagtctctggatcagccgctttgaggaattctggatgggatttgaaccatagttttacttgttctggatccgctttggatgagtcaaattgtgtccaccattttacaaatgcgtgtctttgtagtgatggatattgatttgtcttttcagtcttgctgtagcgatattgccatgagaatatccatgacagtgcaaagcttgaaaagtatttaagatctgctggaattcgtgattcctgcgaattgtattgtttcttaaattgggaaaatccttgttggaccgtttctgggaatatctctgggattggtccaaagaagtcccaccattgcaaaaaccaattgggaaaattgtaaattgtgttggtcttgaaatatattagccatgaatgcttgaagcgggtattttggtgccaaaacaccttggtccaagcatcaacgtaatcccaataggtataacctaccggatcaaatggaactgaaaatctcttccctttgttcaagtctgaaccaaagtgtcttggttgaagaacttttagtatttggatggttgaatgggtgtttaaggtttggtcttttggatctttgaaatgtttgatagatactgagtttgaatctaccaaaatcaattcataaaaagttcttgtcttcaggatggtggttggtttgtagtgaaatcctggtgggaaagccttggccgtcgccttgaagggatttttgtcccaaaattcaggttccatttgcaaaacagttaacaatttatttttataaatataattgttagtttgtttggtaggtggtgtttgagctttggctaaaggtagttttcctttagtattggtggctgttttggtcatt

SEQ ID NO: 8939 - DNA, 1147 bp, Glycine max; identical to SEQ ID NO: 8938
  Gm_smallRNAprecursor_1772

SEQ ID NO: 8940 - DNA, 1247 bp, Glycine max
  Gm_smallRNAprecursor_1773
tacaggacaggtagtattgtccagcattaattacacattagttacaaacagacggttttgtgaccgaaattaaatttaatctaaacagataccaaaacaatcatcttcgttttggtaaaagggatcttcttcgtcttcttcaacagaacttgtttcttccttctttgaggatgaagcttcttcttcctgttgtaacatttgtagaacttccttcagatttttagctaagacctcctttgatgtcgatcctgctaaaaatgctgccagatgagacttttggttcaagaacactgaagtctctggatcagccgctttgaggaattctggatgggatttgaaccatagttttacttgttctggatccgctttggatgagtcaaattgtgtccaccattttacaaatgcgtgtctttgtagtgatggatattgatttgtcttttcagtcttgctgtagcgatattgccatgagaatatccatgacagtgcaaagcttgaaaagtatttaagatctgctggaattcgtgattcctgcgaattgtattgtttcttaaattgggaaaatccttgttggaccgtttctgggaatatctctgggattggtccaaagaagtcccaccattgcaaaaaccaattgggaaaattgtaaattgtgttggtcttgaaatatattagccatgaatgcttgaagcgggtattttggtgccaaaacaccttggtccaagcatcaacgtaatcccaataggtataacctaccggatcaaatggaactgaaaatctcttccctttgttcaagtctgaaccaaagtgtcttggttgaagaacttttagtatttggatggttgaatgggtgtttaaggtttggtcttttggatctttgaaatgtttgatagatactgagtttgaatctaccaaaatcaattcataaaaagttcttgtcttcaggatggtggttggtttgtagtgaaatcctggtgggaaagccttggccgtcgccttgaagggatttttgtcccaaaattcaggttccatttgcaaaacagttaacaatttatttttataaatataattgttagtttgtttggtaggtggtgtttgagctttggctaaaggtagttttcctttagtattggtggctgttttggtcattgacgcattttggatcattgtttgtaaatttgattcagattcatcatcagattctgaggcaatgtctgcccaagattttttgattatttttggaaatttgg

SEQ ID NO: 8941 - DNA, 1247 bp, Glycine max; identical to SEQ ID NO: 8940
  Gm_smallRNAprecursor_1774

SEQ ID NO: 8942 - DNA, 1072 bp, Glycine max
  Gm_smallRNAprecursor_1775
gcttcttcttcctgttgtaacatttgtagaacttccttcagatttttagctaagacctcctttgatgtcgatcctgctaaaaatgctgccagatgagacttttggttcaagaacactgaagtctctggatcagccgctttgaggaattctggatgggatttgaaccatagttttacttgttctggatccgctttggatgagtcaaattgtgtccaccattttacaaatgcgtgtctttgtagtgatggatattgatttgtcttttcagtcttgctgtagcgatattgccatgagaatatccatgacagtgcaaagcttgaaaagtatttaagatctgctggaattcgtgattcctgcgaattgtattgtttcttaaattgggaaaatccttgttggaccgtttctgggaatatctctgggattggtccaaagaagtcccaccattgcaaaaaccaattgggaaaattgtaaattgtgttggtcttgaaatatattagccatgaatgcttgaagcgggtattttggtgccaaaacaccttggtccaagcatcaacgtaatcccaataggtataacctaccggatcaaatggaactgaaaatctcttccctttgttcaagtctgaaccaaagtgtcttggttgaagaacttttagtatttggatggttgaatgggtgtttaaggtttggtcttttggatctttgaaatgtttgatagatactgagtttgaatctaccaaaatcaattcataaaaagttcttgtcttcaggatggtggttggtttgtagtgaaatcctggtgggaaagccttggccgtcgccttgaagggatttttgtcccaaaattcaggttccatttgcaaaacagttaacaatttatttttataaatataattgttagtttgtttggtaggtggtgtttgagctttggctaaaggtagttttcctttagtattggtggctgttttggtcattgacgcattttggatcattgtttgtaaatttgattcagattcatcatcagattctgaggcaatgtctgcccaagattttttgattatttttggaaatttgg

SEQ ID NO: 8943 - DNA, 1174 bp, Glycine max
  Gm_smallRNAprecursor_1776
cgggtattttggtgccaaaacaccttggtccaagcatcaacgtaatcccaataggtataacctaccggatcaaatggaactgaaaatctcttccctttgttcaagtctgaaccaaagtgtcttggttgaagaacttttagtatttggatggttgaatgggtgtttaaggtttggtcttttggatctttgaaatgtttgatagatactgagtttgaatctaccaaaatcaattcataaaaagttcttgtcttcaggatggtggttggtttgtagtgaaatcctggtgggaaagccttggccgtcgccttgaagggatttttgtcccaaaattcaggttccatttgcaaaacagttaacaatttatttttataaatataattgttagtttgtttggtaggtggtgtttgagctttggctaaaggtagttttcctttagtattggtggctgttttggtcattgacgcattttggatcattgtttgtaaatttgattcagattcatcatcagattctgaggcaatgtctgcccaagattttttgattatttttggaaatttggtcagacccatgtcttgaagggcctgaagggtttcaattggccaagcatagtcggccgatgtttgtttggcggttgccggtttgggagattcctgagtggatggctcaggtttgattgaggcaatctgggttgatgacccttctaaattggttttctgggtagatgacccagcctgggttggtgacccagaagaggtagatgatttcttcatggttggttctggaagagccagcctggctcctttgcctgtactccttcctccccgtagggagattcccgatgccttaggaggcattaccacttttttgtaggaattcacgggtaaggtagtcaggtaatgaatttgaggtgcccttgatgtattctatgtcaaaatcaaagacacttaaaattgcttgccatcgtgcaaaaatttgttttgaggcaaggttttttacatctttttgtaaaatatctttggctgatttacaatcaaccctgattaaaaatttttggtttaataaatccgattgaaatttggaaatgcacaaaacaattgctaaaacttcttttttaacagttgaatattttaattgtgcaggattccaatgttttgatgtatatgcaatgacatga

SEQ ID NO: 8944 - DNA, 1173 bp, Glycine max
  Gm_smallRNAprecursor_1777
gggtattttggtgccaaaacaccttggtccaagcatcaacgtaatcccaataggtataacctaccggatcaaatggaactgaaaatctcttccctttgttcaagtctgaaccaaagtgtcttggttgaagaacttttagtatttggatggttgaatgggtgtttaaggtttggtcttttggatctttgaaatgtttgatagatactgagtttgaatctaccaaaatcaattcataaaaagttcttgtcttcaggatggtggttggtttgtagtgaaatcctggtgggaaagccttggccgtcgccttgaagggatttttgtcccaaaattcaggttccatttgcaaaacagttaacaatttatttttataaatataattgttagtttgtttggtaggtggtgtttgagctttggctaaaggtagttttcctttagtattggtggctgttttggtcattgacgcattttggatcattgtttgtaaatttgattcagattcatcatcagattctgaggcaatgtctgcccaagattttttgattatttttggaaatttggtcagacccatgtcttgaagggcctgaagggtttcaattggccaagcatagtcggccgatgtttgtttggcggttgccggtttgggagattcctgagtggatggctcaggtttgattgaggcaatctgggttgatgacccttctaaattggttttctgggtagatgacccagcctgggttggtgacccagaagaggtagatgatttcttcatggttggttctggaagagccagcctggctcctttgcctgtactccttcctccccgtagggagattcccgatgccttaggaggcattaccacttttttgtaggaattcacgggtaaggtagtcaggtaatgaatttgaggtgcccttgatgtattctatgtcaaaatcaaagacacttaaaattgcttgccatcgtgcaaaaatttgttttgaggcaaggttttttacatctttttgtaaaatatctttggctgatttacaatcaaccctgattaaaaatttttggtttaataaatccgattgaaatttggaaatgcacaaaacaattgctaaaacttcttttttaacagttgaatattttaattgtgcaggattccaatgttttgatgtatatgcaatgacatga

SEQ ID NO: 8945 - DNA, 1176 bp, Glycine max
  Gm_smallRNAprecursor_1778
gggtattttggtgccaaaacaccttggtccaagcatcaacgtaatcccaataggtataacctaccggatcaaatggaactgaaaatctcttccctttgttcaagtctgaaccaaagtgtcttggttgaagaacttttagtatttggatggttgaatgggtgtttaaggtttggtcttttggatctttgaaatgtttgatagatactgagtttgaatctaccaaaatcaattcataaaaagttcttgtcttcaggatggtggttggtttgtagtgaaatcctggtgggaaagccttggccgtcgccttgaagggatttttgtcccaaaattcaggttccatttgcaaaacagttaacaatttatttttataaatataattgttagtttgtttggtaggtggtgtttgagctttggctaaaggtagttttcctttagtattggtggctgttttggtcattgacgcattttggatcattgtttgtaaatttgattcagattcatcatcagattctgaggcaatgtctgcccaagattttttgattatttttggaaatttggtcagacccatgtcttgaagggcctgaagggtttcaattggccaagcatagtcggccgatgtttgtttggcggttgccggtttgggagattcctgagtggatggctcaggtttgattgaggcaatctgggttgatgacccttctaaattggttttctgggtagatgacccagcctgggttggtgacccagaagaggtagatgatttcttcatggttggttctggaagagccagcctggctcctttgcctgtactccttcctccccgtagggagattcccgatgccttaggaggcattaccacttttttgtaggaattcacgggtaaggtagtcaggtaatgaatttgaggtgcccttgatgtattctatgtcaaaatcaaagacacttaaaattgcttgccatcgtgcaaaaatttgttttgaggcaaggttttttacatctttttgtaaaatatctttggctgatttacaatcaaccctgattaaaaatttttggtttaataaatccgattgaaatttggaaatgcacaaaacaattgctaaaacttcttttttaacagttgaatattttaattgtgcaggattccaatgttttgatgtatatgcaatgacatgatct

SEQ ID NO: 8946 - DNA, 1129 bp, Glycine max
  Gm_smallRNAprecursor_1779
ttgcaaaacagttaacaatttatttttataaatataattgttagtttgtttggtaggtggtgtttgagctttggctaaaggtagttttcctttagtattggtggctgttttggtcattgacgcattttggatcattgtttgtaaatttgattcagattcatcatcagattctgaggcaatgtctgcccaagattttttgattatttttggaaatttggtcagacccatgtcttgaagggcctgaagggtttcaattggccaagcatagtcggccgatgtttgtttggcggttgccggtttgggagattcctgagtggatggctcaggtttgattgaggcaatctgggttgatgacccttctaaattggttttctgggtagatgacccagcctgggttggtgacccagaagaggtagatgatttcttcatggttggttctggaagagccagcctggctcctttgcctgtactccttcctccccgtagggagattcccgatgccttaggaggcattaccacttttttgtaggaattcacgggtaaggtagtcaggtaatgaatttgaggtgcccttgatgtattctatgtcaaaatcaaagacacttaaaattgcttgccatcgtgcaaaaatttgttttgaggcaaggttttttacatctttttgtaaaatatctttggctgatttacaatcaaccctgattaaaaatttttggtttaataaatccgattgaaatttggaaatgcacaaaacaattgctaaaacttcttttttaacagttgaatattttaattgtgcaggattccaatgttttgatgtatatgcaatgacatgatcttggccatggactctttgtttgaggatgccaccataacctatgtctgaagcatctgtttcgacaattttaaatgcctgtggaataggaagatacagacatttaatggattggactttgactttgatttctttaaccgtttgtgtatggaggtcagaccaaggaggcggatttttcttcagcctatcatgtaatggcttgacaatattatttaaataggggacaaattctcctacgtaatttagacaacctagaaatctttgtaactgggttttgtctaagatttggttggggaa

SEQ ID NO: 8947 - DNA, 1071 bp, Glycine max
  Gm_smallRNAprecursor_1780
taaattggttttctgggtagatgacccagcctgggttggtgacccagaagaggtagatgatttcttcatggttggttctggaagagccagcctggctcctttgcctgtactccttcctccccgtagggagattcccgatgccttaggaggcattaccacttttttgtaggaattcacgggtaaggtagtcaggtaatgaatttgaggtgcccttgatgtattctatgtcaaaatcaaagacacttaaaattgcttgccatcgtgcaaaaatttgttttgaggcaaggttttttacatctttttgtaaaatatctttggctgatttacaatcaaccctgattaaaaatttttggtttaataaatccgattgaaatttggaaatgcacaaaacaattgctaaaacttcttttttaacagttgaatattttaattgtgcaggattccaatgttttgatgtatatgcaatgacatgatcttggccatggactctttgtttgaggatgccaccataacctatgtctgaagcatctgtttcgacaattttaaatgcctgtggaataggaagatacagacatttaatggattggactttgactttgatttctttaaccgtttgtgtatggaggtcagaccaaggaggcggatttttcttcagcctatcatgtaatggcttgacaatattatttaaataggggacaaattctcctacgtaatttagacaacctagaaatctttgtaactgggttttgtctaagatttggttggggaatttgctagcaaactctattgacctttcgattggaatgattgtaccctgatatatattgtgaccaaggaatcgaattcgagtttggaaaagattgatttttgatttggagactgccaaaccattttgtttgatgatatgtatgaaggtttggagatgtttgaaatgttggtcaatgttttgggaaaagattaaaacatcatctatgtagacaatgacaaattttgaataaggattgaaaatatcattcataattttttgaaattctgaaggggcattcttcagcccgaatggcatcacgttcc

SEQ ID NO: 8948 - DNA, 1073 bp, Glycine max
  Gm_smallRNAprecursor_1781
taaattggttttctgggtagatgacccagcctgggttggtgacccagaagaggtagatgatttcttcatggttggttctggaagagccagcctggctcctttgcctgtactccttcctccccgtagggagattcccgatgccttaggaggcattaccacttttttgtaggaattcacgggtaaggtagtcaggtaatgaatttgaggtgcccttgatgtattctatgtcaaaatcaaagacacttaaaattgcttgccatcgtgcaaaaatttgttttgaggcaaggttttttacatctttttgtaaaatatctttggctgatttacaatcaaccctgattaaaaatttttggtttaataaatccgattgaaatttggaaatgcacaaaacaattgctaaaacttcttttttaacagttgaatattttaattgtgcaggattccaatgttttgatgtatatgcaatgacatgatcttggccatggactctttgtttgaggatgccaccataacctatgtctgaagcatctgtttcgacaattttaaatgcctgtggaataggaagatacagacatttaatggattggactttgactttgatttctttaaccgtttgtgtatggaggtcagaccaaggaggcggatttttcttcagcctatcatgtaatggcttgacaatattatttaaataggggacaaattctcctacgtaatttagacaacctagaaatctttgtaactgggttttgtctaagatttggttggggaatttgctagcaaactctattgacctttcgattggaatgattgtaccctgatatatattgtgaccaaggaatcgaattcgagtttggaaaagattgatttttgatttggagactgccaaaccattttgtttgatgatatgtatgaaggtttggagatgtttgaaatgttggtcaatgttttgggaaaagattaaaacatcatctatgtagacaatgacaaattttgaataaggattgaaaatatcattcataattttttgaaattctgaaggggcattcttcagcccgaatggcatcacgttccat

SEQ ID NO: 8949 - DNA, 1178 bp, Glycine max
  Gm_smallRNAprecursor_1782
tggttggttctggaagagccagcctggctcctttgcctgtactccttcctccccgtagggagattcccgatgccttaggaggcattaccacttttttgtaggaattcacgggtaaggtagtcaggtaatgaatttgaggtgcccttgatgtattctatgtcaaaatcaaagacacttaaaattgcttgccatcgtgcaaaaatttgttttgaggcaaggttttttacatctttttgtaaaatatctttggctgatttacaatcaaccctgattaaaaatttttggtttaataaatccgattgaaatttggaaatgcacaaaacaattgctaaaacttcttttttaacagttgaatattttaattgtgcaggattccaatgttttgatgtatatgcaatgacatgatcttggccatggactctttgtttgaggatgccaccataacctatgtctgaagcatctgtttcgacaattttaaatgcctgtggaataggaagatacagacatttaatggattggactttgactttgatttctttaaccgtttgtgtatggaggtcagaccaaggaggcggatttttcttcagcctatcatgtaatggcttgacaatattatttaaataggggacaaattctcctacgtaatttagacaacctagaaatctttgtaactgggttttgtctaagatttggttggggaatttgctagcaaactctattgacctttcgattggaatgattgtaccctgatatatattgtgaccaaggaatcgaattcgagtttggaaaagattgatttttgatttggagactgccaaaccattttgtttgatgatatgtatgaaggtttggagatgtttgaaatgttggtcaatgttttgggaaaagattaaaacatcatctatgtagacaatgacaaattttgaataaggattgaaaatatcattcataattttttgaaattctgaaggggcattcttcagcccgaatggcatcacgttccattcatattgcccgaaaggtacagtaaacgctgttttgtacctgtctgattcttggatttggatttgccaaaatccagatttcatatcaaattttgaaaatatcttcgcagaatttaatctgttaagcaaatcttttttgtttggaataggatatctaatccattgtaatgcttg

SEQ ID NO: 8950 - DNA, 1080 bp, Glycine max
  Gm_smallRNAprecursor_1783
gatgtttgaaatgttggtcaatgttttgggaaaagattaaaacatcatctatgtagacaatgacaaattttgaataaggattgaaaatatcattcataattttttgaaattctgaaggggcattcttcagcccgaatggcatcacgttccattcatattgcccgaaaggtacagtaaacgctgttttgtacctgtctgattcttggatttggatttgccaaaatccagatttcatatcaaattttgaaaatatcttcgcagaatttaatctgttaagcaaatcttttttgtttggaataggatatctaatccattgtaatgcttgatttaatggtttgtaatttatgactaagcggggtgttccacgctcaatctcagattgtttgttaacataaaaagccgcacaagaccatgggcttttgcttttccggattaggcctttatcaagcaaatccttgatttccttttgacagtattgaagaagttcttcattcatttggattggtctggcttttgtgggaatttgtttttccctaaagtctttctcataagggagatcgacaatatgtttctttctgtcccaaaatgcatgtggcaattcagaacaaacggtcgattcaatatgatttaataaagattgaattctttcttttacttggggttttcctagttgtatctgaatattattaaaagatacttcttcttttaagaagttaatttgattaatcttattttctataaggtttatatttctagaaattggtttagtagaaaaattaaatataatttttcttcctaaataatttgtggttattccttcattggatatttggatgggaaacagggctctaatgaagggcgttcctaagattacttcattcttaaggttttttaccagaagaaagtttgtgttaatcttaagaccttggttttcaattattgcatttgatagcttaaaattaatttttaattttgagccatttgccgtacttaatttttctgaggttttctcaaagaattttgtaggaattaatccttctaaaatgcagtttgaatcagcccctgtatcaaatagggcca

SEQ ID NO: 8951 - DNA, 1076 bp, Glycine max
  Gm_smallRNAprecursor_1784
ccatctttcgggaagagttacttcatcccattttatttttcttgggagagacacgttagcctttgtcatatcagtgataaacaaggttgtttctcctttttgaggttttaacaggactctagatgcacaagtattcatgaccttgtactggatcctataaattaaggctgctgggattgatccttctttcatgtcaaggccatgaaagtggatgtttaagaacatagagtcaagaatgtttctgtccatcagactcactgttttgtttggataacaattaaaatatattggaccttgtcctaagctggtttcgactgttccaattagggagtcttcgaattgattatgcctaatatctcttagacacattaaaactgctgcatctatgcccatatcaattaagggcttgatggctacttgtacacaaccgatgtgtaaatatttatacttacggctatgctcataaattgaattttttgaaagtagatgaaattcttcccctatatcttgtcctagaggaatattgttttctactgttttgattatgtaatcaaagttgtgtttgtctttaattgtttcaggaacgtatagttgatcctgagggatttctggaatgttccagtcatccatgttttgattaatatcttcgaatcggacttcctcatcgaagagattgtgttttggggcgacctcttgggtctggttatcttgatcacttaagagattggtgtttcttgaagaagatgaagaggaggaattcgagcgaaaagaaatacgggaaaacgatcgcaataatctagacatgattaaaacattctctaatatctttgccctcatttggttccataggaatctttccgtaaggctatatgttacagaacttcttggatctgaataaatggaaaagaagattttttttttttttaatacagacaatatagtttgaacattactcctatagccaccagtatattatgtctcaatattttatttgaacaatacaccttagccttactgccctttctcatccacgggacttactgctacagtatcattcaactaaaatatcagactgc

SEQ ID NO: 8952 - DNA, 1159 bp, Glycine max
  Gm_smallRNAprecursor_1785
ccatctttcgggaagagttacttcatcccattttatttttcttgggagagacacgttagcctttgtcatatcagtgataaacaaggttgtttctcctttttgaggttttaacaggactctagatgcacaagtattcatgaccttgtactggatcctataaattaaggctgctgggattgatccttctttcatgtcaaggccatgaaagtggatgtttaagaacatagagtcaagaatgtttctgtccatcagactcactgttttgtttggataacaattaaaatatattggaccttgtcctaagctggtttcgactgttccaattagggagtcttcgaattgattatgcctaatatctcttagacacattaaaactgctgcatctatgcccatatcaattaagggcttgatggctacttgtacacaaccgatgtgtaaatatttatacttacggctatgctcataaattgaattttttgaaagtagatgaaattcttcccctatatcttgtcctagaggaatattgttttctactgttttgattatgtaatcaaagttgtgtttgtctttaattgtttcaggaacgtatagttgatcctgagggatttctggaatgttccagtcatccatgttttgattaatatcttcgaatcggacttcctcatcgaagagattgtgttttggggcgacctcttgggtctggttatcttgatcacttaagagattggtgtttcttgaagaagatgaagaggaggaattcgagcgaaaagaaatacgggaaaacgatcgcaataatctagacatgattaaaacattctctaatatctttgccctcatttggttccataggaatctttccgtaaggctatatgttacagaacttcttggatctgaataaatggaaaagaagattttttttttttttaatacagacaatatagtttgaacattactcctatagccaccagtatattatgtctcaatattttatttgaacaatacaccttagccttactgccctttctcatccacgggacttactgctacagtatcattcaactaaaatatcagactgctgtgcttccagaaaatactgttcaaacacatactgtttaaattaaaattactgtacatgctttagatccataagttcagttaa

SEQ ID NO: 8953 - DNA, 1056 bp, Glycine max
  Gm_smallRNAprecursor_1786
gttgatcctgagggatttctggaatgttccagtcatccatgttttgattaatatcttcgaatcggacttcctcatcgaagagattgtgttttggggcgacctcttgggtctggttatcttgatcacttaagagattggtgtttcttgaagaagatgaagaggaggaattcgagcgaaaagaaatacgggaaaacgatcgcaataatctagacatgattaaaacattctctaatatctttgccctcatttggttccataggaatctttccgtaaggctatatgttacagaacttcttggatctgaataaatggaaaagaagattttttttttttttaatacagacaatatagtttgaacattactcctatagccaccagtatattatgtctcaatattttatttgaacaatacaccttagccttactgccctttctcatccacgggacttactgctacagtatcattcaactaaaatatcagactgctgtgcttccagaaaatactgttcaaacacatactgtttaaattaaaattactgtacatgctttagatccataagttcagttaacatatgcccttacggacactattcctacttccccatcaggctctgataccagaggtcagcggagtaggatcaaacggacagataggaagtaagaatgcagtatgattaatgaaatgaaaatataaacttgaaaacagatatcaaggtcacaccggagaccggcttacaaaacccaggttttcataaacaaagaaaccgaagcggcggcagagccgcacaggatcggtgaagggagaagagagaagaatgaaaaacagaaatttattgaatctagaaagaagcgcttacaaaaatcttgtttcagagcacctctcttccgaaacctgaaaaatgactaaatgaaagggtgcctcacaacatgcttgaggactccttatatagccaaatatctaagaccggtagttgccggtagttttgaccgggactatttgactgtttgttacaagacaagtagttttgaccgggactttaatgactacaggacagg

SEQ ID NO: 8954 - DNA, 1153 bp, Glycine max
  Gm_smallRNAprecursor_1787
gttgatcctgagggatttctggaatgttccagtcatccatgttttgattaatatcttcgaatcggacttcctcatcgaagagattgtgttttggggcgacctcttgggtctggttatcttgatcacttaagagattggtgtttcttgaagaagatgaagaggaggaattcgagcgaaaagaaatacgggaaaacgatcgcaataatctagacatgattaaaacattctctaatatctttgccctcatttggttccataggaatctttccgtaaggctatatgttacagaacttcttggatctgaataaatggaaaagaagattttttttttttttaatacagacaatatagtttgaacattactcctatagccaccagtatattatgtctcaatattttatttgaacaatacaccttagccttactgccctttctcatccacgggacttactgctacagtatcattcaactaaaatatcagactgctgtgcttccagaaaatactgttcaaacacatactgtttaaattaaaattactgtacatgctttagatccataagttcagttaacatatgcccttacggacactattcctacttccccatcaggctctgataccagaggtcagcggagtaggatcaaacggacagataggaagtaagaatgcagtatgattaatgaaatgaaaatataaacttgaaaacagatatcaaggtcacaccggagaccggcttacaaaacccaggttttcataaacaaagaaaccgaagcggcggcagagccgcacaggatcggtgaagggagaagagagaagaatgaaaaacagaaatttattgaatctagaaagaagcgcttacaaaaatcttgtttcagagcacctctcttccgaaacctgaaaaatgactaaatgaaagggtgcctcacaacatgcttgaggactccttatatagccaaatatctaagaccggtagttgccggtagttttgaccgggactatttgactgtttgttacaagacaagtagttttgaccgggactttaatgactacaggacaggtagtattgtccagcattaattacacattagttacaaacagacggttttgtgaccgaaattaaatttaatctaaacagataccaaaacaatcatcttc

SEQ ID NO: 8955 - DNA, 1049 bp, Glycine max
  Gm_smallRNAprecursor_1788
atcctgagggatttctggaatgttccagtcatccatgttttgattaatatcttcgaatcggacttcctcatcgaagagattgtgttttggggcgacctcttgggtctggttatcttgatcacttaagagattggtgtttcttgaagaagatgaagaggaggaattcgagcgaaaagaaatacgggaaaacgatcgcaataatctagacatgattaaaacattctctaatatctttgccctcatttggttccataggaatctttccgtaaggctatatgttacagaacttcttggatctgaataaatggaaaagaagattttttttttttttaatacagacaatatagtttgaacattactcctatagccaccagtatattatgtctcaatattttatttgaacaatacaccttagccttactgccctttctcatccacgggacttactgctacagtatcattcaactaaaatatcagactgctgtgcttccagaaaatactgttcaaacacatactgtttaaattaaaattactgtacatgctttagatccataagttcagttaacatatgcccttacggacactattcctacttccccatcaggctctgataccagaggtcagcggagtaggatcaaacggacagataggaagtaagaatgcagtatgattaatgaaatgaaaatataaacttgaaaacagatatcaaggtcacaccggagaccggcttacaaaacccaggttttcataaacaaagaaaccgaagcggcggcagagccgcacaggatcggtgaagggagaagagagaagaatgaaaaacagaaatttattgaatctagaaagaagcgcttacaaaaatcttgtttcagagcacctctcttccgaaacctgaaaaatgactaaatgaaagggtgcctcacaacatgcttgaggactccttatatagccaaatatctaagaccggtagttgccggtagttttgaccgggactatttgactgtttgttacaagacaagtagttttgaccgggactttaatgactacaggac

SEQ ID NO: 8956 - DNA, 1052 bp, Glycine max
  Gm_smallRNAprecursor_1789
atcctgagggatttctggaatgttccagtcatccatgttttgattaatatcttcgaatcggacttcctcatcgaagagattgtgttttggggcgacctcttgggtctggttatcttgatcacttaagagattggtgtttcttgaagaagatgaagaggaggaattcgagcgaaaagaaatacgggaaaacgatcgcaataatctagacatgattaaaacattctctaatatctttgccctcatttggttccataggaatctttccgtaaggctatatgttacagaacttcttggatctgaataaatggaaaagaagattttttttttttttaatacagacaatatagtttgaacattactcctatagccaccagtatattatgtctcaatattttatttgaacaatacaccttagccttactgccctttctcatccacgggacttactgctacagtatcattcaactaaaatatcagactgctgtgcttccagaaaatactgttcaaacacatactgtttaaattaaaattactgtacatgctttagatccataagttcagttaacatatgcccttacggacactattcctacttccccatcaggctctgataccagaggtcagcggagtaggatcaaacggacagataggaagtaagaatgcagtatgattaatgaaatgaaaatataaacttgaaaacagatatcaaggtcacaccggagaccggcttacaaaacccaggttttcataaacaaagaaaccgaagcggcggcagagccgcacaggatcggtgaagggagaagagagaagaatgaaaaacagaaatttattgaatctagaaagaagcgcttacaaaaatcttgtttcagagcacctctcttccgaaacctgaaaaatgactaaatgaaagggtgcctcacaacatgcttgaggactccttatatagccaaatatctaagaccggtagttgccggtagttttgaccgggactatttgactgtttgttacaagacaagtagttttgaccgggactttaatgactacaggacagg

SEQ ID NO: 8957 - DNA, 1064 bp, Glycine max
  Gm_smallRNAprecursor_1790
atcctgagggatttctggaatgttccagtcatccatgttttgattaatatcttcgaatcggacttcctcatcgaagagattgtgttttggggcgacctcttgggtctggttatcttgatcacttaagagattggtgtttcttgaagaagatgaagaggaggaattcgagcgaaaagaaatacgggaaaacgatcgcaataatctagacatgattaaaacattctctaatatctttgccctcatttggttccataggaatctttccgtaaggctatatgttacagaacttcttggatctgaataaatggaaaagaagattttttttttttttaatacagacaatatagtttgaacattactcctatagccaccagtatattatgtctcaatattttatttgaacaatacaccttagccttactgccctttctcatccacgggacttactgctacagtatcattcaactaaaatatcagactgctgtgcttccagaaaatactgttcaaacacatactgtttaaattaaaattactgtacatgctttagatccataagttcagttaacatatgcccttacggacactattcctacttccccatcaggctctgataccagaggtcagcggagtaggatcaaacggacagataggaagtaagaatgcagtatgattaatgaaatgaaaatataaacttgaaaacagatatcaaggtcacaccggagaccggcttacaaaacccaggttttcataaacaaagaaaccgaagcggcggcagagccgcacaggatcggtgaagggagaagagagaagaatgaaaaacagaaatttattgaatctagaaagaagcgcttacaaaaatcttgtttcagagcacctctcttccgaaacctgaaaaatgactaaatgaaagggtgcctcacaacatgcttgaggactccttatatagccaaatatctaagaccggtagttgccggtagttttgaccgggactatttgactgtttgttacaagacaagtagttttgaccgggactttaatgactacaggacaggtagtattgtcca

SEQ ID NO: 8958 - DNA, 1031 bp, Glycine max; identical to SEQ ID NO: 8933
  Gm_smallRNAprecursor_1791

SEQ ID NO: 8959 - DNA, 1031 bp, Glycine max; identical to SEQ ID NO: 8933
  Gm_smallRNAprecursor_1792

SEQ ID NO: 8960 - DNA, 1114 bp, Glycine max
  Gm_smallRNAprecursor_1793
ggactttaatgactacaggacaggtagtattgtccagcattaattacacattagttacaaacagacggttttgtgaccgaaattaaatttaatctaaacagataccaaaacaatcatcttcgttttggtaaaagggatcttcttcgtcttcttcaacagaacttgtttcttccttctttgaggatgaagcttcttcttcctgttgtaacatttgtagaacttccttcagatttttagctaagacctcctttgatgtcgatcctgctaaaaatgctgccagatgagacttttggttcaagaacactgaagtctctggatcagccgctttgaggaattctggatgggatttgaaccatagttttacttgttctggatccgctttggatgagtcaaattgtgtccaccattttacaaatgcgtgtctttgtagtgatggatattgatttgtcttttcagtcttgctgtagcgatattgccatgagaatatccatgacagtgcaaagcttgaaaagtatttaagatctgctggaattcgtgattcctgcgaattgtattgtttcttaaattgggaaaatccttgttggaccgtttctgggaatatctctgggattggtccaaagaagtcccaccattgcaaaaaccaattgggaaaattgtaaattgtgttggtcttgaaatatattagccatgaatgcttgaagcgggtattttggtgccaaaacaccttggtccaagcatcaacgtaatcccaataggtataacctaccggatcaaatggaactgaaaatctcttccctttgttcaagtctgaaccaaagtgtcttggttgaagaacttttagtatttggatggttgaatgggtgtttaaggtttggtcttttggatctttgaaatgtttgatagatactgagtttgaatctaccaaaatcaattcataaaaagttcttgtcttcaggatggtggttggtttgtagtgaaatcctggtgggaaagccttggccgtcgccttgaagggatttttgtcccaaaattcaggttccatctgcaaaacagttaacaatttatttttataaatataattgttagtttgtttggtaggtggtgtttgagcttt

SEQ ID NO: 8961 - DNA, 1146 bp, Glycine max
  Gm_smallRNAprecursor_1794
tacaggacaggtagtattgtccagcattaattacacattagttacaaacagacggttttgtgaccgaaattaaatttaatctaaacagataccaaaacaatcatcttcgttttggtaaaagggatcttcttcgtcttcttcaacagaacttgtttcttccttctttgaggatgaagcttcttcttcctgttgtaacatttgtagaacttccttcagatttttagctaagacctcctttgatgtcgatcctgctaaaaatgctgccagatgagacttttggttcaagaacactgaagtctctggatcagccgctttgaggaattctggatgggatttgaaccatagttttacttgttctggatccgctttggatgagtcaaattgtgtccaccattttacaaatgcgtgtctttgtagtgatggatattgatttgtcttttcagtcttgctgtagcgatattgccatgagaatatccatgacagtgcaaagcttgaaaagtatttaagatctgctggaattcgtgattcctgcgaattgtattgtttcttaaattgggaaaatccttgttggaccgtttctgggaatatctctgggattggtccaaagaagtcccaccattgcaaaaaccaattgggaaaattgtaaattgtgttggtcttgaaatatattagccatgaatgcttgaagcgggtattttggtgccaaaacaccttggtccaagcatcaacgtaatcccaataggtataacctaccggatcaaatggaactgaaaatctcttccctttgttcaagtctgaaccaaagtgtcttggttgaagaacttttagtatttggatggttgaatgggtgtttaaggtttggtcttttggatctttgaaatgtttgatagatactgagtttgaatctaccaaaatcaattcataaaaagttcttgtcttcaggatggtggttggtttgtagtgaaatcctggtgggaaagccttggccgtcgccttgaagggatttttgtcccaaaattcaggttccatctgcaaaacagttaacaatttatttttataaatataattgttagtttgtttggtaggtggtgtttgagctttggctaaaggtagttttcctttagtattggtggctgttttggtcat

SEQ ID NO: 8962 - DNA, 1146 bp, Glycine max; identical to SEQ ID NO: 8961
  Gm_smallRNAprecursor_1795

SEQ ID NO: 8963 - DNA, 1147 bp, Glycine max
  Gm_smallRNAprecursor_1796
tacaggacaggtagtattgtccagcattaattacacattagttacaaacagacggttttgtgaccgaaattaaatttaatctaaacagataccaaaacaatcatcttcgttttggtaaaagggatcttcttcgtcttcttcaacagaacttgtttcttccttctttgaggatgaagcttcttcttcctgttgtaacatttgtagaacttccttcagatttttagctaagacctcctttgatgtcgatcctgctaaaaatgctgccagatgagacttttggttcaagaacactgaagtctctggatcagccgctttgaggaattctggatgggatttgaaccatagttttacttgttctggatccgctttggatgagtcaaattgtgtccaccattttacaaatgcgtgtctttgtagtgatggatattgatttgtcttttcagtcttgctgtagcgatattgccatgagaatatccatgacagtgcaaagcttgaaaagtatttaagatctgctggaattcgtgattcctgcgaattgtattgtttcttaaattgggaaaatccttgttggaccgtttctgggaatatctctgggattggtccaaagaagtcccaccattgcaaaaaccaattgggaaaattgtaaattgtgttggtcttgaaatatattagccatgaatgcttgaagcgggtattttggtgccaaaacaccttggtccaagcatcaacgtaatcccaataggtataacctaccggatcaaatggaactgaaaatctcttccctttgttcaagtctgaaccaaagtgtcttggttgaagaacttttagtatttggatggttgaatgggtgtttaaggtttggtcttttggatctttgaaatgtttgatagatactgagtttgaatctaccaaaatcaattcataaaaagttcttgtcttcaggatggtggttggtttgtagtgaaatcctggtgggaaagccttggccgtcgccttgaagggatttttgtcccaaaattcaggttccatctgcaaaacagttaacaatttatttttataaatataattgttagtttgtttggtaggtggtgtttgagctttggctaaaggtagttttcctttagtattggtggctgttttggtcatt

SEQ ID NO: 8964 - DNA, 1147 bp, Glycine max; identical to SEQ ID NO: 8963
  Gm_smallRNAprecursor_1797

SEQ ID NO: 8965 - DNA, 1247 bp, Glycine max
  Gm_smallRNAprecursor_1798
tacaggacaggtagtattgtccagcattaattacacattagttacaaacagacggttttgtgaccgaaattaaatttaatctaaacagataccaaaacaatcatcttcgttttggtaaaagggatcttcttcgtcttcttcaacagaacttgtttcttccttctttgaggatgaagcttcttcttcctgttgtaacatttgtagaacttccttcagatttttagctaagacctcctttgatgtcgatcctgctaaaaatgctgccagatgagacttttggttcaagaacactgaagtctctggatcagccgctttgaggaattctggatgggatttgaaccatagttttacttgttctggatccgctttggatgagtcaaattgtgtccaccattttacaaatgcgtgtctttgtagtgatggatattgatttgtcttttcagtcttgctgtagcgatattgccatgagaatatccatgacagtgcaaagcttgaaaagtatttaagatctgctggaattcgtgattcctgcgaattgtattgtttcttaaattgggaaaatccttgttggaccgtttctgggaatatctctgggattggtccaaagaagtcccaccattgcaaaaaccaattgggaaaattgtaaattgtgttggtcttgaaatatattagccatgaatgcttgaagcgggtattttggtgccaaaacaccttggtccaagcatcaacgtaatcccaataggtataacctaccggatcaaatggaactgaaaatctcttccctttgttcaagtctgaaccaaagtgtcttggttgaagaacttttagtatttggatggttgaatgggtgtttaaggtttggtcttttggatctttgaaatgtttgatagatactgagtttgaatctaccaaaatcaattcataaaaagttcttgtcttcaggatggtggttggtttgtagtgaaatcctggtgggaaagccttggccgtcgccttgaagggatttttgtcccaaaattcaggttccatctgcaaaacagttaacaatttatttttataaatataattgttagtttgtttggtaggtggtgtttgagctttggctaaaggtagttttcctttagtattggtggctgttttggtcattgacgcattttggatcattgtttgtaaatttgattcagattcatcatcagattctgaggcaatgtctgcccaagattttttgattatttttggaaatttgg

SEQ ID NO: 8966 - DNA, 1247 bp, Glycine max; identical to SEQ ID NO: 8965
  Gm_smallRNAprecursor_1799

SEQ ID NO: 8967 - DNA, 1072 bp, Glycine max
  Gm_smallRNAprecursor_1800
gcttcttcttcctgttgtaacatttgtagaacttccttcagatttttagctaagacctcctttgatgtcgatcctgctaaaaatgctgccagatgagacttttggttcaagaacactgaagtctctggatcagccgctttgaggaattctggatgggatttgaaccatagttttacttgttctggatccgctttggatgagtcaaattgtgtccaccattttacaaatgcgtgtctttgtagtgatggatattgatttgtcttttcagtcttgctgtagcgatattgccatgagaatatccatgacagtgcaaagcttgaaaagtatttaagatctgctggaattcgtgattcctgcgaattgtattgtttcttaaattgggaaaatccttgttggaccgtttctgggaatatctctgggattggtccaaagaagtcccaccattgcaaaaaccaattgggaaaattgtaaattgtgttggtcttgaaatatattagccatgaatgcttgaagcgggtattttggtgccaaaacaccttggtccaagcatcaacgtaatcccaataggtataacctaccggatcaaatggaactgaaaatctcttccctttgttcaagtctgaaccaaagtgtcttggttgaagaacttttagtatttggatggttgaatgggtgtttaaggtttggtcttttggatctttgaaatgtttgatagatactgagtttgaatctaccaaaatcaattcataaaaagttcttgtcttcaggatggtggttggtttgtagtgaaatcctggtgggaaagccttggccgtcgccttgaagggatttttgtcccaaaattcaggttccatctgcaaaacagttaacaatttatttttataaatataattgttagtttgtttggtaggtggtgtttgagctttggctaaaggtagttttcctttagtattggtggctgttttggtcattgacgcattttggatcattgtttgtaaatttgattcagattcatcatcagattctgaggcaatgtctgcccaagattttttgattatttttggaaatttgg

SEQ ID NO: 8968 - DNA, 1174 bp, Glycine max
  Gm_smallRNAprecursor_1801
cgggtattttggtgccaaaacaccttggtccaagcatcaacgtaatcccaataggtataacctaccggatcaaatggaactgaaaatctcttccctttgttcaagtctgaaccaaagtgtcttggttgaagaacttttagtatttggatggttgaatgggtgtttaaggtttggtcttttggatctttgaaatgtttgatagatactgagtttgaatctaccaaaatcaattcataaaaagttcttgtcttcaggatggtggttggtttgtagtgaaatcctggtgggaaagccttggccgtcgccttgaagggatttttgtcccaaaattcaggttccatctgcaaaacagttaacaatttatttttataaatataattgttagtttgtttggtaggtggtgtttgagctttggctaaaggtagttttcctttagtattggtggctgttttggtcattgacgcattttggatcattgtttgtaaatttgattcagattcatcatcagattctgaggcaatgtctgcccaagattttttgattatttttggaaatttggtcagacccatgtcttgaagggcctgaagggtttcaattggccaagcatagtcggccgatgtttgtttggcggttgccggtttgggagattcctgagtggatggctcaggtttgattgaggcaatctgggttgatgacccttctaaattggttttctgggtagatgacccagcctgggttggtgacccagaagaggtagatgatttcttcatggttggttctggaagagccagcctggctcctttgcctgtactccttcctccccgtagggagattcccgatgccttaggaggcattaccacttttctgtaagaattcacgggtaaggtagtcaggtaatgaatttgaggtgcccttgatgtattctatgtcaaaatcaaagacacttaaaattgcttgccatcgtgcaaaaatttgtcttgatggctcagttaacatatgttaatgttgaatatatatatatatatatatataatataaaacctaagtgcatgctttagtgttgctttctcaaacttctttaactccaacttcaatcttttagctattgttgtaaattttaacattgttattatttgatttaaggttttttttatgtttcttttttattactgaa

SEQ ID NO: 8969 - DNA, 1173 bp, Glycine max
  Gm_smallRNAprecursor_1802
gggtattttggtgccaaaacaccttggtccaagcatcaacgtaatcccaataggtataacctaccggatcaaatggaactgaaaatctcttccctttgttcaagtctgaaccaaagtgtcttggttgaagaacttttagtatttggatggttgaatgggtgtttaaggtttggtcttttggatctttgaaatgtttgatagatactgagtttgaatctaccaaaatcaattcataaaaagttcttgtcttcaggatggtggttggtttgtagtgaaatcctggtgggaaagccttggccgtcgccttgaagggatttttgtcccaaaattcaggttccatctgcaaaacagttaacaatttatttttataaatataattgttagtttgtttggtaggtggtgtttgagctttggctaaaggtagttttcctttagtattggtggctgttttggtcattgacgcattttggatcattgtttgtaaatttgattcagattcatcatcagattctgaggcaatgtctgcccaagattttttgattatttttggaaatttggtcagacccatgtcttgaagggcctgaagggtttcaattggccaagcatagtcggccgatgtttgtttggcggttgccggtttgggagattcctgagtggatggctcaggtttgattgaggcaatctgggttgatgacccttctaaattggttttctgggtagatgacccagcctgggttggtgacccagaagaggtagatgatttcttcatggttggttctggaagagccagcctggctcctttgcctgtactccttcctccccgtagggagattcccgatgccttaggaggcattaccacttttctgtaagaattcacgggtaaggtagtcaggtaatgaatttgaggtgcccttgatgtattctatgtcaaaatcaaagacacttaaaattgcttgccatcgtgcaaaaatttgtcttgatggctcagttaacatatgttaatgttgaatatatatatatatatatatataatataaaacctaagtgcatgctttagtgttgctttctcaaacttctttaactccaacttcaatcttttagctattgttgtaaattttaacattgttattatttgatttaaggttttttttatgtttcttttttattactgaa

SEQ ID NO: 8970 - DNA, 1176 bp, Glycine max
  Gm_smallRNAprecursor_1803
gggtattttggtgccaaaacaccttggtccaagcatcaacgtaatcccaataggtataacctaccggatcaaatggaactgaaaatctcttccctttgttcaagtctgaaccaaagtgtcttggttgaagaacttttagtatttggatggttgaatgggtgtttaaggtttggtcttttggatctttgaaatgtttgatagatactgagtttgaatctaccaaaatcaattcataaaaagttcttgtcttcaggatggtggttggtttgtagtgaaatcctggtgggaaagccttggccgtcgccttgaagggatttttgtcccaaaattcaggttccatctgcaaaacagttaacaatttatttttataaatataattgttagtttgtttggtaggtggtgtttgagctttggctaaaggtagttttcctttagtattggtggctgttttggtcattgacgcattttggatcattgtttgtaaatttgattcagattcatcatcagattctgaggcaatgtctgcccaagattttttgattatttttggaaatttggtcagacccatgtcttgaagggcctgaagggtttcaattggccaagcatagtcggccgatgtttgtttggcggttgccggtttgggagattcctgagtggatggctcaggtttgattgaggcaatctgggttgatgacccttctaaattggttttctgggtagatgacccagcctgggttggtgacccagaagaggtagatgatttcttcatggttggttctggaagagccagcctggctcctttgcctgtactccttcctccccgtagggagattcccgatgccttaggaggcattaccacttttctgtaagaattcacgggtaaggtagtcaggtaatgaatttgaggtgcccttgatgtattctatgtcaaaatcaaagacacttaaaattgcttgccatcgtgcaaaaatttgtcttgatggctcagttaacatatgttaatgttgaatatatatatatatatatatataatataaaacctaagtgcatgctttagtgttgctttctcaaacttctttaactccaacttcaatcttttagctattgttgtaaattttaacattgttattatttgatttaaggttttttttatgtttcttttttattactgaaaat

SEQ ID NO: 8971 - DNA, 1068 bp, Glycine max
  Gm_smallRNAprecursor_1804
ggtcaaagttaaaaattcaaattaagaaaatcgtgggctagtaaactaaaacgttgagtgctgctaggtgcacccagcaattaagaggaaaagacatatgtacccctgggctaattaattttaaaaaaaaaagttgttcatttccgccatttctgcttcttctgcgttcttcgccatttttgcttcttctgcttcttcctcgccattcctgcttcttcctcgccattcctgcttcttcgtgaccttcgttcttccttcttcttcctctcgaaaaatcttgagcacgatcttcttcttcgtcttcttcgtgaccttcgctcgtcttcttcgtgaccttccaatcgcgtgttcttcgtcttcttcgtgacctttgttcgtcttcttcttcgtgggtgttgacagtggtgttgctgtgtcctcgcgtcggcattgttgaggtaagttcctcttcgtcttcgtcttcgtctccaccatgggtgttgacagggaaggttccggatcaacttgatccgtaagcttttctggatcaacatgatccgaaaatcttacggatcaacatgatccgaaaatcttacggatcaacttgatccggaaggtttgtaaacacaatttccagatcaacttgattcggaaattgtgttttcaccttttctttattacggatcacattgatctgtaagcttatttcggatcatgttgatccagaagcttagtgtagaaacagcttacggatcatgttgatccggaagttgtctgaaactgcattttttaaattgctaactctgaattttgtgtgttttttattctgaaatttgcagcttacttcatcaaggctatttctttaatatatggtcttcgtttgaactctgaacaaggtgagtagttgatgtatttgacgaatttttttttcaacgtttagcattactttggtagaatagtaaatattggttgtaatttggatcattcttattagattgttgttacaatttgttttgaccttagtcacaatttggttgtaaataatgacatgttgacatatagataaatagtattgattgattagcatga

SEQ ID NO: 8972 - DNA, 1101 bp, Glycine max
  Gm_smallRNAprecursor_1805
atgtgctttccattgctttaattgttgaataatccttgaaaatttgttttgttaaaactctattggtttagctttcatttcattttttgagtcctagacttatcgtcgtgaagccaaaataacaaaatgtggtatcaatgttctattggtcatgtgtagtgtgcaaagaaaataatcagatagcaagaaaaaatatttaaacttgtcaattctaattatctggggcaaaataggaacaacattgctctttaaaaattaaatttgtcttttgtgagtatttttggttactaaagtaaatatattagtaaatattaggcaaaattgcaaatttggtcccccaatttatcttcagttttggatttggtcccccagtaacttaattcacaaatttggtccctctattttgtaaaatcgtgcaatgttggtcccccataccacaatttgacgttgaccgttaacaagtgatgttgactgccatgtgtcacgttcttattggatgatgattgtcacgtgtcatgttctgattagatgtcaactccatgaaaggtgaaatgaattattgttttcattgaccaattagaacatgacacgtggtagttaacatcacttgttaacggtcaacgtccaattgtgacttgggggatcaacattgcacgattttacaaaatagggggaccaaatttgtgaattaaattattgggggaccaaatccgaaactggagataaattgtgggaccaaatttacaattttgcctaaatattaaatacgatacattcatcacaataaataatttttgtgacttctaaaaattttgtcactaatttaacagtgatccgtatatttgtgacaattggtgaccaatcaagaattgttactaggcatctctagtgaataatttttgggcttttagtgatgaatgttgtcatcacaacaaacatattttcttgtagtaatttttcttatatatatggtaactatgaccaatcaagaatcattactaggtatctctagtgaagaatttttaggcttttaatgatgaatgttgtcatcacaacaaatatattttcttgtagtgattttccttatatatatggtaacct

SEQ ID NO: 8973 - DNA, 1168 bp, Glycine max
  Gm_smallRNAprecursor_1806
tggtcttgtgcagctttttatgttaacaaacaagtcgagcttgaacgggatacgcctcgttaagttataaactacaaaacctctgaaccaagccctccaatggattaggtatcctattctaaataaaaaggacttactcaacagattgaactctgcaaaaatattttccaaatttgacatgaaatctggattttggcaaattcagatccaagaatcagatagatacaaaacagtcttcactgtacctttcgagcaatacgagcagaatgtaatgtcattcggtttgaagagcgccccttcagaatttcaaaaaatcatgaatgacatttttaatccttattcaaagttcgtcattgtctacatagatgatgttttaatcttctcccaaaacattgatcaacatttcaaacatctacagaccttcattcatatcatcaaacaaaatggtctgacagtttccaaatcaaaaatcaatctttttcaaacccgaattaggttccttggtcacaatatatatcaaggcacaatcattcaaaaagacaggtcaatagaatttgccagcaaattccccaatcaaattttagacaagacccagttacaacgattccttggttgtctaaattatgtaggagagtttgtcccatatttaaacaacatagtcaaaccattgcatgataggctgaagaaaattcgtcttcttggactgacctccatactcaaactgtcaaagatatcaaactcaaagttcaatccataaaatgtttgaatctccctatcccacatgcattcaaaattattgaaactgatgcatccgacataggttatggtggtatcctcatacaaagagcccatgaccaagagaatatgtcatagcatacacatcaaagcattggaattatgcacaactaaaatattcaactgttaaaaaagaagttttagcaattgttttgtgcattttcaaatttcaatcagatttgttaaatcaaaaaattttaatccagattgattgtaaatcagtcaaagatattttacaaaaagatatcaaaaatcttgtctcaaaacaaatttttgcaagatggcaagcaattttaagtgtctttgattttgatatagaatatatcaaaagcacctcaaactctctacctgactaccttacccgtgaattctt

SEQ ID NO: 8974 - DNA, 1188 bp, Glycine max
  Gm_smallRNAprecursor_1807
gccatgttttcattttgtgggtcaacaaacatctttgtctttcgcctataccagaccatgtagttcgagttaaagctcaataggccctcttgtcggggataagcgtcgaccctaaaagcatggcgattgtttcactgatcaatcattggggcgaacaattgcccccaattttcgtcatgtttcccttttagtgttatgccatgaatgttcaagggttgcgaatgagactctggaattggttgttgcattccaaattgtctcaatactctatccggttggtgccactcaataacttgaaaacaaattagtggcaccaccgcgcaccacgcgacactttcgactacacaaatgggaggcaacaatgatataacagttgcagtgtaaggctcccacacaaactgcatataacaacatagttgtcagcattttagtaaaataacacatatcattttttattttacaaatacaataccatgttcttacctcatgacgtttcataatatccaacttgcgacgaaaaactctcacatcatcattgccgatatgttgatttccatgtcgtagccacctacaaagattaaaatttaatataccctaaaaccatttattcttttaaaatgaaagacgcttttaaaaatgactaacctgtgccccagtggtttattttctacttgggaaagagtcctctttggagccaaggttggacatcattcccatgcccacatttgtagtaagatgcacatacctttgattgatttagttttataattggtggcactgcacatctctctatatagaaaagcaagtacagcaggtccccatgcatatgtgctacagtctccaaagtcacgtaaaaattgaaggtaccttagcgaaactttgttactgcttttgtcaacgaacaagacacctccaatgaatcgtagtatccatgcacgggcaaaccttcgtacttgttcttcgtcgtcgtggttatttatttgtgcaaaatggtgagccaaccaacttaatttaaccacactacctttaatttcaccttcttgtggtctgactcccaataattcctcacataaatcagcccaattaagatttgttggaccgattaatggtaaaccatccacacgtagacctaacaatacagagacgtcttgaagagtaatagtacactctccgcatctcatgtgaaac

SEQ ID NO: 8975 - DNA, 1158 bp, Glycine max
  Gm_smallRNAprecursor_1808
cttgaaaaaagaatttcctgattcaaagaaagaaaatgattctggaaataaaattatgaataaccggatctccactctagagaccaggttaaaccaaatagaaaagacggtagattttctttatgaaaatttcgaaaaagaaaaaaatccaaacttttctgaagaacatactagtgggcttatggcattacaaaataaagattgcatccctataatttgtaataaagagaaaaacaaaagcctacatattttagttaaaataaattttcccaaaataaataaatttaagcaaaccgaaataattctacaagccttggtagatactggttgttcttttacttctatatgccaaagtgttgtaccttagcaaaattgttttaaaagcaatataataaccaaaactagaacaatgtctggagacataataacaaatgatacagaaacacgaaatttcactattcaattgtccacaaattgtgaaattttcggtaataaaatttttataaataaagcagatgtggtggacttacgacctgctaaagaaaaaatgattttaggacttgattttattatacataataatagatcaattaccattacaaaagattacatattaatctctacaaactcacaaatgtcacctataatagatgaaatcacatcagagttacgaacaaagcgtggtgatgcccccaccaataataaacaatgtccttgtgatacacccggtagttgtaaaataaaagaatcaaaaaatcatagcaatatagaaacatgcgacacatcccacgattcttactatgaaagtactttaaatgaaacaaagctacaatatgagttatctgtagcagaatctgactacaaatctgtcaaaattaataaaattataacctttgataatatacaacaaattatagatggattaaataaaactagcataataggagaagaccctacaaaatattgggaaaaagatccagttatatgcaaactagaaatcataaacccagatctaataattaaaactaaagatattcagtatgggaatttcgaacaagaggaatgtaaaagccacataaaaatcctattagatctaaaagttatagcacccagcaccaatcctcatagaagccctgcttttatagttaataaacactc

SEQ ID NO: 8976 - DNA, 1090 bp, Glycine max
  Gm_smallRNAprecursor_1809
gtcttcatttgaaacctgagattaagactaaagatgataaaattcctgaagagattgaggaattgttactttcctataaggagatattcagggaacctacctcattaccccctgtaagggctcatgatcacaagattccttttaaggatagagtgtctacaatcaatgtgaggccctatagacactctacagtgcagaaagatgtgattgagcttatgactaaagagttattggatgtcgggttggtgcagcctagtaacaacccatattcatctccaattgtacttgtgaagaagaaagatggatcttggagaatgtgtataaattatagggagctaaacaaaagcactatcaaagacaaatatcctatacctattatagaagagctagttgatgaactacatggaagtggatggttttccaagattgatctccggtctggataccatcatattcaaatgtaccctacatgatgtaagctccattggagcttgtaggcctaggatcttctttatcaatggattcctttgcttcttggaagatgaatggtagcggaatggagaaggaagagagagaggagacgccacttcaaggagaagatgagtctaaaagaagctcaccaccataggaggccaaggataagagcttggaggaagaaggagatgaatgaagggagaggaagagaagagcacgaaattttatgctctaaaagagctctaaaatttgaagtttaatattcaaatgatcaaagttgaaaaaatgcacacacataacctctatttataacctaagtgtcacacaaaattggaaggaaattcaaatttcacttgaatttgaaattgaatttgtggagccaaaatttcactaattatgattagtgaattttagttatggttcagcccactaatccaagatcaattccaagattctccactaagtgtgcttagctgtcatgaggcatgtaaagcacgaaggacatgcacaaagtgtgactatatgatgtggcaatggggtgtagtaagcaaatgctcgcctccccctctaaaatttaattggattgggcttctaccaattcaattaaattttattt

SEQ ID NO: 8977 - DNA, 1150 bp, Glycine max
  Gm_smallRNAprecursor_1810
aaccttgcctcaaaacagatttttgcaagatggcaaacaattttaagcgtctttgattttaatatagaatatatcaagggctcttccaactctctacctgactacctcacccgtgaatttttacagaaaattaccgatgcctcctaaggtgtctagttccttaggcagaggagggggatccagtacaaaaggaaaagaggttctattggctctaccagagccaataaccaaaaaggcaactacatcatcttctgggtcacctacccagactgggtcatcaacctagaaaggaaagcttgaagggtcattgacccagataactaccgccaaacctgagtcatcaactcaggaatccccaaaaccaacaacaaccaaacagaccgtggctgactatgcctgatcaatacaaactctcttggccctagaagatataggcctcaccaaaataccaaaattggccaaaaagacctgggcagaaatggcctcagaatcagatgatgattctgaaacagatctgcaaaaacaaatccaaaaggccaaacagaccaaagctgtctgcaatcaaaaatcaagccaatcgttgactcaacaagaatcaacaccacaacccaacaacaattatatttcaaaaaacaaaattttcaatgttttacaaatggaaccagaatactgggacaagaatcctttcaaattaaccgccaaagtattccccccgggattccattacaggccaacagccacaaacaaaacccgcaaattctacgaattcattctaatagatacgaactcagtatctattaaacacttcaaagaccccaaagatccaaatctaaatacccattccacaatccaaatcctaaaggttatgcagccacgacgttatggccccaacttaaaccaacccaagaaattttctgcaccatttgaccccgaaggatataattattgggattacattgacgcctggaccaatgtgttctggcatcaaaatagtaaattcaagcattcatggctaatttacttcaaaaataacactgtgtataatttttcaaattggttcctccaatggtggaactacttcggaccaattccacagatattcccagaagaagtccaatagggattccaacaattcaacaagctctacaac

SEQ ID NO: 8978 - DNA, 1148 bp, Glycine max
  Gm_smallRNAprecursor_1811
accttgcctcaaaacagatttttgcaagatggcaaacaattttaagcgtctttgattttaatatagaatatatcaagggctcttccaactctctacctgactacctcacccgtgaatttttacagaaaattaccgatgcctcctaaggtgtctagttccttaggcagaggagggggatccagtacaaaaggaaaagaggttctattggctctaccagagccaataaccaaaaaggcaactacatcatcttctgggtcacctacccagactgggtcatcaacctagaaaggaaagcttgaagggtcattgacccagataactaccgccaaacctgagtcatcaactcaggaatccccaaaaccaacaacaaccaaacagaccgtggctgactatgcctgatcaatacaaactctcttggccctagaagatataggcctcaccaaaataccaaaattggccaaaaagacctgggcagaaatggcctcagaatcagatgatgattctgaaacagatctgcaaaaacaaatccaaaaggccaaacagaccaaagctgtctgcaatcaaaaatcaagccaatcgttgactcaacaagaatcaacaccacaacccaacaacaattatatttcaaaaaacaaaattttcaatgttttacaaatggaaccagaatactgggacaagaatcctttcaaattaaccgccaaagtattccccccgggattccattacaggccaacagccacaaacaaaacccgcaaattctacgaattcattctaatagatacgaactcagtatctattaaacacttcaaagaccccaaagatccaaatctaaatacccattccacaatccaaatcctaaaggttatgcagccacgacgttatggccccaacttaaaccaacccaagaaattttctgcaccatttgaccccgaaggatataattattgggattacattgacgcctggaccaatgtgttctggcatcaaaatagtaaattcaagcattcatggctaatttacttcaaaaataacactgtgtataatttttcaaattggttcctccaatggtggaactacttcggaccaattccacagatattcccagaagaagtccaatagggattccaacaattcaacaagctctacaa

SEQ ID NO: 8979 - DNA, 1149 bp, Glycine max
  Gm_smallRNAprecursor_1812
accttgcctcaaaacagatttttgcaagatggcaaacaattttaagcgtctttgattttaatatagaatatatcaagggctcttccaactctctacctgactacctcacccgtgaatttttacagaaaattaccgatgcctcctaaggtgtctagttccttaggcagaggagggggatccagtacaaaaggaaaagaggttctattggctctaccagagccaataaccaaaaaggcaactacatcatcttctgggtcacctacccagactgggtcatcaacctagaaaggaaagcttgaagggtcattgacccagataactaccgccaaacctgagtcatcaactcaggaatccccaaaaccaacaacaaccaaacagaccgtggctgactatgcctgatcaatacaaactctcttggccctagaagatataggcctcaccaaaataccaaaattggccaaaaagacctgggcagaaatggcctcagaatcagatgatgattctgaaacagatctgcaaaaacaaatccaaaaggccaaacagaccaaagctgtctgcaatcaaaaatcaagccaatcgttgactcaacaagaatcaacaccacaacccaacaacaattatatttcaaaaaacaaaattttcaatgttttacaaatggaaccagaatactgggacaagaatcctttcaaattaaccgccaaagtattccccccgggattccattacaggccaacagccacaaacaaaacccgcaaattctacgaattcattctaatagatacgaactcagtatctattaaacacttcaaagaccccaaagatccaaatctaaatacccattccacaatccaaatcctaaaggttatgcagccacgacgttatggccccaacttaaaccaacccaagaaattttctgcaccatttgaccccgaaggatataattattgggattacattgacgcctggaccaatgtgttctggcatcaaaatagtaaattcaagcattcatggctaatttacttcaaaaataacactgtgtataatttttcaaattggttcctccaatggtggaactacttcggaccaattccacagatattcccagaagaagtccaatagggattccaacaattcaacaagctctacaac

SEQ ID NO: 8980 - DNA, 1073 bp, Glycine max
  Gm_smallRNAprecursor_1813
tgtctagttccttaggcagaggagggggatccagtacaaaaggaaaagaggttctattggctctaccagagccaataaccaaaaaggcaactacatcatcttctgggtcacctacccagactgggtcatcaacctagaaaggaaagcttgaagggtcattgacccagataactaccgccaaacctgagtcatcaactcaggaatccccaaaaccaacaacaaccaaacagaccgtggctgactatgcctgatcaatacaaactctcttggccctagaagatataggcctcaccaaaataccaaaattggccaaaaagacctgggcagaaatggcctcagaatcagatgatgattctgaaacagatctgcaaaaacaaatccaaaaggccaaacagaccaaagctgtctgcaatcaaaaatcaagccaatcgttgactcaacaagaatcaacaccacaacccaacaacaattatatttcaaaaaacaaaattttcaatgttttacaaatggaaccagaatactgggacaagaatcctttcaaattaaccgccaaagtattccccccgggattccattacaggccaacagccacaaacaaaacccgcaaattctacgaattcattctaatagatacgaactcagtatctattaaacacttcaaagaccccaaagatccaaatctaaatacccattccacaatccaaatcctaaaggttatgcagccacgacgttatggccccaacttaaaccaacccaagaaattttctgcaccatttgaccccgaaggatataattattgggattacattgacgcctggaccaatgtgttctggcatcaaaatagtaaattcaagcattcatggctaatttacttcaaaaataacactgtgtataatttttcaaattggttcctccaatggtggaactacttcggaccaattccacagatattcccagaagaagtccaatagggattccaacaattcaacaagctctacaacagcaaggaatcatgaattccgacagatttgaagtacttttccagttttgccttgtcatggattttttcatgg

SEQ ID NO: 8981 - DNA, 1145 bp, Glycine max
  Gm_smallRNAprecursor_1814
tctaaatacccattccacaatccaaatcctaaaggttatgcagccacgacgttatggccccaacttaaaccaacccaagaaattttctgcaccatttgaccccgaaggatataattattgggattacattgacgcctggaccaatgtgttctggcatcaaaatagtaaattcaagcattcatggctaatttacttcaaaaataacactgtgtataatttttcaaattggttcctccaatggtggaactacttcggaccaattccacagatattcccagaagaagtccaatagggattccaacaattcaacaagctctacaacagcaaggaatcatgaattccgacagatttgaagtacttttccagttttgccttgtcatggattttttcatggcaatacaggtacggaaaaaccgaaaacaacaaacagtatccaccatcgcagagacacgcctttgtaaaatggtggtcacaatttgatacctcaaaggctgctccagaacaagtcaagaactggttccagagcaatcctgagttcctcaaacctgctgacccggagacatctttgtttctgaatcagaagtcgcaacttgcagcattcttagcaagctcaaaatctaaagagagtcttgctcagaatctcaaagaagttctccaactacttcaacaggaagtggaagaagaaccccccaagaaggaagccgaatcatctgagacaaatgatgaccaagaagattatatatatatatatatatatagaaaacaacagagaggaagtattgaagtaacactaactaataaatatttattgagcacggttgcacagatactcccaagtcaatactatagatgttggccaatcttggtgctttctaactagtctcaaataacttcactcaatcaaataatcaaatgaaaaatcaactcatgtctcgtgcacattaatttttcccttcaccatatacaattataaaatccttttttcataagctataaatcaaatacttatatatcaattgaaaaaatcccataaggtaaaatctaatccaacctgtaccataagctttgtttatgcaagtcaaacacaaatatatactcgttttgtactctgcattaatacacattattcctgtcggttgttaata

SEQ ID NO: 8982 - DNA, 1124 bp, Glycine max
  Gm_smallRNAprecursor_1815
attccacaatccaaatcctaaaggttatgcagccacgacgttatggccccaacttaaaccaacccaagaaattttctgcaccatttgaccccgaaggatataattattgggattacattgacgcctggaccaatgtgttctggcatcaaaatagtaaattcaagcattcatggctaatttacttcaaaaataacactgtgtataatttttcaaattggttcctccaatggtggaactacttcggaccaattccacagatattcccagaagaagtccaatagggattccaacaattcaacaagctctacaacagcaaggaatcatgaattccgacagatttgaagtacttttccagttttgccttgtcatggattttttcatggcaatacaggtacggaaaaaccgaaaacaacaaacagtatccaccatcgcagagacacgcctttgtaaaatggtggtcacaatttgatacctcaaaggctgctccagaacaagtcaagaactggttccagagcaatcctgagttcctcaaacctgctgacccggagacatctttgtttctgaatcagaagtcgcaacttgcagcattcttagcaagctcaaaatctaaagagagtcttgctcagaatctcaaagaagttctccaactacttcaacaggaagtggaagaagaaccccccaagaaggaagccgaatcatctgagacaaatgatgaccaagaagattatatatatatatatatatatagaaaacaacagagaggaagtattgaagtaacactaactaataaatatttattgagcacggttgcacagatactcccaagtcaatactatagatgttggccaatcttggtgctttctaactagtctcaaataacttcactcaatcaaataatcaaatgaaaaatcaactcatgtctcgtgcacattaatttttcccttcaccatatacaattataaaatccttttttcataagctataaatcaaatacttatatatcaattgaaaaaatcccataaggtaaaatctaatccaacctgtaccataagctttgtttatgcaagtcaaacacaaatatatactcgttttgtactctgcattaatacacattattcctgtcg

SEQ ID NO: 8983 - DNA, 1123 bp, Glycine max
  Gm_smallRNAprecursor_1816
ttccacaatccaaatcctaaaggttatgcagccacgacgttatggccccaacttaaaccaacccaagaaattttctgcaccatttgaccccgaaggatataattattgggattacattgacgcctggaccaatgtgttctggcatcaaaatagtaaattcaagcattcatggctaatttacttcaaaaataacactgtgtataatttttcaaattggttcctccaatggtggaactacttcggaccaattccacagatattcccagaagaagtccaatagggattccaacaattcaacaagctctacaacagcaaggaatcatgaattccgacagatttgaagtacttttccagttttgccttgtcatggattttttcatggcaatacaggtacggaaaaaccgaaaacaacaaacagtatccaccatcgcagagacacgcctttgtaaaatggtggtcacaatttgatacctcaaaggctgctccagaacaagtcaagaactggttccagagcaatcctgagttcctcaaacctgctgacccggagacatctttgtttctgaatcagaagtcgcaacttgcagcattcttagcaagctcaaaatctaaagagagtcttgctcagaatctcaaagaagttctccaactacttcaacaggaagtggaagaagaaccccccaagaaggaagccgaatcatctgagacaaatgatgaccaagaagattatatatatatatatatatatagaaaacaacagagaggaagtattgaagtaacactaactaataaatatttattgagcacggttgcacagatactcccaagtcaatactatagatgttggccaatcttggtgctttctaactagtctcaaataacttcactcaatcaaataatcaaatgaaaaatcaactcatgtctcgtgcacattaatttttcccttcaccatatacaattataaaatccttttttcataagctataaatcaaatacttatatatcaattgaaaaaatcccataaggtaaaatctaatccaacctgtaccataagctttgtttatgcaagtcaaacacaaatatatactcgttttgtactctgcattaatacacattattcctgtcg

SEQ ID NO: 8984 - DNA, 1177 bp, Glycine max
  Gm_smallRNAprecursor_1817
gtccaatctgttatgctcctatctatgaacacacatcttgtgcatctaacattattccttttagaatacctttcttatgctttattattctcatcaatgttgttaaatagcattattgcgctattgcattgtggaattccttggatgtgctattgtgactccagccgcaattgtggccgctatggatgtcgtggttgcggcatgtgtcttgcattcctcttatcatctctggagagctatgaagcacaaatttcgacactgacaccagaacgacactgacaccaacaccgcgacatggctaaattctaaaacataagacacggggacacaacatatgtgtgtgtgtgtgtatatatatatatataataagcataaaaaaattatattaagtagcactattataattgaaaagaaaatttcacaagacaaaaactttgtctctttaaaaaataatctaaagaaacgtgctaatatctttaataaagagtctcaccttaaaaaagtaccaagataaatcatcataattgaaaagataaataagaaactgttaatcctaatctatctaagttctttcttttccttcttgatcatcatcattaaaaaacacactcaagaaggaagaggaagaacttagatagattaagattaacaattttttatttatcttttcaattatgatgatttatcttggtacttttttaggtgaaactctttattaaatatattagcaagtttgtttttagattattttttaaagagacaaagtttttgccttgtgaaattttcttttgaatgataatggtgctacttaatatgattttttgatgcttattatgtgtgtgtgtgtgtgttgtgtccctatgtcttatgttttagaatttagccgtgtcctgtgcttcataggttgtcagcatttaatgattttagattgtgcttctggtcatgttctattggtgaagaattttaattgtgtctgacttttaaccttctaacagaggtatgatatgcattggacagaagcgctttcagaaggcattggaccttctgcataatgtaagtaatctacatacaattatacttgtattgatcatggtttgttcatatctgcgttttggttcagcatttgtaatagcttattggttatatattccaggttgtaactgctcccatgtctacc

SEQ ID NO: 8985 - DNA, 1231 bp, Glycine max
  Gm_smallRNAprecursor_1818
taaatacccattccacaatccaaatcctgaaggttatgcagccacgacattatggctcaaacttaaaccaacccaaaaaattctctgcaccatttgatcatgcagggtataattattgggattacgttggcgcctggaccaatgtgttctggcatcaaaatagtaaattcaagcattcatggctgatttacttcaaaaataatactgcatataattttccaaattggttcttccaatggtggaactacttcggaccaattccacaaatatttccagaagaagtccaacagggattcgaacaattcaacaagctctataatagcaaggaatcacgaattccggcagatttaaagtatttttccagttttgccttgtcatggatcttttcatggcaatacagatacggaaaaactgaaaacaacaagcaatatccaccgttacagagacacgcctttgtaaaatggtggtcacaatttgatacttcaaaggctgctccagatcaagtcaagaactggttccagagcaatcctgagttccttaaacctgctgatccggagacatctttgtttctaaatcagaagtcgcaactagcagcattcttagcaagctcaaaatctaaagaaagtcttgctcagaatctcaaagaagttctccaactacttcaacaggaagtggaagaagaaccttccaagaaggaaactgaatcataagagactaatgatgaccaagaagatgatccattctaccagaatgaagatgactgttttggtatatcattggacgacgattaattagttgtaataatcatgaattattgtaactaacttgtcagtttcttttaaataatgtaatttgtaaaaagttttgtaacagttccgataaacattaccgatagtgtagaaacagtaaaaattgggtctatttaaaggagtcctcgtcccctttgtgaggcaccctttcagatagactcagaatcaggttttagagagagaagctctgcctagggaaaaactctttgtaagcttttctttcggtttcaataaatttcaagttctatttttcatatctcccttctcccctcaccgatcctgtgcggcgctaccgccgcttcggtttctttgttttcaaaaacttgggtttgtaagccgtttcggtgtgcccttgatatctgctttacaagtttataattcttacgtttgattttatcatactgcattcttacttcctattt

SEQ ID NO: 8986 - DNA, 1124 bp, Glycine max
  Gm_smallRNAprecursor_1819
attccacaatccaaatcctgaaggttatgcagccacgacattatggctcaaacttaaaccaacccaaaaaattctctgcaccatttgatcatgcagggtataattattgggattacgttggcgcctggaccaatgtgttctggcatcaaaatagtaaattcaagcattcatggctgatttacttcaaaaataatactgcatataattttccaaattggttcttccaatggtggaactacttcggaccaattccacaaatatttccagaagaagtccaacagggattcgaacaattcaacaagctctataatagcaaggaatcacgaattccggcagatttaaagtatttttccagttttgccttgtcatggatcttttcatggcaatacagatacggaaaaactgaaaacaacaagcaatatccaccgttacagagacacgcctttgtaaaatggtggtcacaatttgatacttcaaaggctgctccagatcaagtcaagaactggttccagagcaatcctgagttccttaaacctgctgatccggagacatctttgtttctaaatcagaagtcgcaactagcagcattcttagcaagctcaaaatctaaagaaagtcttgctcagaatctcaaagaagttctccaactacttcaacaggaagtggaagaagaaccttccaagaaggaaactgaatcataagagactaatgatgaccaagaagatgatccattctaccagaatgaagatgactgttttggtatatcattggacgacgattaattagttgtaataatcatgaattattgtaactaacttgtcagtttcttttaaataatgtaatttgtaaaaagttttgtaacagttccgataaacattaccgatagtgtagaaacagtaaaaattgggtctatttaaaggagtcctcgtcccctttgtgaggcaccctttcagatagactcagaatcaggttttagagagagaagctctgcctagggaaaaactctttgtaagcttttctttcggtttcaataaatttcaagttctatttttcatatctcccttctcccctcaccgatcctgtgcggcgctaccgccgcttcggtttctttgttttcaaaaact

SEQ ID NO: 8987 - DNA, 1123 bp, Glycine max
  Gm_smallRNAprecursor_1820
ttccacaatccaaatcctgaaggttatgcagccacgacattatggctcaaacttaaaccaacccaaaaaattctctgcaccatttgatcatgcagggtataattattgggattacgttggcgcctggaccaatgtgttctggcatcaaaatagtaaattcaagcattcatggctgatttacttcaaaaataatactgcatataattttccaaattggttcttccaatggtggaactacttcggaccaattccacaaatatttccagaagaagtccaacagggattcgaacaattcaacaagctctataatagcaaggaatcacgaattccggcagatttaaagtatttttccagttttgccttgtcatggatcttttcatggcaatacagatacggaaaaactgaaaacaacaagcaatatccaccgttacagagacacgcctttgtaaaatggtggtcacaatttgatacttcaaaggctgctccagatcaagtcaagaactggttccagagcaatcctgagttccttaaacctgctgatccggagacatctttgtttctaaatcagaagtcgcaactagcagcattcttagcaagctcaaaatctaaagaaagtcttgctcagaatctcaaagaagttctccaactacttcaacaggaagtggaagaagaaccttccaagaaggaaactgaatcataagagactaatgatgaccaagaagatgatccattctaccagaatgaagatgactgttttggtatatcattggacgacgattaattagttgtaataatcatgaattattgtaactaacttgtcagtttcttttaaataatgtaatttgtaaaaagttttgtaacagttccgataaacattaccgatagtgtagaaacagtaaaaattgggtctatttaaaggagtcctcgtcccctttgtgaggcaccctttcagatagactcagaatcaggttttagagagagaagctctgcctagggaaaaactctttgtaagcttttctttcggtttcaataaatttcaagttctatttttcatatctcccttctcccctcaccgatcctgtgcggcgctaccgccgcttcggtttctttgttttcaaaaact

SEQ ID NO: 8988 - DNA, 1036 bp, Glycine max
  Gm_smallRNAprecursor_1821
agaccacaagaaggtgaaattaaaggtagtgtgattaaattaagttggctggctcaccattttgcacaaataaataatgacgacgacgaagaacaagtacgaaggtttgcccgtgcatggatactgagattcattggaggtgtcttgtccgttgacaaaaccagtaacaaagtttcgctaaggtaccttcaatttttacgtgactttgaagaatgtggcacatatgcatggggagcttccgtacttgcttttctatacagagagatgtacagtgccaccgattataaaactaaatcaatcggaggtatgtgcatcttactacaaatgtgggcatgagaacgatgtccaaccttggctccaaagaggactccttcccaagtagaaaatacaccactggggcacaggtcagtcatttttaacagcgtctttcatttcaatagaataaatggttttagggtatattaaattttaatctttgtaggtggctgcgacgtggaaaccaacatatcggcaatgatgatgtgagagtttttcgtcgcaagttggatattatgaaacgtcatgaggtaagaacatgctattgtatttgtaaaataaaaaattatatgtgttattttactacaatgttcacaactatgttgttatatgcagtttgtgtgggagccttacccatcaaccgttatatcactgttgcctcccgtttgtttagtcggaagtctcgcgtggtacgcggtggtgccactaatttgtttccaagttattgagtggcaccaaccggacagagtgttgagaaaatttgggatgcaacaaccagtttcagagtctccttcacaacccttatacattcatggcataacattaaaagggaaacatgacgaaaattggaggcaattgttcaccccaatgattcatcagtggaataatcgccatgcatttagggtcgacggttatccctgataagaaggcctattgagctttaactcggactacatggtctggtataggcaaaagacaaagatgtttgttgacccacaaa

SEQ ID NO: 8989 - DNA, 1183 bp, Glycine max
  Gm_smallRNAprecursor_1822
tgaatcattttgtgaagaacatggtattgaacacaatttttctgcacctagaacccctcaacaaaatgaagttgttgagaggaaaaataggtcattggaagaaattgctagaactttattaaatgatacttttcttccaaaatatttttgggctgaagcggtcaatactgcatgttacatcatgaatagggccttaataagacccattttaaagaaaacgccatatgagttatataatggtagaaaaccctacatttcacatctacatgtttttggttgcaaatgctttgtgcttaataatggtaaagataatctaggaaaatttgatgcaaaatctaatgaaggcatctttcttggatattcattacaaagcaaagcatataggatatataataaaagaactatgaatattgaggaatccattcatgttacctttgatgaatctaatgttatcttgtcaagaaagaatatgctagatgatattgcagaatctttagaataaatgcatattcatggacaagattctaaaggaaaaggtaaaggaagtaatgaagatcctccagaagaagtcaaatccaatgatgaacttccaaaagaatggaaagcttcaaaagatcatccccttgacaacattattggtgatatctcaaaaagggtaacaactagacattctcttaaagatttatgcaataatatgacttttgtatctatgattgaacctaaaaatataaaagaagtcatagtagatgataactggattatttccatgcaagaagaacttaatcaatttgaaagaaacaatgtgtgggaacttgtagagaaacctaaaaattatcccatcataggaacaaaatgggtatttagaaataagttagatgaacatggaataatcattagaaataaggctagattagtcgcaaaaggatataatcaagaagaaggtatagattatgaggaaacatatgctccagttgctagattagaagctattagaatgctcttagcatatgcatccataatgaattttaagctttatcaaatggatgttaaaagtgcttttctgaatggcttaattcacgaagaagtatatgttgaacaaccaccaggttttgaaatattaaataagccaaatcatgtttataaattgaaaaaggctttatatggcttgaaacaagcccctagg

SEQ ID NO: 8990 - DNA, 1164 bp, Glycine max
  Gm_smallRNAprecursor_1823
caaccgaagcagaatcttccaacttggcttgcggtttcggtagagaacgaaaccctaatctgacctttcattttctttcgaggtaaccacggttctacccttgtttcttgttagtttcatcttgtctttgcatcttttctgactctggaaccgccattgcatgtcttatgcttcctttgaaaaaccttagagaaagagactttgtaaacgttatcctttcatgaaatgaatgttattttcgtaacctacactgaaccccggtcacattggcgtggtcgtcatttccaaatgatgttcctttgtaaaacccgaaatgatatccattcgcaattaattagtctaaaaattattgttttgcgtgcaactaaatttttaacaaaaccaacctctgaaccacgctcagggtttcattatgagtgttttgatatatatattgcctactttcaggtatgggtggacttgttttcacatgaaattcgtgggtattgggtttttgggagatatgatgggtagttctactaggtttatgccttatggtagttatttgtgaaagaatttgttgaaagcatgctaaacttgacatgtttgatgtgagtaaagctacccattctgttttagggttttatgatgatgctttgtgatgtttgtgtgctgaaattgttggtagaaaactggtagagatgatcgggagagttaacctagggttaaatgtgaaaatggtagtgatatgagtggaaaagtgtgaggttttgagggtttgaaaagctaaatttggggttagtgtaaattggagtctaaagtgagttgatcctagtttaaaatgtcaattaggacttgtaggaaagcttgggcagagcaaatgagaaaaatgagtgataaatgtgaaagcaagagtcatttctagggtaaattgggtgttgaagggtcaaatcttgaatcggtggagttttcgcctttaaatcagtttgagcaagtctaaattaatgttatagacttgtttgggatgagagtttactccaaaattaccccattctcattttcacttctcaaaccttgaaaatttactcaattgatgggttttggatacctagatttggatttaccttgacctgaagcttgtttttggtttaaatatgatttatacatgatttaggacttgtagga

SEQ ID NO: 8991 - DNA, 1157 bp, Glycine max
  Gm_smallRNAprecursor_1824
gttattgccttagggtagttatttgtgaaggaatttgttgaaatcatgctaaacttgacatgtttgatgtgagtaaagctacccattctgttttaaggttttatgatgatgctttgtgatatttgtatgctaaaattgttgatagaaaactggtagagatgatggggagagttaacttagggttaaatgtgagaatgataatgttgtaggtagaaaagtgtgagattttgagggttagagaagccaaatttggggttagtggaaattggagtctaaagtgagttgatcctagtttaaaatgtcaattaggacttgtagaaaagcttgggcaaagcaaataagaaaaaaatgagtgacaaatgtgaaagaaaagagccatttcttgggtgaattggtgttgagaggtcaaattttgaattggtggagttttcaccttaaaaccagtttgagcaagtctaaatcaatgttatagacttgattgagatgagattttaccccaaaattatccaattctcattttcactcttcaaaccttgaaaattcactaaattgaggggttttggatacctatattttgatttaccttggtctgaagtttgcttttggtttaaatatgatttatacatgatttaggacttgtaggatccaatttgagaaaaattggatgtgggcaagttggatttcgaaatctgccattttatgcagaacaatgctgtcaaaattgtgcaacagttttttacatagagcagaaaaatatttatgcattgctagtcacaggaagggtagtacacctcgggttccaggcattttctagcagatcccaacggtcaaaatttagatttctgaattagcaacctccagcaaaaatttcaaggcgatccaacgtttaacgaatcggaactaagagaatgttactgagtaaattttgcctattatgcaaaaaaaatggtgctgcagtgcaggtcaggggaaaggtagtatatatcgtgttctagaaattttctagcatatcccaacggtcacaatttagatttctgtattaggaacctccagtaaacatttcaaggcgatccaacggttagcgaattggaacgaagagaatgttactgaggtatgtgactaggaaaaactatggaatttgaatgagttttggacag

SEQ ID NO: 8992 - DNA, 1157 bp, Glycine max
  Gm_smallRNAprecursor_1825
gtttttgccttagggtagttatttgtgaaggaatttgttgaaatcatgctaaacttgacatgtttgatgtgagtaaagctacccattctgttttagggttttatgatgatgctttgtgatatttgtatgctgaaattgttgatagaaaactggtagagatgatggggagagttaacttagggttaaatgtgagaatgataatgttgtaggtagaaaagtgtgagattttgagggttagagaagccaaatttggggttagtggaaattggagtctaaagtgagttgatcctagtttaaaatgtcaattaggacttgtagaaaagcttgagcagagcaaataagaaaaaaatgagtgacaaatgtgaaagaaaagagccatttcttgggtgaattgggtgttgagaggtcaaattttgaatcggtggagtttcaccttaaaaccagtttgagcaagtctaaatcaatgttatagacttgattgagatgagagtttaccccaaaattatccaattctcattttcactcttcaaaccttgaaaattcactaaattgaggggttttggatacctatattttgatttgccttggtctgaagtttgcttttggtttaaatatgatttatacacgatttaggacttgtaggatccaatttgagcaaaattggatgtgggcaagttggattttgaaatctgtcattatatgcagaacaatgctgtcaaaattgtgcagcagtttttttacatagtgcagaaaaatgcttatgcattgctagtcacaggaagggtagtacatctcgggttctaggcattttcttgcagatcccaacggtcaaaatttatatttctgtattaggaacctccatcaaaagtttcaacgcgatccaatggttaacaaatcggaacgaagagaatgttactaagtaaattttgcctattatgcagaaaaatggtggtgcagtgcaggtcaggggaaaaagtagtatatatcgtgttctggatattttctagaagatcccaacggtcaaaatttagatttctgtattaggaacctccagtaaacatctcaaggcgatccaacggttagcgaattggaacgaagagaatgttactgaggtattttcatgataaatgagatcgaaatgtttggatgttgtggaa

SEQ ID NO: 8993 - DNA, 1040 bp, Glycine max
  Gm_smallRNAprecursor_1826
agttgagaatgttggaatcaacaaagtgctcatagatgaaggagcggctgttaacttaatgcctcgatctatgctctacaagatcgggaaacatgacactgatctatctgcccacaacattgtgctttcgaattatgaaggtaaaactggttattctttgggagccattcaagtagatgttgctgtaggcagtatagttcgaccaactttattcctggtgatacagtccaaggctaattttaacttgctattaggaagggaatggatccatggagttggggctgtgccatctactctccaccagaaactcattatctggagggaggatgggattgttgaaaatatagaggcagatcaaagcttctataagtcagaggttgataatgttactccacaaacctttgacaaaaatttggctaacatagcaccttgtggtgacaaggagactgttttcgagccaagtgacaatgttatccactctgtcaaactccatcctacccatgggtttatatgggagagggaggaaattgatgctgtttcctctgaagatggagtcattccaccaactgggtggaatatatatgaagattaatatgcttgaggccactgcatgggccagaattacgacttatatggccgaaaatagactaaatacggccttcgaggctgaatcccaacaaaatatggcagttgaagccaagatcgaagatcatgaaaacaaagaaacaaaggatcgaagactggactgcatttatgatgatgagccactgggttttgagaaaaatcccataagtgaggtgccaaagatgcaggctcaagatcctttggaggagatcgacattggagatggctcgataaaaaggccaacctatatcagtgccaatatcacctcaagtctaaaagaaaagctggtgcctcttcttagagaatttaaagactgttttgcttgggattaccacgaaatgcctgggttaagcagagaaatggtcgaaatgaaattacctattaaggagggaaaaagaccagtaaaacaactacca

SEQ ID NO: 8994 - DNA, 1157 bp, Glycine max
  Gm_smallRNAprecursor_1827
aagaccagtaaaacaactaccaagaagattcgcaccagaaatcatgtccaagattaaggaagagatcgaaaggctgctgaggtgtaaattcatcagatctgccaggtatgtcgaatggttagcaaatatagtccctgtcattaaaaagaatggaactcttagagtatgcatagattttagggatttaaataatgctacacctaaagatgaatatgctatgccagtagcggaaatgttggtagattcagcagctggcttcgaatttttaagcatgttagatggttattctggttataaccaaatatttattgctgaaagtgatgtgtcaaaaacagcatttcgatgccctggtgctttaggcacttatgaatgggtggttatgccctttgggttgaaaaatgctggggccacttatcaaagggccatgaattccatgtttcatgattttattgacacatttatgcaagtttatattgatgatataatcatcaaatcctcctcagaagatagccatttggattaccttaggcaatctttcgaacgaatgaggaaacatggattaaaaatgaatccattaaagtgtgctttttgtgtgcgtgcaggagatttccttggttttgtggtgcataaaaaaggcattgagataaatcaaaacaagacaaaggctattcttgagacgaagcctccttcgaccaaaaaacagcttcagtctttgctaggaaaaatcaacttcttgaggcgattcatttcgaatctaagtggcaaagctcaaactttttcgccattacttcgactcaagaaagatgaaccattcaaatgggatgaagtgcatcaaaaggctttcgatgaaattaaagaatatctgatcaagcctcctgtgttaatgcctcctagtcgaaacaagactatgaagttgtatattgctgcgtctgacaagaccattggtagcatgttggctcaggaagatgatgatggcgtagagcatgcaatttattatcttagtcgtgtactaaatgatgcagaaactagatatactgccatagaaaaactttgtctttgtttgtatttctcttgtgcaaaacttaagcaatatataaagcctgttgatgtttatgtatattctcattatgatattattaagcacatgttgtcaaaac

SEQ ID NO: 8995 - DNA, 1175 bp, Glycine max
  Gm_smallRNAprecursor_1828
aagagatcgaaaggctgctgaggtgtaaattcatcagatctgccaggtatgtcgaatggttagcaaatatagtccctgtcattaaaaagaatggaactcttagagtatgcatagattttagggatttaaataatgctacacctaaagatgaatatgctatgccagtagcggaaatgttggtagattcagcagctggcttcgaatttttaagcatgttagatggttattctggttataaccaaatatttattgctgaaagtgatgtgtcaaaaacagcatttcgatgccctggtgctttaggcacttatgaatgggtggttatgccctttgggttgaaaaatgctggggccacttatcaaagggccatgaattccatgtttcatgattttattgacacatttatgcaagtttatattgatgatataatcatcaaatcctcctcagaagatagccatttggattaccttaggcaatctttcgaacgaatgaggaaacatggattaaaaatgaatccattaaagtgtgctttttgtgtgcgtgcaggagatttccttggttttgtggtgcataaaaaaggcattgagataaatcaaaacaagacaaaggctattcttgagacgaagcctccttcgaccaaaaaacagcttcagtctttgctaggaaaaatcaacttcttgaggcgattcatttcgaatctaagtggcaaagctcaaactttttcgccattacttcgactcaagaaagatgaaccattcaaatgggatgaagtgcatcaaaaggctttcgatgaaattaaagaatatctgatcaagcctcctgtgttaatgcctcctagtcgaaacaagactatgaagttgtatattgctgcgtctgacaagaccattggtagcatgttggctcaggaagatgatgatggcgtagagcatgcaatttattatcttagtcgtgtactaaatgatgcagaaactagatatactgccatagaaaaactttgtctttgtttgtatttctcttgtgcaaaacttaagcaatatataaagcctgttgatgtttatgtatattctcattatgatattattaagcacatgttgtcaaaacctattttacacagtagaattggaaaatgggctttggcattaacagaatattctttaacgtacaagcctttgaaatct

SEQ ID NO: 8996 - DNA, 1110 bp, Glycine max
  Gm_smallRNAprecursor_1829
tattgtagatcactcagtgatcgaaatgccgcaagactatgtcgatacagagccttggattttgtatttcgatggttcgaaacacaaacgtggaactggaattggagttttaataatatctcccaataaagttccaactaaattcaaatataaaatcaaagggctttgttctaataatgaggctgagtatgaggctctaattacaggccttgaaattttaattagcttgggggcaagaaatgttaacataaggggtgattcagaactagtgttgagacaattaacacaagaatacaaatgtattaatgaacacttagcaaaatattttgttatggcaagttctcttctgaatcatttcgattacattaacattgagcatatacctcgacaagaaaaccaagaagcaaatgatttagcccaaatagcttcagggtacaaaatgtcgaaggaaaagttaactgagttgatcgaaataaaagataaactggtattaccagagccattaagcactaaattgccaatgccaaaacttgtgggggcaagtacaccacaaaataatgaagatgaaagcatggatgatctccagggaaaaattcaaattttggccattgacaatatgttagataatgattggagaaagtccattgttgaatatttggaaaatccaataggtaatgtggctcgaaagatcaaatatagggctttaaattacgtgattgtgggaaatgatttgtttaaaaagactgcagaaggagtgttgctaaaatgtctaagtgaatcagaagcatacttggcagtttcccatgttcacagtggggcctgtggatcacatcaagcaggccataaaatgaaatggcttttatttcgacaaggtttgtattggccttcgatgttaaaagactgcatagaatttgctaaaggctgtcaggaatgccaaaagcatgcagggatacagcatgtacctgctagtgagttacactccataatcaaaccttggcctttcagaggatgggctttggacctaattggtgaaatcaagcctgcttcttctaagaaccagcgttatattatagttggtatcgattactttacaaaatggatcgaagcagt

SEQ ID NO: 8997 - DNA, 1082 bp, Glycine max
  Gm_smallRNAprecursor_1830
cagtgatcgaaatgccgcaagactatgtcgatacagagccttggattttgtatttcgatggttcgaaacacaaacgtggaactggaattggagttttaataatatctcccaataaagttccaactaaattcaaatataaaatcaaagggctttgttctaataatgaggctgagtatgaggctctaattacaggccttgaaattttaattagcttgggggcaagaaatgttaacataaggggtgattcagaactagtgttgagacaattaacacaagaatacaaatgtattaatgaacacttagcaaaatattttgttatggcaagttctcttctgaatcatttcgattacattaacattgagcatatacctcgacaagaaaaccaagaagcaaatgatttagcccaaatagcttcagggtacaaaatgtcgaaggaaaagttaactgagttgatcgaaataaaagataaactggtattaccagagccattaagcactaaattgccaatgccaaaacttgtgggggcaagtacaccacaaaataatgaagatgaaagcatggatgatctccagggaaaaattcaaattttggccattgacaatatgttagataatgattggagaaagtccattgttgaatatttggaaaatccaataggtaatgtggctcgaaagatcaaatatagggctttaaattacgtgattgtgggaaatgatttgtttaaaaagactgcagaaggagtgttgctaaaatgtctaagtgaatcagaagcatacttggcagtttcccatgttcacagtggggcctgtggatcacatcaagcaggccataaaatgaaatggcttttatttcgacaaggtttgtattggccttcgatgttaaaagactgcatagaatttgctaaaggctgtcaggaatgccaaaagcatgcagggatacagcatgtacctgctagtgagttacactccataatcaaaccttggcctttcagaggatgggctttggacctaattggtgaaatcaagcctgcttcttctaagaaccagcgttatattatagttggtatcgattactttacaaaa

SEQ ID NO: 8998 - DNA, 1187 bp, Glycine max
  Gm_smallRNAprecursor_1831
ggcagaatgacgaccatttgccagtgtccgctgcaatagagacgaatatgagttattgtagtagtatagattatttaaattcaattgttgtgtttgacttacccattcaggtaggctccaaggtaaacatctcattttgaactctgtatccaactcttaatgtaactttcagattcaaattgtgattgcccagatctctgaatggactgtggctcgacgaatccatacacatcagaattccccgctcgcacacttgtctcagtcagatggctgtgttgttaagccaaatttaattatgtatgaatttaaaacaattactttggtaattaacagtaatctaaaatgacttatagaatctacaactgtataacagatatgctgagacattgaccaccgtgtgcaatttcagagagatcttcgtgctttatatataacgggaagttttgattaaacaccccgaatatggtagcatcccacataacctggagaggcttcaaaaacagttgtgggatggtcaatgtcatcaggtacaggggatcatcgacctcttcatccaggctttctggaggttttgctggagacatagctgcctgttgatcaaacatagttaattagcaagttttgattacagtgaacaaattaattgaaaaaaataaacatataatcagagaaaaatacatgttctgataaacgcttcacaagatgtgttggccaagcaaggaaggtgttaagtgtttgccccactaaggtaacctcgttagtgggtacaggaacgagagcctctgcatctttaacctcctcaacaccaaccttgacttggccatgcaacaaagggatgttgtgaactgttgtggatccctcataaagtcttcctagggcaaccaggcgggaaggattttcttcaatgtatagcccgcatttgtctgagtcactcgtccctggatcgttccctgagggagcaacacaactctcctttgtgctgacacgaggacctgagggaccaacctttggctctggaggtagtgcaagtccttgtgattgcatctgagactgaaactgggactgcatctggctgaaggatgccatcatctttcgagtcactttttctgtgattgactcctccagttggtctctgatttgttgggtcagctgttctaggtcttcaggaggcatggaggaagaactgc

SEQ ID NO: 8999 - DNA, 1079 bp, Glycine max
  Gm_smallRNAprecursor_1832
aagaacctagaactatcatgatactaatctatcatgaaaactctagaaagacctaaagtaatatagaaacattcaccaccattgagaggttggtgacttgagcctataaataggcaattggtatgttgtaattgatcatccaagaaatcaatgacatagccttctttctaaaacaattctctaaaactattaactatcaactatcatctaataaactaccaacagtggtatcagagctacgttcggtcatacattaggcatagttatattacctacctaccattccaaaatcctcccaactacttcaaaaatttcctttgtactattaacccactccaataatattttttctaagctatggataactactcaatcgtcaactatttctgtccctatcttcaatggtgaaaattatgattcctggcgtgttaaaatggaaacatatttttcatctcaagatttatgggacatagtagaagaaggcttcaatgttctcgcggatacttcagctcttaatgcatctcaaaaaaaagagttgaagaaaaataaacagaaaaatttaaaggcgttgttcaccttgcaacaagcggtgactgatccaattttcccaagaattatgggagctaagactgccaaagaagcgtggaacacattgcaggaggagtttcaaggaagtgttaaggtacgtgccgttaaacttcaatgtataagaagagattttgaactattaaagatgaaggagtatgagacagttaaagattactattctaaagttaaagaaatagttaatcaaatgagagcttttggggaagatattcttgacaagaaaattgttgagaaaattctaattactatgccccaaaagtttgacacaatcgtgacaacgattgagcaaaccaaagatctgtccactctatcagagacagaacttgtgggctctcttgaagcatatgagcaaagactgtataggcataaagaagatacacttgaaaatgccttccagacaaagtttaaatttcatccccaaaataaagaaaatggaggaaagaaaaattatggagaaacatccagaagaagag

SEQ ID NO: 9000 - DNA, 1188 bp, Glycine max
  Gm_smallRNAprecursor_1833
tagtcgtgtttgcattttgtgggtcaacaaacatctttgtctttcgcctataccaaaccatgtagtctgagttaaagctcaataggccttcttgtcgaggataagcgtcgaccctaaaagcatggcgattgttccactgatgaatcattggggcgaacaattgcccccaattttcgtcatgtttcccttttaatgttatgtcatgaatgtttaagggttgcgaaggagactctggaattggttgctgcatcccaaattgtctcaatactctgtccggttggtgccactcaataacttggaaacaaattagtggcaccactgcccaccacgcgacacttccgagtacacaaatgggaggcaacaatgatataacggttgttatgtaaggctcccacacaaactgcatataacaacatagttgtcaacattttagtaaaataacacatcattttttattttacaaatacaataccatgttcttacctcatgacgtttcataatatccaacttgcgacgaaaaactctgacatcatcattgtcgatatgttggtttccacgtcgcagccacctacaaagattaaaatttaatataccctaaaaccatttattctattaaaatgaaagacacttttaaaaatgactaacctgtgccccagtggtttattttctacttgggaaggagttctctttggagccaaggttggacatcgttcccatgcccacatttgtagtaagatgcacatacctctgattgatttagttttataatcggtggcactgcacatctctctgtatagaaaagcaagtacggcaggtccccatgcatatgtgccatagtcttcagagtcacgtaaaaattgaaggtagcttagcgaaactttgttacttcttcttcgtcgtcgtcgtcattatttatttgtgcaaaatggtgagccagccaactcaatttaaccacactacttttaatttcaccttcttgtgatctgactcccaataattcctcacataaatcagctcaatcaagatttgttggatcgattaatgataaaccatccacacgtatacctaacaatacagagacgtcttggagagtaatagtatactctctgcatctcatgtgaaacgcatgtgtttccggcctccatctttctatcagagcactaattaatgaggcatttatttttaagt

SEQ ID NO: 9001 - DNA, 1165 bp, Glycine max
  Gm_smallRNAprecursor_1834
tctttgattcagttgagattaattctcactttgggatttcgttacatttaaaaataataatttttacttgaggatgtattttgtagaaataaaattgggtcttcctcggcaaattaagcttaattgagctaacccattgggtgtagcttatagcatttgattactccccggcaaggaaaggacgtagagtgttgctaggtgcacccagtattctaagaaaatgacgaaattgtccttgtttggttttcctcttccggatcaacttaatccgtaacttccagatcaacttaatctggaagtctcttacggatcaagttgatctggaagagacttctggatcaacttgatccgaaagaggaaaaataaaaattttgttaattatacaagatatttaaagatatttatttcattaattataatataattaaatatatttatttattttattaattataatatatttataaatattgatttattataaataattaatgctaatcaatcataatcataattcatgctaatcaatcaataatgttaatcaatcataattccctaaaagaggatataaataatttcagagttagtaatcataatgcagtttttgaaattgctaattctgaaattatttatatcctcttttagggaattatgattgattagcatgaattatgattatgattgattagtattaattatttataataatttaatatttataaatatattataattaataaaataaataaatatatttaattatattataattaatgaaataaatatcttgtataattaacaaaaattttatttttcctcttccggatcaacttgattcgtaagagacttccggattaagttgatccagaagttacggatcaacttgatccggaagaggaaaaccaaacaaggataattttgttatttttttagaatgctgggtgcaccaacaataatgctgggtgcacctagcaacactcaagaagtatcgaggaatgaaaatatggaacgatatattcacgtgcgaaggaaaaaaatcatgtttggttgagaaaaaaaaaatgaagagattggtcgagaacaaagtgaaggaaaaaaaaatcatgtttggttgagaaaaaaaaatgaagagattgacttttaagtttttttttttttttttgca

SEQ ID NO: 9002 - DNA, 1046 bp, Glycine max
  Gm_smallRNAprecursor_1835
tgctggtgaggaagtaattgacaacccctcagcatatgaaatattagaagtatggaaggaaatgagagaggaggatgggagtttgttgcactctgaacttgcttgtggctagtgattgtgagttgctttagtgtttaacatatgctagctgaactgtgaacagggataggaagatgtagcaattttatcgtaaattagcttgttctgatcaagtatagtgatatctggtacgatgttattggaacaagagaatgcaattaaaacttgtaaatgttagcaaactttcccttggtcacaatttttttgtcaaaggcggaggcacagggggattattttgcaatacttatgtaaaagatagggactattttgaatttttcattaagttagggactaatatacaacagaggtacaaagtcagggactaaattgtctatttactcgttttgttatcatcaaatgacgtggcaccaggcacgttcatatgtcatgtcacgtcatcctttagtgccacgtggatagtccacgtggcactaaaattgacctcactaacggcgttactttaaaatttaacggaatgactattttgcaacacttatgcaaagatagagactattttgaatttaatattaagttagggactaatatgtaaaataggtataatctcagggactaaattgtctcttcactctccagatccctttggtttgaatctcaaccttccctcgtcgaccgatgaccaaggcatcaaatagccaatataccctagtttcattttttttttttttaacttttgattctcttcttttggtgggaattcggtacccaagattcaagaatattcattattcctaatttcctttgtgcatttgagttaattgatgatacacccaggctttgacctagtatcatgttatctacattatgttgtttatcatgtttccaattgcaattcttaaagaagcatattagttgctcgtaaaagttcgttactacccttttgtttacatgcaccacactagcacgcataaccaagtaacaagttacat

SEQ ID NO: 9003 - DNA, 1208 bp, Glycine max
  Gm_smallRNAprecursor_1836
ttctcctccagtgtgctaccctttcctttgttcttcaattttcgtgtgtgctttttctcctccataatccctggtaagtattttttgaagtgtctaatatttatgtattctgttcttaatattataaaaagattagattagttagtattaataggtatttcaagattaggttagttagttttaaaatgtattctattgttaatttttatgtattaataggtatttgaaggttaggttaattagcatgaaaatattatttagttagttagtatgaaaatattatttggttgttgtatataacctgagatattatatgtgttatatatgtatgatattttagttagacacacgtaatatagctttagttaggcatatgtaatattagtttttgtaatattagacacaagttaatattagttttaggtatatatatctaaaatttagacacacgtaaattttgagcttttgtaatattaggctaaataattttgagttttaaataaatgagttgataagttatatgatttgatttagttatttttagtttgaatttttttaatatatatatatatatatatgatagggtagtttacgttagtatatggtaggttttatttttagtttgtaggttaatattttttgttttacgaaacttacgttattaaatacatattatgagatattatatgtgttatatatatatataatattttagttagacatattagctttagataggcacacgtaatattagcttttgtaatattagacacaagttaatattagcttaggtatatttatctaaaatttagacacacgtaaattttgaactttgttaatattaggctaaataatttttaggttttgtaataatattaggctaaataattttgaattttaaataaatgagttgattagttatattatttgatttagttatatatatatatatatatatatatatatatatatatatatatatatatatatatatatatatatatatatatatatatatatgatatggtagtttacgttagtacatggtaggttttatttttagtttgcaggttaatattctatgttttaggaaatttacgttattaaatatatgatacattgtacattattattatttttgtatatatattgtttaaataatttttggcatttcaatatttgtttgtattttaatttatttgttagtc

SEQ ID NO: 9004 - DNA, 1035 bp, Glycine max
  Gm_smallRNAprecursor_1837
ttgtaaattgattgtattatattttattttgtagtagtaatggcatcttcatcgtcatgtccattacatattaaaattaagtccggccccatcgatggtgatgtattatggatgcaacctaagcatgtttcagaacatgtttggaatggggaagaagataagaaattacatatcagacgagttgtccccacgtatcaaggggaagaagaaattccagagcaaatttttccttttcttcgacaatctagtttttactcgattatgaagatgagatacttaaaaataaatgtatcattaattagtgctctgatagaaagatgaaggccggaaacacatacgtttcacatgagatgcggagagtgtactattactctccaagacgtacgtctctgtattgttaggtatacgtgtggatggtttaccattaatcggtccaataaatcttgattgggctgatttatgtgaggaattattgagagtcagaccaaaagaaggtgaaattaaaggtagtgtggttaaattaagttggctggttcaccattttgcacaaataaataacgacgacgacgaagaacaagtacgaaggtttgcccgtgcatggatactgagattcattggaggtgtcttgttcattgacaaaagcagtaacaaagtttctctatggtaccttcaatttttacgtgactttgaagaatgtggcacatatgcatgtggagctgctgtacttggttttctatacagagagatgtgcagtgccaccgattataaaactaaatcaattggaggtatgtgcatcttactacaaatgtgggtatgagaacgatgtccaaccttggctccaaagaggactccttcccaagtagaaaataaaccactggggcacaagttattcatttttaaaagtgtctttcatttcaatagaataaatggttttagggtatattaaatttgagcttcaaatttgattctaaccataaaaattattacttcaaaataaaaaatttgtacatgataaataaataaaaggaaagaagg

SEQ ID NO: 9005 - DNA, 1039 bp, Glycine max
  Gm_smallRNAprecursor_1838
agcagtcaaagaatacaacatcagaaatcattttgattgcaaaacaatttactctaaccagagaaggctaaacttcgtctgcaagttacatgaaaatggttctacatggagcttgggtgcatgcaattcaaagaggcatgacaaatggattatcaagagtatcagaggtcatcatacttgtctcgtgccgatgctcagacaagatcatcgccaactcgacaaacacgtcatagcacagatcatccaaccaattgtcaaaacaaatccaaccgtctccatcaagacgttgattgtagagatcaaaacgttcatgaattataccccatcctacaagaagacatggttagcaaaacaaagagcattggagatgattcatagaaactgggaagaatcatatgccaaactgccaaaactttttagagctttgcaatcttgtgttcccgggactgtgatcgctgctcaaacagaatccttgtatgagggggacgaaatagtaccaggcaaaagattgtttaaacgtgtcttttggtcatttggtccatgcattaatggttttgcatattgcaaactcatagtacaatttgatggtacatggctttacgggaagtatactggcacattgttgatagctaccgtacaagatggagctaaccatatcttcccgattgcctacgccattgtagaaggggagacaacttcagcttaggggttttttctaaagaatttgagaagacatgttactccgtaaattaacatttctcttacttcaaatcgacacccctcaattataagtgcctacaacaacccaagtaacttatggatccagaacacatcccatttcttttgcctgcgccacattgcacaaaactttcttcgcggtaactcaaactgcaaacatttaaagaaaccactaatgttggacggtgagaatctattttatttattcgttataattttcttccaatcaaattttataacataatagattgattgaatatttacaggttatgcatacaccgagaagatgcactagcaacat

SEQ ID NO: 9006 - DNA, 1051 bp, Glycine max
  Gm_smallRNAprecursor_1839
ttcttatttcgttcatccaaaattcatcaaaagtcattcattaagtacatactttatctttaattgaaacagtattttctccgcttaacgggtaactttatatttgttttgttaccgatgggaaagaccttctcatcttaaattgtaaattaagactattgggtttgcaccaatcgaaaccataaatttgatacaagatagaagaatgtaaagaatgtatatatataagttaagatagtgtgaatcaagcaatgatcaactccggctcacagtattctgaagtcatcttcgatgcaatgaataatggtcaacaagaatctaatacacatattctaaatgaattcgacagacccaatcacacttttattataatagagactcaatccccacttgaaacacccatatcacctggaaggtttagagtaatgttacaatcccaaaagtgtgattgtggtgaatatcaggctaaacacttaccgtgttctcacgtcatggctacctgtaaatctgtcaatgttgatcccatgacctatgtgtcgatgttattcactttacaacacattttgcacatctacgacaactcctttggtttattgccacacgaatcaatatggcaagaatatgaaggagatcaaaggggtcttgatctaaggagaaagaggactgcaaagggtcatcacgttttaatttgcattcctactgagatggacgaagacgaaaatgaacaagcaagtagaaaaaaatgtggactttgtcggcaacatgatcatagcagaaacaattgtcctaatatatcctcatcttaagtttttccttaaccaaatgtgattgtttaaatattttattgataatgtagtataatgttcttatataaataaattgttaaaagctttagttttatcatttttaattaaatttaataacataaacaaactaattatatttagtaaaataactaaattaaaaattttaaaattcagattattatacaaaataaatatttactaaaataaatatattattatacaaaattcagattttaaaacatata

SEQ ID NO: 9007 - DNA, 1052 bp, Glycine max
  Gm_smallRNAprecursor_1840
ttcttatttcgttcatccaaaattcatcaaaagtcattcattaagtacatactttatctttaattgaaacagtattttctccgcttaacgggtaactttatatttgttttgttaccgatgggaaagaccttctcatcttaaattgtaaattaagactattgggtttgcaccaatcgaaaccataaatttgatacaagatagaagaatgtaaagaatgtatatatataagttaagatagtgtgaatcaagcaatgatcaactccggctcacagtattctgaagtcatcttcgatgcaatgaataatggtcaacaagaatctaatacacatattctaaatgaattcgacagacccaatcacacttttattataatagagactcaatccccacttgaaacacccatatcacctggaaggtttagagtaatgttacaatcccaaaagtgtgattgtggtgaatatcaggctaaacacttaccgtgttctcacgtcatggctacctgtaaatctgtcaatgttgatcccatgacctatgtgtcgatgttattcactttacaacacattttgcacatctacgacaactcctttggtttattgccacacgaatcaatatggcaagaatatgaaggagatcaaaggggtcttgatctaaggagaaagaggactgcaaagggtcatcacgttttaatttgcattcctactgagatggacgaagacgaaaatgaacaagcaagtagaaaaaaatgtggactttgtcggcaacatgatcatagcagaaacaattgtcctaatatatcctcatcttaagtttttccttaaccaaatgtgattgtttaaatattttattgataatgtagtataatgttcttatataaataaattgttaaaagctttagttttatcatttttaattaaatttaataacataaacaaactaattatatttagtaaaataactaaattaaaaattttaaaattcagattattatacaaaataaatatttactaaaataaatatattattatacaaaattcagattttaaaacatatat

SEQ ID NO: 9008 - DNA, 1033 bp, Glycine max
  Gm_smallRNAprecursor_1841
atatatatatatatatatatatatatatatatatattgcaggaacaggacccttgggttgtgttccttcagaattggtgaaatgtggcagaaatgcagaatgtgctcctgaacttcaacaagctgcataattgtttaacccacaactcgaacaaatgttgctacaactcaacaggaaaatgggaaatgaaatttttattgctgcaaacataggaaaatgcacaacaacttcgttactaacccccaacaatttggtactacacactactagtactaattaattttcatgttgtctacctagtttctcacaatcattgttttttgaattgtgatcacaatcaaggttttaaaaaatagcccatgatcactaatgtagctgcaacataaataattgtgacagcataatccagcaattataggcctatcaatagcatatgtttgcaattttctaccaaagaatgtgaaaagctatgactcactactaaaaaacttgtttttttacgacacacattctaagacggttatacggaaaccgtcttagaatgtgacgcggtggtatttttgcaattaagatcactgtattttatttttatgacgcacattctaagacggttatgaaaaaactgtcttagaatgtgatacagttacatttctataattattgaaaacttaaacgacaacagatttcaagaaagaatcgccttcatattcgttcctttataatgtttactaattactaaccctagcttgcaagctcagccatttgctcatcctcccccatctctcaaccactccaccctatgtatgacgccgcaccacacacaaaacctccccgccacacacaaaacctaaaacgcgtatcactccctttctcagtcactcactcagcaaaagagaagtgtcgacagtttggatggtgggtgcttcatcaacgacaacaacctgtggcggaggacagggttctcgtcgctcttggagttcacattgggcagagcaacttctctgcattgcgctgggatgcaaaacccttgctg

SEQ ID NO: 9009 - DNA, 1126 bp, Glycine max
  Gm_smallRNAprecursor_1842
aagattaacacaaactttcttctggtaaaaaaccttaagaatgaagtaatcttaggaacgcccttcattagagccctgtttcccatccaaatatctaatgaaggaataaccacaaattatttaggaagaaaaattatatttaatttttctactaaaccaatttccagaaatataaatcttatagaaaataagattaatcaaattaacttcttaaaagaagaagtatcttttaataatattcaaatacaactggaaaaaccccaggtaaaagaaaaaattcaatctttattaaatcatattgaatcgaccgtctgttctgaattgccacatgcattttgggacagaaagaaacatattgttgatctcccttatgagaaagactttagagaaaaacaaattcccacaaaagccagaccaatccaaatgaatgaagaacttcttcaatactgtcaaaaagaaatcaaggatttgcttgacaaaggcctaatccggaaaagcaaaagcccatggtcttgtgcggctttttatgtcaacaaacaatctaagattgagcgtggaacaccccgtttagtcataaattacaaacgtctaaatcaagcattacaatggattagatatcctgttccaaacaaaaaagatttgcttaacagattaaattctgcaaagatattttcaaaatttgatatgaaatctggattttggcaaatccaaatccaagagtcagataggtacaaaacaacttttactgtacctttcgggcaatatgaatggaatgtgatgccattcggattgaagaatgccccttcagaatttcaaaaaattatgaatgatatttttaatccttattcaaaatttgtcattgtctacatagatgatgttttaatcttttcctaaaatattgaccaacatttcaaacatctccaaaccttcatccatatcatcaaacaaaatggtttggcagtctccaaatcaaaaatcaatcttttccaaactcgaattcgattccttggtcacaatatttatcaaggcacaatcattccaatagaaaggtcaatagagtttactagcaaatttcccaaccaaatcttagacaaaacccagttacaaagatttctaggttgtctaa

SEQ ID NO: 9010 - DNA, 1150 bp, Glycine max
  Gm_smallRNAprecursor_1843
aaccttgcctcaaaacagatttttgcaagatggcaagctattttaagcatctttgattttaatatagaatatatcaagggctcttccaactctctacctgactacctcacccgtgaatttttacagaaaattcccgatgcctcctaaggtgtctagttcctccggcagaggagggagatccagtacaaaaggaaaaaaggttctattggctctaccagagccaataaccaaaaaggcaactacatcatcttctgggtcacctacccagactgggtcatcaacccagaaaggaaagcttgaagggtcattgacccagataactaccgtcaaacctgagtcatcaactcaggaatccccaaaaccaacaacaaccaaacagaccgtggctgactatgcctggtcaatacaaactctcttggccttagaagatataggcctcaccaaaataccaaaattggccaaaaagacctgggcagaaatggcctcagaatcagacgatgattctgaaacagatctgcaaaaacaaatccaaaaggccaaacagaccaaaactgtctgtaaccaaaaaccaagtcaatcgttgactcaacaagaatcaacaccacaacccagcaacagttatatttcaaaaaacaaatttttcaatgttttacaaatggaaccagaatactgggacaagaatcctttcaaagcaaccgccaaagtattccccccgggattccattacaggccaacaaccacaaacaaaacccgcaaattctacgaattcattctaatagatacaaactcagtatctattaaacacttgaaagaccccagagatccaaatctaaatacccattccacaatccaaatcttaaaggttatgcagccacgatattatggctcaaacttaaaccaacccaaaaaattttctgcaccatttgaccctgcagaatataattattgggattacattgacgcctggaccaatgtgttctggcatcaaaataataaattcaagcattcatggctaatttacttcaaaaataacactgtgtataattttccaaattggttcctccaatggtggaactacttcggaccaattccacagatattcccagaagaagtccaacagggattccaacaattcaacaagctctataat

SEQ ID NO: 9011 - DNA, 1148 bp, Glycine max
  Gm_smallRNAprecursor_1844
accttgcctcaaaacagatttttgcaagatggcaagctattttaagcatctttgattttaatatagaatatatcaagggctcttccaactctctacctgactacctcacccgtgaatttttacagaaaattcccgatgcctcctaaggtgtctagttcctccggcagaggagggagatccagtacaaaaggaaaaaaggttctattggctctaccagagccaataaccaaaaaggcaactacatcatcttctgggtcacctacccagactgggtcatcaacccagaaaggaaagcttgaagggtcattgacccagataactaccgtcaaacctgagtcatcaactcaggaatccccaaaaccaacaacaaccaaacagaccgtggctgactatgcctggtcaatacaaactctcttggccttagaagatataggcctcaccaaaataccaaaattggccaaaaagacctgggcagaaatggcctcagaatcagacgatgattctgaaacagatctgcaaaaacaaatccaaaaggccaaacagaccaaaactgtctgtaaccaaaaaccaagtcaatcgttgactcaacaagaatcaacaccacaacccagcaacagttatatttcaaaaaacaaatttttcaatgttttacaaatggaaccagaatactgggacaagaatcctttcaaagcaaccgccaaagtattccccccgggattccattacaggccaacaaccacaaacaaaacccgcaaattctacgaattcattctaatagatacaaactcagtatctattaaacacttgaaagaccccagagatccaaatctaaatacccattccacaatccaaatcttaaaggttatgcagccacgatattatggctcaaacttaaaccaacccaaaaaattttctgcaccatttgaccctgcagaatataattattgggattacattgacgcctggaccaatgtgttctggcatcaaaataataaattcaagcattcatggctaatttacttcaaaaataacactgtgtataattttccaaattggttcctccaatggtggaactacttcggaccaattccacagatattcccagaagaagtccaacagggattccaacaattcaacaagctctataa

SEQ ID NO: 9012 - DNA, 1149 bp, Glycine max
  Gm_smallRNAprecursor_1845
accttgcctcaaaacagatttttgcaagatggcaagctattttaagcatctttgattttaatatagaatatatcaagggctcttccaactctctacctgactacctcacccgtgaatttttacagaaaattcccgatgcctcctaaggtgtctagttcctccggcagaggagggagatccagtacaaaaggaaaaaaggttctattggctctaccagagccaataaccaaaaaggcaactacatcatcttctgggtcacctacccagactgggtcatcaacccagaaaggaaagcttgaagggtcattgacccagataactaccgtcaaacctgagtcatcaactcaggaatccccaaaaccaacaacaaccaaacagaccgtggctgactatgcctggtcaatacaaactctcttggccttagaagatataggcctcaccaaaataccaaaattggccaaaaagacctgggcagaaatggcctcagaatcagacgatgattctgaaacagatctgcaaaaacaaatccaaaaggccaaacagaccaaaactgtctgtaaccaaaaaccaagtcaatcgttgactcaacaagaatcaacaccacaacccagcaacagttatatttcaaaaaacaaatttttcaatgttttacaaatggaaccagaatactgggacaagaatcctttcaaagcaaccgccaaagtattccccccgggattccattacaggccaacaaccacaaacaaaacccgcaaattctacgaattcattctaatagatacaaactcagtatctattaaacacttgaaagaccccagagatccaaatctaaatacccattccacaatccaaatcttaaaggttatgcagccacgatattatggctcaaacttaaaccaacccaaaaaattttctgcaccatttgaccctgcagaatataattattgggattacattgacgcctggaccaatgtgttctggcatcaaaataataaattcaagcattcatggctaatttacttcaaaaataacactgtgtataattttccaaattggttcctccaatggtggaactacttcggaccaattccacagatattcccagaagaagtccaacagggattccaacaattcaacaagctctataat

SEQ ID NO: 9013 - DNA, 1057 bp, Glycine max
  Gm_smallRNAprecursor_1846
caaaaaacaaatttttcaatgttttacaaatggaaccagaatactgggacaagaatcctttcaaagcaaccgccaaagtattccccccgggattccattacaggccaacaaccacaaacaaaacccgcaaattctacgaattcattctaatagatacaaactcagtatctattaaacacttgaaagaccccagagatccaaatctaaatacccattccacaatccaaatcttaaaggttatgcagccacgatattatggctcaaacttaaaccaacccaaaaaattttctgcaccatttgaccctgcagaatataattattgggattacattgacgcctggaccaatgtgttctggcatcaaaataataaattcaagcattcatggctaatttacttcaaaaataacactgtgtataattttccaaattggttcctccaatggtggaactacttcggaccaattccacagatattcccagaagaagtccaacagggattccaacaattcaacaagctctataatagcaaggaatcacgtattccggcagatttaaagtacttttccagttttgccttgtcatggattttttcatggcaatacagatacgaaaaaaccgaaaacagaaaatagtatccaccgttgcaaagacacgcctttgtaaaatggtggtcacaattcgatacttcaaaggctgctccagaacaagtcaagaactagttccagagcaatcctgagttcctcaaacctactgatccggagacatctttgtttttgaatcagaagtcgcaacttgcagcattcttagcaagctcaaaatctaaagagagtcttgcccagaatctcaaagaagttctccaactacttcaacaggaagcgaaagaagaacctcccaagaaggaagccgaatcaccggagactaacgatgaccaagaagatgatccattctaccagaatgaagatgactgttttggtatatcgttagacgacgattaattagttgtagtaatcatgaattattgtaactaatttgtctgtacctcttattaatgtaattt

SEQ ID NO: 9014 - DNA, 1165 bp, Glycine max
  Gm_smallRNAprecursor_1847
accaattccacagatattcccagaagaagtccaacagggattccaacaattcaacaagctctataatagcaaggaatcacgtattccggcagatttaaagtacttttccagttttgccttgtcatggattttttcatggcaatacagatacgaaaaaaccgaaaacagaaaatagtatccaccgttgcaaagacacgcctttgtaaaatggtggtcacaattcgatacttcaaaggctgctccagaacaagtcaagaactagttccagagcaatcctgagttcctcaaacctactgatccggagacatctttgtttttgaatcagaagtcgcaacttgcagcattcttagcaagctcaaaatctaaagagagtcttgcccagaatctcaaagaagttctccaactacttcaacaggaagcgaaagaagaacctcccaagaaggaagccgaatcaccggagactaacgatgaccaagaagatgatccattctaccagaatgaagatgactgttttggtatatcgttagacgacgattaattagttgtagtaatcatgaattattgtaactaatttgtctgtacctcttattaatgtaatttgtaaaagttttgtaatagttccgataaacattaccgacattgtagaaacagtaaaaattgagtctatttaaaggagtcctcgttccctttgtggggcaccctttcagatagtctcaaaaccaggttttagagagagaagctctgcctagggaaaaagtctttgtaagcttttctttcggtttcaataaatttcaagctttatttttcatatctcccttctcccctcaccgatcctgtgcggctctgccgtcgcttcggtttctttgttttcataaacctgggtttgtaagccgtttcggtgtgcccttgatatctgctttacaagtttatatttttcatttatcatattgcattcttacttcctagctgtccgtttgatcttattccgctgattttttatttatattatatatatatatatatatatggggtagttgggagtagtttggaaaaatagtttgcaataatatattaaaaaaaaaaggctgtaattgattagaaaaaaattgatgaaaccaaaatgtggcaataatgatttaaaaatgaataagctttaattgattga

SEQ ID NO: 9015 - DNA, 1101 bp, Glycine max
  Gm_smallRNAprecursor_1848
acggtaaaggaaagggacataaggcctctattctgaagctggcagtgactgaaactgtctatggcatctggaaataccgcaatgctaagatttttgaagaaattgtagataatacgaacatagttgattatattatagataatatagtttatagagggtggtataacaataaactaaaatctcacatagctcatttcatgatgttttgagttttttcctcttttggtccttttgtccttgttgatggcaggatcatttgatcgccttgtaatattggtttttttaattaataaaagtcccttgattcaaaaaaaaaaagatagatacttctctccgcattatttttcttcctctcatatatcccaaaaaataacaaatttgtatcaagagctatcatatgatggatatgtgagattgactgaacctacccaacactcctacacacaaacacatactagaatgagttcatccattccagttttgcttccacctatgaaacaccgacacggacaccggacacgatacggacacggacacgtgcacacctgtaatgtccaaaatataaaacgtagtacgggtgtcgtgtcggtatcgaacactgacacggacgcgtgtcggacaccgaacacggtaagggactagggtgtccgtgcttcataggctttcactattcaatggaaaacattaccacctctaggctattagaacggaaacctatcttgatgcttgtgatctatgggaagatattaaagacatatacgaagttccacccctaccggataatcaacggttgctcaaataaaaaaaatcacgagaggagatagagaaagtcaaaggcaagagcaatcttgtttggagcaatatcatccactatgttgattagaataatgacactaaaaacaccaacaagattgggcagtttttgaagcaagagtacgatggaaatgaaaaggtaaaagtgatgcaagctttgaacttggtccaagaaattgagatgcaaagaatgaaggaatcataaacaattaaggaatattgtatcaggattctttacatagtcaacaatgtaaggttccttggtactgatttttcagatgatagaat

SEQ ID NO: 9016 - DNA, 1101 bp, Glycine max; identical to SEQ ID NO: 9015
  Gm_smallRNAprecursor_1849

SEQ ID NO: 9017 - DNA, 1069 bp, Glycine max
  Gm_smallRNAprecursor_1850
cggtaaaggaaagggacataaggcctctattctgaagctggcagtgactgaaactgtctatggcatctggaaataccgcaatgctaagatttttgaagaaattgtagataatacgaacatagttgattatattatagataatatagtttatagagggtggtataacaataaactaaaatctcacatagctcatttcatgatgttttgagttttttcctcttttggtccttttgtccttgttgatggcaggatcatttgatcgccttgtaatattggtttttttaattaataaaagtcccttgattcaaaaaaaaaaagatagatacttctctccgcattatttttcttcctctcatatatcccaaaaaataacaaatttgtatcaagagctatcatatgatggatatgtgagattgactgaacctacccaacactcctacacacaaacacatactagaatgagttcatccattccagttttgcttccacctatgaaacaccgacacggacaccggacacgatacggacacggacacgtgcacacctgtaatgtccaaaatataaaacgtagtacgggtgtcgtgtcggtatcgaacactgacacggacgcgtgtcggacaccgaacacggtaagggactagggtgtccgtgcttcataggctttcactattcaatggaaaacattaccacctctaggctattagaacggaaacctatcttgatgcttgtgatctatgggaagatattaaagacatatacgaagttccacccctaccggataatcaacggttgctcaaataaaaaaaatcacgagaggagatagagaaagtcaaaggcaagagcaatcttgtttggagcaatatcatccactatgttgattagaataatgacactaaaaacaccaacaagattgggcagtttttgaagcaagagtacgatggaaatgaaaaggtaaaagtgatgcaagctttgaacttggtccaagaaattgagatgcaaagaatgaaggaatcataaacaattaaggaatattgtatcaggattctttacatagtcaacaatgtaaggt

SEQ ID NO: 9018 - DNA, 1040 bp, Glycine max
  Gm_smallRNAprecursor_1851
agttgagaatgttggaattaacaaagtgctcatagatggaggagcggctatcaacttaatgcctcgatctatgctctacaagatcgggaaacatgacactgatttatctgcccacaacattgtgctctctaattatgagggcaaaactggctattctttgggagccattcaagtagatgttgctgtaggcagtatagttcgaccaactttattcctggtgatacagtccaaggctaattttaacttgctattaggaagggaatggatccatggagttggggctgtgccatctactctccaccagaaactcattatctggagggaggatgggattgttgaaaatatagaggcagatcaaagcttctataagttagaggttgataatgttactccacaaacctttgacaaaaatttggctaacatagcaccttgtggtgacaaggagactgctttcgagccaagtgacaatgttatccactctgtcaaactccatcctacccatgggtttatatgggagagggaggaaattgatgttgtttcctctgaagatggagtcattccaccaactgggtggaatatatatgaagattaatatgactgaggccactgcatgggccagaattacggcttatatggccgaaaatagactaaatacggcccttgaggctgaatcccaacaaaatatggcagttgaagccaagatcgaagatcatgaaaacaaagaaataaaggatcgaagactggactgcatttatgatgatgagccactgggttttgagaaaaatcccataagtgaggcgccaaagatgcaggctcaagatcctttggaggagatcgacattggagatggctcgataaaaaggccaacctatatcagtgccaatatcacctcaagtttaaaagaaaagctggtgcctcttcttagagaatttaaagactgttttgcttgggattaccacgaaatgcctgggttaagcagagaaatggtcgaaatgaaattacctattaaggagggaaaaagaccagtaaaacaactacca

SEQ ID NO: 9019 - DNA, 1114 bp, Glycine max
  Gm_smallRNAprecursor_1852
aatctaagtggcaaagctcaaactttttcgccattacttcgactcaagaaagatgaaccattcaaatgggatgaagagcatcaaaaggctttcgatgaaattaaagagtatctgatcaagcctcctgtgttaatgcctcctagtcaaaacaagactatgaagttgtatattgctgcgtctgacaagaccattggtagcatgttggctcaggaagatgatgatggcgtagagcatgcaatttattatctcagtcgtgtactaaatgatgcagaaactagatatactgccatagaaaaactttgtctttgtttgtatttctcttgtgcaaaacttaagcaatatataaagcctgttgatgtttatgtgtattctcattatgatattattaagcacatgttgtcaaaacctattttacacaatagaattggaaaatgggctttagcattaacagaatattctttaacgtacaagcctttgaaatctgttaagggtcaaattgtggcagattttattgtagatcactcagtgatcgaaatgccgcaagactatgtcgatacagagccttggattttgtatttcgatggttcgaaacacaaacacggaactggaattggagttttaataatatcccccaataaagttccaactaaattcaaatataaaatcaaagggctttgttctaataatgaggctgagtatgaggctctaattgcaggccttgaaattttaattagcttgggggcaagaaatgttaatataaggggtgattcagaattagtgttgaggcaattaacacaagaatacaaatgtgttaatgaacacttagcaaaatattttgttatggcaagttctcttctgaatcatttcgatttcattaacattgagcatatacctcgacaagaaaaccaagaagcaaatgatttagcccaaatagcttcagggtacaaaatgtcgaaggaaaagttaactcagttgatcgaaataaaagataaactggtgttaccagagccattaagcactaaattgccaatgccaaaacttgtgggggcaagtacaccaaaaaataatgaagatgaaagcatggatgatctccaggaaaaaattcaaattatgg

SEQ ID NO: 9020 - DNA, 1110 bp, Glycine max
  Gm_smallRNAprecursor_1853
tattgtagatcactcagtgatcgaaatgccgcaagactatgtcgatacagagccttggattttgtatttcgatggttcgaaacacaaacacggaactggaattggagttttaataatatcccccaataaagttccaactaaattcaaatataaaatcaaagggctttgttctaataatgaggctgagtatgaggctctaattgcaggccttgaaattttaattagcttgggggcaagaaatgttaatataaggggtgattcagaattagtgttgaggcaattaacacaagaatacaaatgtgttaatgaacacttagcaaaatattttgttatggcaagttctcttctgaatcatttcgatttcattaacattgagcatatacctcgacaagaaaaccaagaagcaaatgatttagcccaaatagcttcagggtacaaaatgtcgaaggaaaagttaactcagttgatcgaaataaaagataaactggtgttaccagagccattaagcactaaattgccaatgccaaaacttgtgggggcaagtacaccaaaaaataatgaagatgaaagcatggatgatctccaggaaaaaattcaaattatggccattgacaatatgttagataatgattggagaaagtccattgttgaatatttggaaaatccaataggcaatgtggctcgaaaggtcaaatatagggctttaaattacgtggttgtgggaaatgatttgtttaaaaaaactgcagaaggagtgttgctaaaatgtctaagtgaatcagaagcatacttggcagtttcccatgttcacagtggggcctgtggatcacatcaagcaggccataaaatgaaatggcttttatttcgacaaggtttgtattggccttcgatgttaaaagactgcatagaatttgctaaaggctgtcaggaatgccaaaggcatgcagggatacagcatgtacctgctagtgagttacactccataatcaaaccttggcctttcagaggatgggctttggacctaattggtgaaatcaagcctgcttcttctaagaaccagcgttatatcatagttggtgtcgattactttacaaaatggatcgaagcagt

SEQ ID NO: 9021 - DNA, 1082 bp, Glycine max
  Gm_smallRNAprecursor_1854
caattgagggttactctgatataattgtgatgcggcattttgaaagtggtgctgccagaagagctgcagctacatctgacattccaataatcaatgcaggggatggtcctggacaacatccgactcaggtatgcctaaaatagtcatgatggattctgttgcaaccaaagtttgggggggggataatcaatttattttgttcttggcaacttcatgagagagtttcttgggaaaaacagttatttccagagagaatgtcaaatagattggataggatagattattctgctagatgatactgatttgggttatccatctaatttctagtccgttctactttcacttctattaacaatgccttttgttcttctgttttaaataaatgttgctgaaaagttattggaggtgtgtgatcagttctttcataatgatttgccttcaaaaattagtacgagactccgagtctaggttgtacaagtgaaccacaatctatgaagcatcgacaccgacacggacaccggacacaacacggacacagacacgtggacacttgtaatgtccaaaatatagaacgtagtacgggtgtcgtgtcggtgtcggacactgacacggacgcgtgtcggacaccggacacggcaaggaactggggtgtccgtgtttcataccgcaattagtctttgtgtttgcattcacttttttaaaaatgcaaaacgaaattttattgaatcggagtagcaatcagcacaagatgtgtcctgcacctaactaccaaaagtacaaaaaccagaacctataattaatcctccaaaaaatactgctggatagacaccccttgacacacctcctaatccatagtctggttacaaaacaaaattcccaaagtataagaatgcttattcacatttcctacacctgcaaagttgcaaactaaaccacaagtggactttgatggaccctgctaaccaagctaattcaacacatgaaaatgtccccaaattgatacgctctagcctgctatctgccacagaaagtgctgtcaggataacactgccaataatatatgactgaccatgtagatacta

SEQ ID NO: 9022 - DNA, 1082 bp, Glycine max; identical to SEQ ID NO: 9021
  Gm_smallRNAprecursor_1855

SEQ ID NO: 9023 - DNA, 1083 bp, Glycine max
  Gm_smallRNAprecursor_1856
caattgagggttactctgatataattgtgatgcggcattttgaaagtggtgctgccagaagagctgcagctacatctgacattccaataatcaatgcaggggatggtcctggacaacatccgactcaggtatgcctaaaatagtcatgatggattctgttgcaaccaaagtttgggggggggataatcaatttattttgttcttggcaacttcatgagagagtttcttgggaaaaacagttatttccagagagaatgtcaaatagattggataggatagattattctgctagatgatactgatttgggttatccatctaatttctagtccgttctactttcacttctattaacaatgccttttgttcttctgttttaaataaatgttgctgaaaagttattggaggtgtgtgatcagttctttcataatgatttgccttcaaaaattagtacgagactccgagtctaggttgtacaagtgaaccacaatctatgaagcatcgacaccgacacggacaccggacacaacacggacacagacacgtggacacttgtaatgtccaaaatatagaacgtagtacgggtgtcgtgtcggtgtcggacactgacacggacgcgtgtcggacaccggacacggcaaggaactggggtgtccgtgtttcataccgcaattagtctttgtgtttgcattcacttttttaaaaatgcaaaacgaaattttattgaatcggagtagcaatcagcacaagatgtgtcctgcacctaactaccaaaagtacaaaaaccagaacctataattaatcctccaaaaaatactgctggatagacaccccttgacacacctcctaatccatagtctggttacaaaacaaaattcccaaagtataagaatgcttattcacatttcctacacctgcaaagttgcaaactaaaccacaagtggactttgatggaccctgctaaccaagctaattcaacacatgaaaatgtccccaaattgatacgctctagcctgctatctgccacagaaagtgctgtcaggataacactgccaataatatatgactgaccatgtagatactaa

SEQ ID NO: 9024 - DNA, 1117 bp, Glycine max
  Gm_smallRNAprecursor_1857
caattgagggttactctgatataattgtgatgcggcattttgaaagtggtgctgccagaagagctgcagctacatctgacattccaataatcaatgcaggggatggtcctggacaacatccgactcaggtatgcctaaaatagtcatgatggattctgttgcaaccaaagtttgggggggggataatcaatttattttgttcttggcaacttcatgagagagtttcttgggaaaaacagttatttccagagagaatgtcaaatagattggataggatagattattctgctagatgatactgatttgggttatccatctaatttctagtccgttctactttcacttctattaacaatgccttttgttcttctgttttaaataaatgttgctgaaaagttattggaggtgtgtgatcagttctttcataatgatttgccttcaaaaattagtacgagactccgagtctaggttgtacaagtgaaccacaatctatgaagcatcgacaccgacacggacaccggacacaacacggacacagacacgtggacacttgtaatgtccaaaatatagaacgtagtacgggtgtcgtgtcggtgtcggacactgacacggacgcgtgtcggacaccggacacggcaaggaactggggtgtccgtgtttcataccgcaattagtctttgtgtttgcattcacttttttaaaaatgcaaaacgaaattttattgaatcggagtagcaatcagcacaagatgtgtcctgcacctaactaccaaaagtacaaaaaccagaacctataattaatcctccaaaaaatactgctggatagacaccccttgacacacctcctaatccatagtctggttacaaaacaaaattcccaaagtataagaatgcttattcacatttcctacacctgcaaagttgcaaactaaaccacaagtggactttgatggaccctgctaaccaagctaattcaacacatgaaaatgtccccaaattgatacgctctagcctgctatctgccacagaaagtgctgtcaggataacactgccaataatatatgactgaccatgtagatactaataagcctttgcacatcagcacactccagcttctt

SEQ ID NO: 9025 - DNA, 1117 bp, Glycine max; identical to SEQ ID NO: 9024
  Gm_smallRNAprecursor_1858

SEQ ID NO: 9026 - DNA, 1118 bp, Glycine max
  Gm_smallRNAprecursor_1859
caattgagggttactctgatataattgtgatgcggcattttgaaagtggtgctgccagaagagctgcagctacatctgacattccaataatcaatgcaggggatggtcctggacaacatccgactcaggtatgcctaaaatagtcatgatggattctgttgcaaccaaagtttgggggggggataatcaatttattttgttcttggcaacttcatgagagagtttcttgggaaaaacagttatttccagagagaatgtcaaatagattggataggatagattattctgctagatgatactgatttgggttatccatctaatttctagtccgttctactttcacttctattaacaatgccttttgttcttctgttttaaataaatgttgctgaaaagttattggaggtgtgtgatcagttctttcataatgatttgccttcaaaaattagtacgagactccgagtctaggttgtacaagtgaaccacaatctatgaagcatcgacaccgacacggacaccggacacaacacggacacagacacgtggacacttgtaatgtccaaaatatagaacgtagtacgggtgtcgtgtcggtgtcggacactgacacggacgcgtgtcggacaccggacacggcaaggaactggggtgtccgtgtttcataccgcaattagtctttgtgtttgcattcacttttttaaaaatgcaaaacgaaattttattgaatcggagtagcaatcagcacaagatgtgtcctgcacctaactaccaaaagtacaaaaaccagaacctataattaatcctccaaaaaatactgctggatagacaccccttgacacacctcctaatccatagtctggttacaaaacaaaattcccaaagtataagaatgcttattcacatttcctacacctgcaaagttgcaaactaaaccacaagtggactttgatggaccctgctaaccaagctaattcaacacatgaaaatgtccccaaattgatacgctctagcctgctatctgccacagaaagtgctgtcaggataacactgccaataatatatgactgaccatgtagatactaataagcctttgcacatcagcacactccagcttcttt

SEQ ID NO: 9027 - DNA, 1072 bp, Glycine max
  Gm_smallRNAprecursor_1860
tgagggttactctgatataattgtgatgcggcattttgaaagtggtgctgccagaagagctgcagctacatctgacattccaataatcaatgcaggggatggtcctggacaacatccgactcaggtatgcctaaaatagtcatgatggattctgttgcaaccaaagtttgggggggggataatcaatttattttgttcttggcaacttcatgagagagtttcttgggaaaaacagttatttccagagagaatgtcaaatagattggataggatagattattctgctagatgatactgatttgggttatccatctaatttctagtccgttctactttcacttctattaacaatgccttttgttcttctgttttaaataaatgttgctgaaaagttattggaggtgtgtgatcagttctttcataatgatttgccttcaaaaattagtacgagactccgagtctaggttgtacaagtgaaccacaatctatgaagcatcgacaccgacacggacaccggacacaacacggacacagacacgtggacacttgtaatgtccaaaatatagaacgtagtacgggtgtcgtgtcggtgtcggacactgacacggacgcgtgtcggacaccggacacggcaaggaactggggtgtccgtgtttcataccgcaattagtctttgtgtttgcattcacttttttaaaaatgcaaaacgaaattttattgaatcggagtagcaatcagcacaagatgtgtcctgcacctaactaccaaaagtacaaaaaccagaacctataattaatcctccaaaaaatactgctggatagacaccccttgacacacctcctaatccatagtctggttacaaaacaaaattcccaaagtataagaatgcttattcacatttcctacacctgcaaagttgcaaactaaaccacaagtggactttgatggaccctgctaaccaagctaattcaacacatgaaaatgtccccaaattgatacgctctagcctgctatctgccacagaaagtgctgtcaggataacactgccaataatatatgactgaccatgtag

SEQ ID NO: 9028 - DNA, 1073 bp, Glycine max
  Gm_smallRNAprecursor_1861
tgagggttactctgatataattgtgatgcggcattttgaaagtggtgctgccagaagagctgcagctacatctgacattccaataatcaatgcaggggatggtcctggacaacatccgactcaggtatgcctaaaatagtcatgatggattctgttgcaaccaaagtttgggggggggataatcaatttattttgttcttggcaacttcatgagagagtttcttgggaaaaacagttatttccagagagaatgtcaaatagattggataggatagattattctgctagatgatactgatttgggttatccatctaatttctagtccgttctactttcacttctattaacaatgccttttgttcttctgttttaaataaatgttgctgaaaagttattggaggtgtgtgatcagttctttcataatgatttgccttcaaaaattagtacgagactccgagtctaggttgtacaagtgaaccacaatctatgaagcatcgacaccgacacggacaccggacacaacacggacacagacacgtggacacttgtaatgtccaaaatatagaacgtagtacgggtgtcgtgtcggtgtcggacactgacacggacgcgtgtcggacaccggacacggcaaggaactggggtgtccgtgtttcataccgcaattagtctttgtgtttgcattcacttttttaaaaatgcaaaacgaaattttattgaatcggagtagcaatcagcacaagatgtgtcctgcacctaactaccaaaagtacaaaaaccagaacctataattaatcctccaaaaaatactgctggatagacaccccttgacacacctcctaatccatagtctggttacaaaacaaaattcccaaagtataagaatgcttattcacatttcctacacctgcaaagttgcaaactaaaccacaagtggactttgatggaccctgctaaccaagctaattcaacacatgaaaatgtccccaaattgatacgctctagcctgctatctgccacagaaagtgctgtcaggataacactgccaataatatatgactgaccatgtaga

SEQ ID NO: 9029 - DNA, 1033 bp, Glycine max
  Gm_smallRNAprecursor_1862
cattccaataatcaatgcaggggatggtcctggacaacatccgactcaggtatgcctaaaatagtcatgatggattctgttgcaaccaaagtttgggggggggataatcaatttattttgttcttggcaacttcatgagagagtttcttgggaaaaacagttatttccagagagaatgtcaaatagattggataggatagattattctgctagatgatactgatttgggttatccatctaatttctagtccgttctactttcacttctattaacaatgccttttgttcttctgttttaaataaatgttgctgaaaagttattggaggtgtgtgatcagttctttcataatgatttgccttcaaaaattagtacgagactccgagtctaggttgtacaagtgaaccacaatctatgaagcatcgacaccgacacggacaccggacacaacacggacacagacacgtggacacttgtaatgtccaaaatatagaacgtagtacgggtgtcgtgtcggtgtcggacactgacacggacgcgtgtcggacaccggacacggcaaggaactggggtgtccgtgtttcataccgcaattagtctttgtgtttgcattcacttttttaaaaatgcaaaacgaaattttattgaatcggagtagcaatcagcacaagatgtgtcctgcacctaactaccaaaagtacaaaaaccagaacctataattaatcctccaaaaaatactgctggatagacaccccttgacacacctcctaatccatagtctggttacaaaacaaaattcccaaagtataagaatgcttattcacatttcctacacctgcaaagttgcaaactaaaccacaagtggactttgatggaccctgctaaccaagctaattcaacacatgaaaatgtccccaaattgatacgctctagcctgctatctgccacagaaagtgctgtcaggataacactgccaataatatatgactgaccatgtagatactaataagcctttgcacatcagcacactccagc

SEQ ID NO: 9030 - DNA, 1038 bp, Glycine max
  Gm_smallRNAprecursor_1863
ccaataatcaatgcaggggatggtcctggacaacatccgactcaggtatgcctaaaatagtcatgatggattctgttgcaaccaaagtttgggggggggataatcaatttattttgttcttggcaacttcatgagagagtttcttgggaaaaacagttatttccagagagaatgtcaaatagattggataggatagattattctgctagatgatactgatttgggttatccatctaatttctagtccgttctactttcacttctattaacaatgccttttgttcttctgttttaaataaatgttgctgaaaagttattggaggtgtgtgatcagttctttcataatgatttgccttcaaaaattagtacgagactccgagtctaggttgtacaagtgaaccacaatctatgaagcatcgacaccgacacggacaccggacacaacacggacacagacacgtggacacttgtaatgtccaaaatatagaacgtagtacgggtgtcgtgtcggtgtcggacactgacacggacgcgtgtcggacaccggacacggcaaggaactggggtgtccgtgtttcataccgcaattagtctttgtgtttgcattcacttttttaaaaatgcaaaacgaaattttattgaatcggagtagcaatcagcacaagatgtgtcctgcacctaactaccaaaagtacaaaaaccagaacctataattaatcctccaaaaaatactgctggatagacaccccttgacacacctcctaatccatagtctggttacaaaacaaaattcccaaagtataagaatgcttattcacatttcctacacctgcaaagttgcaaactaaaccacaagtggactttgatggaccctgctaaccaagctaattcaacacatgaaaatgtccccaaattgatacgctctagcctgctatctgccacagaaagtgctgtcaggataacactgccaataatatatgactgaccatgtagatactaataagcctttgcacatcagcacactccagcttctttgat

SEQ ID NO: 9031 - DNA, 1034 bp, Glycine max
  Gm_smallRNAprecursor_1864
caataatcaatgcaggggatggtcctggacaacatccgactcaggtatgcctaaaatagtcatgatggattctgttgcaaccaaagtttgggggggggataatcaatttattttgttcttggcaacttcatgagagagtttcttgggaaaaacagttatttccagagagaatgtcaaatagattggataggatagattattctgctagatgatactgatttgggttatccatctaatttctagtccgttctactttcacttctattaacaatgccttttgttcttctgttttaaataaatgttgctgaaaagttattggaggtgtgtgatcagttctttcataatgatttgccttcaaaaattagtacgagactccgagtctaggttgtacaagtgaaccacaatctatgaagcatcgacaccgacacggacaccggacacaacacggacacagacacgtggacacttgtaatgtccaaaatatagaacgtagtacgggtgtcgtgtcggtgtcggacactgacacggacgcgtgtcggacaccggacacggcaaggaactggggtgtccgtgtttcataccgcaattagtctttgtgtttgcattcacttttttaaaaatgcaaaacgaaattttattgaatcggagtagcaatcagcacaagatgtgtcctgcacctaactaccaaaagtacaaaaaccagaacctataattaatcctccaaaaaatactgctggatagacaccccttgacacacctcctaatccatagtctggttacaaaacaaaattcccaaagtataagaatgcttattcacatttcctacacctgcaaagttgcaaactaaaccacaagtggactttgatggaccctgctaaccaagctaattcaacacatgaaaatgtccccaaattgatacgctctagcctgctatctgccacagaaagtgctgtcaggataacactgccaataatatatgactgaccatgtagatactaataagcctttgcacatcagcacactccagcttcttt

SEQ ID NO: 9032 - DNA, 1036 bp, Glycine max
  Gm_smallRNAprecursor_1865
caataatcaatgcaggggatggtcctggacaacatccgactcaggtatgcctaaaatagtcatgatggattctgttgcaaccaaagtttgggggggggataatcaatttattttgttcttggcaacttcatgagagagtttcttgggaaaaacagttatttccagagagaatgtcaaatagattggataggatagattattctgctagatgatactgatttgggttatccatctaatttctagtccgttctactttcacttctattaacaatgccttttgttcttctgttttaaataaatgttgctgaaaagttattggaggtgtgtgatcagttctttcataatgatttgccttcaaaaattagtacgagactccgagtctaggttgtacaagtgaaccacaatctatgaagcatcgacaccgacacggacaccggacacaacacggacacagacacgtggacacttgtaatgtccaaaatatagaacgtagtacgggtgtcgtgtcggtgtcggacactgacacggacgcgtgtcggacaccggacacggcaaggaactggggtgtccgtgtttcataccgcaattagtctttgtgtttgcattcacttttttaaaaatgcaaaacgaaattttattgaatcggagtagcaatcagcacaagatgtgtcctgcacctaactaccaaaagtacaaaaaccagaacctataattaatcctccaaaaaatactgctggatagacaccccttgacacacctcctaatccatagtctggttacaaaacaaaattcccaaagtataagaatgcttattcacatttcctacacctgcaaagttgcaaactaaaccacaagtggactttgatggaccctgctaaccaagctaattcaacacatgaaaatgtccccaaattgatacgctctagcctgctatctgccacagaaagtgctgtcaggataacactgccaataatatatgactgaccatgtagatactaataagcctttgcacatcagcacactccagcttctttga

SEQ ID NO: 9033 - DNA, 1037 bp, Glycine max
  Gm_smallRNAprecursor_1866
caataatcaatgcaggggatggtcctggacaacatccgactcaggtatgcctaaaatagtcatgatggattctgttgcaaccaaagtttgggggggggataatcaatttattttgttcttggcaacttcatgagagagtttcttgggaaaaacagttatttccagagagaatgtcaaatagattggataggatagattattctgctagatgatactgatttgggttatccatctaatttctagtccgttctactttcacttctattaacaatgccttttgttcttctgttttaaataaatgttgctgaaaagttattggaggtgtgtgatcagttctttcataatgatttgccttcaaaaattagtacgagactccgagtctaggttgtacaagtgaaccacaatctatgaagcatcgacaccgacacggacaccggacacaacacggacacagacacgtggacacttgtaatgtccaaaatatagaacgtagtacgggtgtcgtgtcggtgtcggacactgacacggacgcgtgtcggacaccggacacggcaaggaactggggtgtccgtgtttcataccgcaattagtctttgtgtttgcattcacttttttaaaaatgcaaaacgaaattttattgaatcggagtagcaatcagcacaagatgtgtcctgcacctaactaccaaaagtacaaaaaccagaacctataattaatcctccaaaaaatactgctggatagacaccccttgacacacctcctaatccatagtctggttacaaaacaaaattcccaaagtataagaatgcttattcacatttcctacacctgcaaagttgcaaactaaaccacaagtggactttgatggaccctgctaaccaagctaattcaacacatgaaaatgtccccaaattgatacgctctagcctgctatctgccacagaaagtgctgtcaggataacactgccaataatatatgactgaccatgtagatactaataagcctttgcacatcagcacactccagcttctttgat

SEQ ID NO: 9034 - DNA, 1046 bp, Glycine max
  Gm_smallRNAprecursor_1867
tccttgctaggaaaacatatcaatcaagtttagggttttttgtatggtttaaagtgttattcaatatgttctgacaatctgattgtatctgaaaagcaacagttggcatagtgaattaactttcattgcaacaaaatgttttaacaaactgctattacatgatagatagtctgcataatgttctgttagcaagatctgagttgttcactggtgttgctggcactcttttacataatccttgaagttgttattgttatcattaaatatatttcaacattttacttgaaatagatatttgttttcataattattctgttgcgtaatcttgtttctacaattattctattgaatgtgtcatgccattttctttgtgcaaatcaagtagttactgtatgtagcaacataatgtttttcgcgtatgctctatgaagcaccgactcggacaccggacacgacatggacacggacacgtggacacctgtaatgtccaaaatatagaacgtagtacgggtgtcgtgtcggtgtcagacattgacacggacgcgtgtcagacaccggacacggcaagggactggagtgtccgtgcttcatagcgtatgctttctgcagagtttcctgtttcaagatcggcacaatagtgtattttaccatcagctattgttttggttctgtgcaaatcaaatattttactgtcatggcgggttttttgtgtgccctgcaaatcaattattttactgtcgtgtttttttttgtgccatgcaaatctattattttactgtcgtgtttttttggtgcagtgcaaatccagtattttactgtcatgctgtgtttttttggtgccgtacaaatcaagtattttactgtcgtgccgtgtttttttgttgctgtacaaatcaagtattttactgtatgtagcaatgtaatgcttggtgtatactgctttgatattttgaactctggcttttgttgctagcatcattttgatttgttttcttctttgtcggaacagggaaatgaatgcgagtaccgccacagcgagtatgcac

SEQ ID NO: 9035 - DNA, 1047 bp, Glycine max
  Gm_smallRNAprecursor_1868
tccttgctaggaaaacatatcaatcaagtttagggttttttgtatggtttaaagtgttattcaatatgttctgacaatctgattgtatctgaaaagcaacagttggcatagtgaattaactttcattgcaacaaaatgttttaacaaactgctattacatgatagatagtctgcataatgttctgttagcaagatctgagttgttcactggtgttgctggcactcttttacataatccttgaagttgttattgttatcattaaatatatttcaacattttacttgaaatagatatttgttttcataattattctgttgcgtaatcttgtttctacaattattctattgaatgtgtcatgccattttctttgtgcaaatcaagtagttactgtatgtagcaacataatgtttttcgcgtatgctctatgaagcaccgactcggacaccggacacgacatggacacggacacgtggacacctgtaatgtccaaaatatagaacgtagtacgggtgtcgtgtcggtgtcagacattgacacggacgcgtgtcagacaccggacacggcaagggactggagtgtccgtgcttcatagcgtatgctttctgcagagtttcctgtttcaagatcggcacaatagtgtattttaccatcagctattgttttggttctgtgcaaatcaaatattttactgtcatggcgggttttttgtgtgccctgcaaatcaattattttactgtcgtgtttttttttgtgccatgcaaatctattattttactgtcgtgtttttttggtgcagtgcaaatccagtattttactgtcatgctgtgtttttttggtgccgtacaaatcaagtattttactgtcgtgccgtgtttttttgttgctgtacaaatcaagtattttactgtatgtagcaatgtaatgcttggtgtatactgctttgatattttgaactctggcttttgttgctagcatcattttgatttgttttcttctttgtcggaacagggaaatgaatgcgagtaccgccacagcgagtatgcacg

SEQ ID NO: 9036 - DNA, 1051 bp, Glycine max
  Gm_smallRNAprecursor_1869
ttgctaggaaaacatatcaatcaagtttagggttttttgtatggtttaaagtgttattcaatatgttctgacaatctgattgtatctgaaaagcaacagttggcatagtgaattaactttcattgcaacaaaatgttttaacaaactgctattacatgatagatagtctgcataatgttctgttagcaagatctgagttgttcactggtgttgctggcactcttttacataatccttgaagttgttattgttatcattaaatatatttcaacattttacttgaaatagatatttgttttcataattattctgttgcgtaatcttgtttctacaattattctattgaatgtgtcatgccattttctttgtgcaaatcaagtagttactgtatgtagcaacataatgtttttcgcgtatgctctatgaagcaccgactcggacaccggacacgacatggacacggacacgtggacacctgtaatgtccaaaatatagaacgtagtacgggtgtcgtgtcggtgtcagacattgacacggacgcgtgtcagacaccggacacggcaagggactggagtgtccgtgcttcatagcgtatgctttctgcagagtttcctgtttcaagatcggcacaatagtgtattttaccatcagctattgttttggttctgtgcaaatcaaatattttactgtcatggcgggttttttgtgtgccctgcaaatcaattattttactgtcgtgtttttttttgtgccatgcaaatctattattttactgtcgtgtttttttggtgcagtgcaaatccagtattttactgtcatgctgtgtttttttggtgccgtacaaatcaagtattttactgtcgtgccgtgtttttttgttgctgtacaaatcaagtattttactgtatgtagcaatgtaatgcttggtgtatactgctttgatattttgaactctggcttttgttgctagcatcattttgatttgttttcttctttgtcggaacagggaaatgaatgcgagtaccgccacagcgagtatgcacgtgttaat

SEQ ID NO: 9037 - DNA, 1050 bp, Glycine max
  Gm_smallRNAprecursor_1870
tgctaggaaaacatatcaatcaagtttagggttttttgtatggtttaaagtgttattcaatatgttctgacaatctgattgtatctgaaaagcaacagttggcatagtgaattaactttcattgcaacaaaatgttttaacaaactgctattacatgatagatagtctgcataatgttctgttagcaagatctgagttgttcactggtgttgctggcactcttttacataatccttgaagttgttattgttatcattaaatatatttcaacattttacttgaaatagatatttgttttcataattattctgttgcgtaatcttgtttctacaattattctattgaatgtgtcatgccattttctttgtgcaaatcaagtagttactgtatgtagcaacataatgtttttcgcgtatgctctatgaagcaccgactcggacaccggacacgacatggacacggacacgtggacacctgtaatgtccaaaatatagaacgtagtacgggtgtcgtgtcggtgtcagacattgacacggacgcgtgtcagacaccggacacggcaagggactggagtgtccgtgcttcatagcgtatgctttctgcagagtttcctgtttcaagatcggcacaatagtgtattttaccatcagctattgttttggttctgtgcaaatcaaatattttactgtcatggcgggttttttgtgtgccctgcaaatcaattattttactgtcgtgtttttttttgtgccatgcaaatctattattttactgtcgtgtttttttggtgcagtgcaaatccagtattttactgtcatgctgtgtttttttggtgccgtacaaatcaagtattttactgtcgtgccgtgtttttttgttgctgtacaaatcaagtattttactgtatgtagcaatgtaatgcttggtgtatactgctttgatattttgaactctggcttttgttgctagcatcattttgatttgttttcttctttgtcggaacagggaaatgaatgcgagtaccgccacagcgagtatgcacgtgttaat

SEQ ID NO: 9038 - DNA, 1050 bp, Glycine max; identical to SEQ ID NO: 9037
  Gm_smallRNAprecursor_1871

SEQ ID NO: 9039 - DNA, 1184 bp, Glycine max
  Gm_smallRNAprecursor_1872
acactacattgatcgacaccattttgttcatcaataacacaatgtacaaccaccagtcggtatactcgaggttggcataaccttcgatgacaaagtacaatgtatttgagcaatcaaagaatacagcatcagaaatcattttgattgtagaacaatttactctgactagagaaggctaaactttgtctgcaagttacatgaaaatggttgtacatggagcttgggcgcatgcaattcaaagagacataacaaatggattatcaaaagtatcagaggtcatcacatttgtctcgtgccgatgctcagacaagatcatcgccaactcgacaagatcatagcacagatcatccaaccaattatcaaaacaaacccaaccgtctccatcaagacgttgattgcagagatcaaaacaatcataaattataccccatcctacaagaagacatggttagcaaaacaaagagcgttggagatgattcatggaaactggaaagaatcatatgccaaactgccaaaactttttggagctttgcaatcttgtgttctcgggactgtggtcgctgctcaaacagatccttttatgaggggggagaaatagtaccgggtaaaaggttgtttaaacgtgtcttttggtcatttggttcatgcattaatggttttgcatattgcaaacccatagtacaagtagatggtacatggctttacgggaagtatactaacacattgttgatagctaccgcatggagctaaccatatcttcccgattgcctacgccattgtagaaggggagacaacttcagcttgggggttttatctaaagaatttgagaagacatgttactccgcaaattaacatttctctcatttcagaccgatacccctcaattataagttcctacaacaacccacataacgtatgggtaacttatgggtccaagacacatcccatttcttttgcctgcgccacattgcacaaaactttgttcgtggtaactcaaactacaaacatttaaagaaaccactcatgttgtctggtgagaatctattttatttattcgttaaaatttaatttcaatcaaattttataacataatacattcattgaatatttacaggttacgcatacacagagaagatgcactggcgacatcttggggatattcgtgcgaataagccaagtgcagc

SEQ ID NO: 9040 - DNA, 1175 bp, Glycine max
  Gm_smallRNAprecursor_1873
taaaccaatctccatacaatttcaaacccctcgccaaacacagaattatttaacatccatataccagcccccctagtcaacctttccaaaccaagcacgtaacacaatagttaacattacatagtagaacccaaatcaagcatgatgaacatagggaaaagatgattgaaaatttccaacgcaacaatagaccagggatgaaatagttaactagtaccgttacgactataatatctttccatgctccatcacttctcctctcactttcggtttatttatgtgcacaccaagcacttgttttccccaaattaatagatcataatcatcaaaattcaaaagcgaaccacaaaacctagcccaacaatcactaccgagaagaacaaaaatcttatatatataaaaaaaaaatcacacaacacagccaatagaaaataataacaatttcattgacacaccattattaaatttatagtgcagtcaaggcatccgaaaggtccccttaaaaaggggttcataagggggtgatctacccagctatataagcacttgacccgatgtggaactattcttaacacgcctcctcgaggcaaggctggcgacacccaccggaaagaaacagaacatggcttgataccatattaaatttatagtgcagccaaggcatccgaaaggtccccttaaaaaccggttcataagggggtggtctacccagctatataaacacttgtcatgttcatgaattacccgatgtgggactattcttaacaacgatgtcgaacaaacaaatgagaaacaaacaattcatgtaaacactcgtagtgctaatatactcacatgtgttattctattcacataatcagatattgaatccctaacatatgcttaaaggattcaaattacttgtcacttgtattatattttgtatgtaaaatttaataacttaagtcatatataaaataactcaaatatatacagagattttaatttacatttttcgctacgtagttgcattattatttttttaaaaaaaaagctatacttaattactttttgaaagttagaaattccgttgctaatgagtgtgtatgcataatgaagcgatagaaacaaacttatttttgcaactttagtttggaaacttcttgagacctgacttggtaaacttgaggcgtact

SEQ ID NO: 9041 - DNA, 1105 bp, Glycine max
  Gm_smallRNAprecursor_1874
agaagctcctggttacccatacctagccactacatacaaagaagaaaataagaatttaacacaaaatccagaaatagttcaggaaatttaagaatattttgctacattaacacgaaaggttataataaaataatactattattatcactaattattcagagggcgaaccctggtgcagcggtaaagttgtgccttggtgacttgttggtcatgggttcgaatccggaaacagcctctttgcatatgcaagggtaaggctgcgtacaacatccctcccccataccttcgcatagcgaagagcctccgggcaatggggtacgaagttttttttttattatcactaattattcatcatttgatgcaaaaaagaaaaaaaaatactcataccttatcattttcatcctgttcaagccttgtattctgaatgacaaccatcggaggccaaactatttcatgatctttctcctcatcttttaaacctttccacttaccaaatacttccccaggtggaattactgcagagccccttttgcgcagttcctcttccaaaagctcagcaaactccctatggatcttcaccctttttgacccctttgttttggcatgagtaatcagaggctgcagtcctctgtaccaatcaatagcaccgggaccacctcgacaagctgtacagtgccactgcctttccggttcattgatcttttcgatagataggccatccaagttctcaaagaaatccttaaaccatttgctcttcttacgagtctcgtggctcttttgactagtatcagaatcataatcatcactcattagatcatcatccgtatcttccatagcatcaaacccttcctcttcatccccttcatcatcaacactatcattcttcataggggactcttctgtaatttcacccttcaccaggctatcatcaacactcttggactgcttggagccagatatagattgccaattccacccatgctcgaggggaggtcgaatgactggattagaagtcacattattgctgctttcagattcacttgcagttaactgtggccttccatttcctctgccagcaggtctcttgaagttagcattttgggac

SEQ ID NO: 9042 - DNA, 1165 bp, Glycine max
  Gm_smallRNAprecursor_1875
ttacatgagaataaagtaggtgtagcggagatgaggatgttgcggtggatgtgtggtaagactcgacaggataaaattagaaacgaagctattagagagagggttggagtagcgcctattgtagagaagatggtggaaaatagacttaggtggtttgggcatgtagagagaagaccggtagactctgtagtgaggagagtagaccagatggagagaagacaaacaattcgaggcagaggaagacccaaaaagactataagagaggttatcaaaaaggatctcgaacttaatgatttggatagaagtatggtacttgatagaacattatggcggaagttgatccatgtagccgaccccacctagtgggataaggcgttgttattgttgttgttgttgtatttctatatgccgttaatgtttttttctttctcaacctagtattatttgccccaacatacacttattcaatactatattttgagagggggactgctaacctactcccctacttgccttttaggagtatgctagcaatataccactttggatttgatatacttctaaaggtgtaacttgtttaatctaataatttttaggagtatattaaacgagttacacctctagaagtagatcaaatccaaagttgtatattgctaacatactcctaaaaggcaagtaggggagtaggttagcaggtcccctctcaaaatatacttgaccattcatgagtaatacttaacagtcaatatttatttttcttactttcatataaaagcaagtttctcgtttgaaatgtctcctgcagggtgattaactttaaactcttcaccctttcttgtgatcaaacactgtatcattataaaagtgcatggctattctggtagatgagcttatttgatattactttgtttattcctttatgatgtattcagcttgttactgccactggttgctacaatatgaccaagtgtccaagggaaatgcgggagattgaggcagtgatggcaggggcaccatggccagctcagaagatctaagtttgacctcacctcacctgtccttgatctgaactggtctgctaagtttgtattttttttattaaataaatattagaaagtaactccactctcccagatcctccatgtaatcacgtgattagtggcaa

SEQ ID NO: 9043 - DNA, 1163 bp, Glycine max
  Gm_smallRNAprecursor_1876
tacatgagaataaagtaggtgtagcggagatgaggatgttgcggtggatgtgtggtaagactcgacaggataaaattagaaacgaagctattagagagagggttggagtagcgcctattgtagagaagatggtggaaaatagacttaggtggtttgggcatgtagagagaagaccggtagactctgtagtgaggagagtagaccagatggagagaagacaaacaattcgaggcagaggaagacccaaaaagactataagagaggttatcaaaaaggatctcgaacttaatgatttggatagaagtatggtacttgatagaacattatggcggaagttgatccatgtagccgaccccacctagtgggataaggcgttgttattgttgttgttgttgtatttctatatgccgttaatgtttttttctttctcaacctagtattatttgccccaacatacacttattcaatactatattttgagagggggactgctaacctactcccctacttgccttttaggagtatgctagcaatataccactttggatttgatatacttctaaaggtgtaacttgtttaatctaataatttttaggagtatattaaacgagttacacctctagaagtagatcaaatccaaagttgtatattgctaacatactcctaaaaggcaagtaggggagtaggttagcaggtcccctctcaaaatatacttgaccattcatgagtaatacttaacagtcaatatttatttttcttactttcatataaaagcaagtttctcgtttgaaatgtctcctgcagggtgattaactttaaactcttcaccctttcttgtgatcaaacactgtatcattataaaagtgcatggctattctggtagatgagcttatttgatattactttgtttattcctttatgatgtattcagcttgttactgccactggttgctacaatatgaccaagtgtccaagggaaatgcgggagattgaggcagtgatggcaggggcaccatggccagctcagaagatctaagtttgacctcacctcacctgtccttgatctgaactggtctgctaagtttgtattttttttattaaataaatattagaaagtaactccactctcccagatcctccatgtaatcacgtgattagtggca

SEQ ID NO: 9044 - DNA, 1163 bp, Glycine max; identical to SEQ ID NO: 9043
  Gm_smallRNAprecursor_1877

SEQ ID NO: 9045 - DNA, 1164 bp, Glycine max
  Gm_smallRNAprecursor_1878
tacatgagaataaagtaggtgtagcggagatgaggatgttgcggtggatgtgtggtaagactcgacaggataaaattagaaacgaagctattagagagagggttggagtagcgcctattgtagagaagatggtggaaaatagacttaggtggtttgggcatgtagagagaagaccggtagactctgtagtgaggagagtagaccagatggagagaagacaaacaattcgaggcagaggaagacccaaaaagactataagagaggttatcaaaaaggatctcgaacttaatgatttggatagaagtatggtacttgatagaacattatggcggaagttgatccatgtagccgaccccacctagtgggataaggcgttgttattgttgttgttgttgtatttctatatgccgttaatgtttttttctttctcaacctagtattatttgccccaacatacacttattcaatactatattttgagagggggactgctaacctactcccctacttgccttttaggagtatgctagcaatataccactttggatttgatatacttctaaaggtgtaacttgtttaatctaataatttttaggagtatattaaacgagttacacctctagaagtagatcaaatccaaagttgtatattgctaacatactcctaaaaggcaagtaggggagtaggttagcaggtcccctctcaaaatatacttgaccattcatgagtaatacttaacagtcaatatttatttttcttactttcatataaaagcaagtttctcgtttgaaatgtctcctgcagggtgattaactttaaactcttcaccctttcttgtgatcaaacactgtatcattataaaagtgcatggctattctggtagatgagcttatttgatattactttgtttattcctttatgatgtattcagcttgttactgccactggttgctacaatatgaccaagtgtccaagggaaatgcgggagattgaggcagtgatggcaggggcaccatggccagctcagaagatctaagtttgacctcacctcacctgtccttgatctgaactggtctgctaagtttgtattttttttattaaataaatattagaaagtaactccactctcccagatcctccatgtaatcacgtgattagtggcaa

SEQ ID NO: 9046 - DNA, 1164 bp, Glycine max; identical to SEQ ID NO: 9045
  Gm_smallRNAprecursor_1879

SEQ ID NO: 9047 - DNA, 1164 bp, Glycine max; identical to SEQ ID NO: 9045
  Gm_smallRNAprecursor_1880

SEQ ID NO: 9048 - DNA, 1164 bp, Glycine max; identical to SEQ ID NO: 9045
  Gm_smallRNAprecursor_1881

SEQ ID NO: 9049 - DNA, 1121 bp, Glycine max
  Gm_smallRNAprecursor_1882
tgaaatcccagtcaattttggatcccattaacacattcggcaaaagaacaagcttagacaagttttaaggaatggaaggaacaatacggcgatctgttttaggtattgctgctttcatttgtttcatataagagctgattgtagatgtaaatataggaagcaccaagtccaatgattgttactttccacaaagaagaagcatgctcaggtttgggtcccaactactgactccagagggaagaaaggctcaaaaagtagcaattgactaggggcactctgattccatctcattctcatgacttgtgtgattgtgtctgagaatctttgtcactacaatgcgagaaccaactttagcatgcgttgattgctcattttctccggagtgctgctaggtgcacccagcattattgtcggtgcacccagcactaaccacgaaaagacaaaaatagcccttatggatcaagttgatccgtaaattaatttttaagacttatggatcaacttgatccgtaagtcttttacggatcaacttgatccgtaagtcttttacggatcaacttgatccataagtttttcatggatcaagttgatccgtaagttgatttttaagacttacggatcaagttgatccgtaagtcttttacggatcaagttgatccgtaaatcttaaaaattaatttatagatcaacttgatccataaggagagaaattaacaagggtaattttgccatttttaaaaaatgctgggtgcaccaacaataatgctgggtgcacctagcaacactcttttctcctgggaggcaaatgatgaacaattccacaagcccaaatttcggcccgtcaagcctgcaggggctcatctagcatttaggcccaaacgtatatgcccagcccaaatttccactatatagcatttagtttactttttttttataatagttatttttttaaaacaaaaaacaaacatacttatcatagtttatcatatttttgattaattgttgttgttaaaaaaagagaagttgacgttcacaatgtatggaaattaagattaaactccaaacaaaatctctcaaatgtttactcgaaaagtatttttggagtaaataaagtatatatt

SEQ ID NO: 9050 - DNA, 1122 bp, Glycine max
  Gm_smallRNAprecursor_1883
tgaaatcccagtcaattttggatcccattaacacattcggcaaaagaacaagcttagacaagttttaaggaatggaaggaacaatacggcgatctgttttaggtattgctgctttcatttgtttcatataagagctgattgtagatgtaaatataggaagcaccaagtccaatgattgttactttccacaaagaagaagcatgctcaggtttgggtcccaactactgactccagagggaagaaaggctcaaaaagtagcaattgactaggggcactctgattccatctcattctcatgacttgtgtgattgtgtctgagaatctttgtcactacaatgcgagaaccaactttagcatgcgttgattgctcattttctccggagtgctgctaggtgcacccagcattattgtcggtgcacccagcactaaccacgaaaagacaaaaatagcccttatggatcaagttgatccgtaaattaatttttaagacttatggatcaacttgatccgtaagtcttttacggatcaacttgatccgtaagtcttttacggatcaacttgatccataagtttttcatggatcaagttgatccgtaagttgatttttaagacttacggatcaagttgatccgtaagtcttttacggatcaagttgatccgtaaatcttaaaaattaatttatagatcaacttgatccataaggagagaaattaacaagggtaattttgccatttttaaaaaatgctgggtgcaccaacaataatgctgggtgcacctagcaacactcttttctcctgggaggcaaatgatgaacaattccacaagcccaaatttcggcccgtcaagcctgcaggggctcatctagcatttaggcccaaacgtatatgcccagcccaaatttccactatatagcatttagtttactttttttttataatagttatttttttaaaacaaaaaacaaacatacttatcatagtttatcatatttttgattaattgttgttgttaaaaaaagagaagttgacgttcacaatgtatggaaattaagattaaactccaaacaaaatctctcaaatgtttactcgaaaagtatttttggagtaaataaagtatatattg

SEQ ID NO: 9051 - DNA, 1093 bp, Glycine max
  Gm_smallRNAprecursor_1884
taacacattcggcaaaagaacaagcttagacaagttttaaggaatggaaggaacaatacggcgatctgttttaggtattgctgctttcatttgtttcatataagagctgattgtagatgtaaatataggaagcaccaagtccaatgattgttactttccacaaagaagaagcatgctcaggtttgggtcccaactactgactccagagggaagaaaggctcaaaaagtagcaattgactaggggcactctgattccatctcattctcatgacttgtgtgattgtgtctgagaatctttgtcactacaatgcgagaaccaactttagcatgcgttgattgctcattttctccggagtgctgctaggtgcacccagcattattgtcggtgcacccagcactaaccacgaaaagacaaaaatagcccttatggatcaagttgatccgtaaattaatttttaagacttatggatcaacttgatccgtaagtcttttacggatcaacttgatccgtaagtcttttacggatcaacttgatccataagtttttcatggatcaagttgatccgtaagttgatttttaagacttacggatcaagttgatccgtaagtcttttacggatcaagttgatccgtaaatcttaaaaattaatttatagatcaacttgatccataaggagagaaattaacaagggtaattttgccatttttaaaaaatgctgggtgcaccaacaataatgctgggtgcacctagcaacactcttttctcctgggaggcaaatgatgaacaattccacaagcccaaatttcggcccgtcaagcctgcaggggctcatctagcatttaggcccaaacgtatatgcccagcccaaatttccactatatagcatttagtttactttttttttataatagttatttttttaaaacaaaaaacaaacatacttatcatagtttatcatatttttgattaattgttgttgttaaaaaaagagaagttgacgttcacaatgtatggaaattaagattaaactccaaacaaaatctctcaaatgtttactcgaaaagtatttttggagtaaataaagtatatatt

SEQ ID NO: 9052 - DNA, 1094 bp, Glycine max
  Gm_smallRNAprecursor_1885
taacacattcggcaaaagaacaagcttagacaagttttaaggaatggaaggaacaatacggcgatctgttttaggtattgctgctttcatttgtttcatataagagctgattgtagatgtaaatataggaagcaccaagtccaatgattgttactttccacaaagaagaagcatgctcaggtttgggtcccaactactgactccagagggaagaaaggctcaaaaagtagcaattgactaggggcactctgattccatctcattctcatgacttgtgtgattgtgtctgagaatctttgtcactacaatgcgagaaccaactttagcatgcgttgattgctcattttctccggagtgctgctaggtgcacccagcattattgtcggtgcacccagcactaaccacgaaaagacaaaaatagcccttatggatcaagttgatccgtaaattaatttttaagacttatggatcaacttgatccgtaagtcttttacggatcaacttgatccgtaagtcttttacggatcaacttgatccataagtttttcatggatcaagttgatccgtaagttgatttttaagacttacggatcaagttgatccgtaagtcttttacggatcaagttgatccgtaaatcttaaaaattaatttatagatcaacttgatccataaggagagaaattaacaagggtaattttgccatttttaaaaaatgctgggtgcaccaacaataatgctgggtgcacctagcaacactcttttctcctgggaggcaaatgatgaacaattccacaagcccaaatttcggcccgtcaagcctgcaggggctcatctagcatttaggcccaaacgtatatgcccagcccaaatttccactatatagcatttagtttactttttttttataatagttatttttttaaaacaaaaaacaaacatacttatcatagtttatcatatttttgattaattgttgttgttaaaaaaagagaagttgacgttcacaatgtatggaaattaagattaaactccaaacaaaatctctcaaatgtttactcgaaaagtatttttggagtaaataaagtatatattg

SEQ ID NO: 9053 - DNA, 1088 bp, Glycine max
  Gm_smallRNAprecursor_1886
attttgctacttgatcatattaagtttcagtatcatgtgcatgaataaatttaaaacatatgaacttagcatgcacacagtagtgccttgctacccttgatttgttagggatagataggttgatcctgtttttttaaaaggaaaagaaaacaagaagataagtggatggtggaccgtatatataattactaagtgtgaatgtatatatacaggttttgatgatgtcaaaatatttacttgatgagctcatattgattcaagatcaaacaaacaagatcaagaaaagataaggccttagtcaatttgttaaaagaatctcatattgattgttataagtttttggcctcaaaagtttgttttaaaatgtttttatcaaaagttgatcaattcaaaataaaatatttttgaactggtaatcgattaccagaggttctgtaatcgattactagagataaaatgcacatgaattttcgaaatttgaattttgaattgtgtaatcgattacaaagtttcagtaatcgattactagcaaaaagactacagaaaatcctttgaaaagtcatgactcttcaaaatacaactgtgtaatcgattaccagaattctgtaatcgattatcaggagaagaatctcataagatattttgaaaagacacatttcttcaaattgtttttgaatagccacaaaagggcctatatatatgtgtctttacttcaaaaaatattcaaagattttcagaaaagagaacttaattgtcaaaattctctcaaaccaactattgaccaaacacttgcaaatttattgagaattattctaggatcttcaatttgtatcatctactctaaaggagagaaatgaatctattcatctcttttaaaactcagttgtaatcaaaagaatgttagtctcgacgtgtaaggatcttgaacacaagggtgagggaacccaaggtgtgttcaaaggttgtaaaaaatttacaaagatagtggaaaatctcaagtgagttacttgaggactgaacataggcatgggaagtggccgaaccagtataaatcaagtttgcaattttctctttccttatctcgttta

SEQ ID NO: 9054 - DNA, 1039 bp, Glycine max
  Gm_smallRNAprecursor_1887
tgacgatgtatctcaccttgcatttgtttcgtaataatatgtcactcttcacttcaaaaaataaaaaatcaccccagttgtgatgatatatctcaccttggcatcattatagtgcttaaattttacaactttcataataatcattaatgtgactaacaacagaatttatttgatatttgtctaattccaaagtctattataacgtctcaatttcagtttcaggactaaaatagtagagtcataattttttaaatcacatgatctgtgtgttttaatctccactatataggttaatttaaaaatcatattcacaaccaattatgattaaaattacattgtacaaatattttataccagtatgaccattaaactttttttatataaattaaataaagtttaaatctatgaaaattatatttataatataaaaaaattaatatttaaacacacatgtgtaattaggggtgggtaaacaggtcagcctgtttcacgtaaggcccgcccgtataagtctacattgacagcggaccggaccagcccgtcctgcattcttatacggacataataaattggtctacccccacccctcggactccacatgtcaaacgggctgatctgcatgcttaattttaaaagaatttcaatttcagtaaaaatgtaacacaatcaaattaagttcaacacaaatgtaaataaaatatcaacaattagtcaattacatcaataaaataaataatgtcttaacaaaagaaaatccaagcaataaatttaaaatatgaaacttaaacatctccaacaacaaatgatttcatatttaatgtagcttgagccttctccatctccacatcttcatattcttttcctaaaactcaaaacgataataaatattaaaatcaactcaagttaagcgattaaaagataacaattattacacattatttatcttactcatcaaatcctagtaaccaatttttagtacttatcaaggctcgcacattatcaccaagaaacctaattcgatatttgttaaatgccgatt

SEQ ID NO: 9055 - DNA, 1065 bp, Glycine max
  Gm_smallRNAprecursor_1888
aaatacgcatcaagacatttaattttatctatctatctttcacacaacatccgaacattaccccaaaaaaatagaaaaagctctcttcaaactgatacattggccacaccatatattaccgtccagcttttcttctagctatacacaaaaaaataggctgtcatgaacaatcaaggaaatagaaacaacaaagaaaatcgggaagagttggattgcaggctagaatgcactccagttatctgaacctttcttcggagaatgattttctgaagagaccttaaaagggccagaggagccgaatggatcagagtcatcaaaagagaacggaccactgtgaccgaagtccttggtgctactaattgagtcaaaccttgcatgtccctgtcgaccgaagcccaaatcagtgctgctactcatggaatcaaaccttgtgagcgtctcaggattgtagccaaaatccttgctgctacttatggagtcaaaccttgtgaatttatcattattgtagccaaaatccttgctgctacttatggaatcaaaccttgtgaatttatcattattgtaaccaaaatccttgctgctactacttatggaatcaaatctcgtgagcctctctggttgtggagaatatccactttcgtgcctgaaggaatcaaaccttgacatgtcaaagaagtgatcccctgcctcactgtaccttggagagtttccgaacttggaaactggagttgcaggcactgaatcatcaaaagcaaatttggaaactggagttgcaggcactgaatcatcaaaagcaaatgggctttttgactggaacgtgccatctgtatgtgtagatcctgttctaactgggtttataccaaaatcgtcggatttaaagaaatctccctgctcgaagtcagagtcctacaaaaccatacaaaaatttcagtaggtagtagcttaatatcaattaatttttcacagaagcgctatgttgtagcaatgttatgttgtccagaaaatcaaggcaacttcatctttgaaaaaagacatcccttctttagttctttggtaaatgtgcta

SEQ ID NO: 9056 - DNA, 1134 bp, Glycine max
  Gm_smallRNAprecursor_1889
atgctaaacaaatttaagtagatgcaaataacaaattaatcaaaatatatgacttgtttcattcagattttgaaagatagcaaattcctacttaatgaaaggaagaataaacttagtgcaaaagttcatcgaaaaacaagtgtttcttgtttatcatgatagaaatataaaccaaataaacatagaggggtactaggagcacactctatcacttttcttcaagcacactttttactattggcttaaatttattaagaaattacaaaattattagtggggctcattaaataagaagtgaaacccacaaaatttttgtaatttccaataaatttcagacaataataaagagtgtattcaaaagagtgaattaggaaatatgttactagcatttttcaattaacatatggtctttattgtgggtagtgggaacatctcctaattggatgtaattccaatctagtctagacagtctattctaagctgaagtaaatgactaataaacacagttcctgctttgatttgctttcattgcttgggtatactaagtatttattctcactttgattataatctacagataaagaccatatgcaagggtaaagttgtgccttggtgacttgttggtcatgggtttgaatccggaaacagcctctttgcatatgcaagggtaaggctgcgtacaacatccctcccccataccttcgcatagcgaagagcctctgggcaatgaggtacaaagttttttgattataatctacagaagtaatattcttacaagtatgttgcattcgtttcagaaacttttctatattagtgagcagtgactaaagagtatgtttaactttcacatatctgacgttgataactagtcagatttgtccatgaataacaaaaaacaatgtgtgtagtattttgctggagagcattactatgagggaaaacacaactaggattttattagttgactgataacaagtattttatgttcttaagagtttaaaactgctagttgaaagaaaaaccaatatcataatgcagaacataatccaagtgtgaccctcctcaaatattccgttaaaaaacggatttctcgaaatatgatgtgcagcctgacaattcagtgcatgtaataca

SEQ ID NO: 9057 - DNA, 1033 bp, Glycine max
  Gm_smallRNAprecursor_1890
gattctctgaacaaataaaattaaatttaaacttgatagtcatattttttttttaaatgcatcatgacgtatatttcacaagtgatttttactttataaagtctttactttacttgtccattattcgttttatgtgagaccttttttttactcgtttattttcttggaattcaaagttgaatttttaagggtatgtttggtttgtatttttattttttgttttcatttcttgttttcattttttgaaaactattttgactttcaagagattaaaattctaaaaatatgtttagtttgacttcttattttctgcttttaagaaataaaaatactgaaaatgtattttaaaaagaaaatgtatttttagatttgcttaaaattatattacttgccaccatgttttcattttatctaaaatgaggttcctgattttaactgaaaatgagattttattgtttttaatttttggttcatttgagaaaatattttcactcaaaatgttttcaaaaatccaaccaaatgcatttccattaccattttctattttcagtgaaaataaaaacaaaaaacagtccaaccaaacacccctaacaaaactgttttccacgtattatgtaagcaatgagatctgcaacataattagttctccaggagggcaaagaaagttaactccctgctatcactcaaaagcatggttgttctggctgagaaaatccgatcccatggctcaaagcatataagaaaaggatttgttttcatcgaaatgttataaataattaaggataaaatacgttttttttttgctctaaattttttttaagttcacttatagtctttttgaaattttttatttattttttgtctctcaatttttaaaatacatttttaaaaattaagtagacatgtcaagattagagaaagacaaaaaaaaaatagaaaaactaaaactgaattttaaaatttttagagagatgaataatatattttaatctataattaaatatgcccaatcgattaaattaaatgacaaaca

SEQ ID NO: 9058 - DNA, 1063 bp, Glycine max
  Gm_smallRNAprecursor_1891
aggaagataatgttagacagagagagcaaaaaaattgtgaggaccatactatataacgtgaatggtcccatgctatgctttctatagtgtacacattaaaaaaattgctcctaaattaatctgcactattaatgagggggtttgttctgtcacacgctatagaaagtcacgctttccgttcaatgatagataatattaaattaaaaaatgactaatgactagtaaaatataatataataaaaaccaatcaatcaatcagagaatagatcatcaaaccgaaacataaaaataggaaaaagaaaacatagaaaccaaaaaatcacactgctttttcactgtttgatataattaacctgctgaagaagccattgatgttcttcagttcatcagagtgtggagaaagatcgagagtgtgtctggggtggggttggggtttgtttggatttggaatttggaacaaagcagagccagaattgtaaggaattttccagcactggaagttgacagaaagagaagtgagcacgcaaaagcaatagtatatatactataccaagtgcctctgtgtgctcactctcttctgtcaatttctatgtcccaagaaagaaaaactcagtggaagggtaaatacaaatactgcccaaatttggaaagcctcacaaaaagaaaagtggatttggaaaaataaaaaaggggggaaaattcggaattgaatcagatctggaggaatagagagatacccattacaggaaaaacgatggactctatgatgcacatcttattcatcaacaatttcatataaattactagaaaacaaaaattagggtttgacaccagagaagaacatctcaaaagaaaaggaaaaaaaagaaggatcttaacgtatcaatttttgtgattaaatactggagagaaaaaaatgatatcaacacagacctaccataattttcaataaaaaaatatttgtaattctgttaactaatatatatatatatatatatatataatacttgttaaaaaaaaataagaaatcaagaaatacgaggaaaaagaaagaagaaagatg

SEQ ID NO: 9059 - DNA, 1063 bp, Glycine max; identical to SEQ ID NO: 9058
  Gm_smallRNAprecursor_1892

SEQ ID NO: 9060 - DNA, 1137 bp, Glycine max
  Gm_smallRNAprecursor_1893
cttcttatttaacaatcaactaattttctctcattggtttcgtatgttattaggggtgggtaagtgggccggttcgttccatgtaaggcccgcccgcataagcctacattggtagcggatcgggccaatctgtcccgcttcttacacggaccaaataaattgatccgtccccaccccacggaccccgcgggtcaaacgggccgatccgcgggcctagttttaaaagaattttaattttaataaaaatataatacaatcaaattaagttcaatacaaagataaataaaatctcaataattagtcaattatatcaataaaataaataatgtcttaacaaaagaaaatccaaacaataaatctaaaatatgaaatttaaacatctccaacaacaaatgatttcatatttgaagtagcttgagtcttctccatctccatatcttcatcttcttttcctaaaactcgaaataataataaatattagaataaagtcaagttaagtgattaaaagacaataattattacatattatttaccctgcatatcaaatactagtaaccaatttttagtatatatcaaggcttgtacgttgtcaacaataagcctagttcgatatttgttaagcacgcgtgaggagaaaaaatgttcttagcttgttataactgttaaatctgatatgagttatgttttataataaaaatatattaaaatatctttaaaaatatttatttaacaattatttttgacttaaatgataagaattgatatttttattatttatgactttcagatataaaaatgttagattaaaagaaaaaaagatcgagaaaatatcaaaaaacaagatttttaacaagttatcacttatctttttttttatcttaatcttttatttttcttatcttgtgcttttttatctttatcgtcttttaatttgaatattttatttttatctttatatctttctcttatctaatatatttatttatctgttattttaaaagaaaagtttaaagtgaaaaagaaaaaatcaaacctaatataattggatcaggatcacaccaagtaaacctaatgcgagctgcgggcaacccgcgggctaaacccgcatagttcgtgggttaaacgggacgggcccaa

SEQ ID NO: 9061 - DNA, 1035 bp, Glycine max
  Gm_smallRNAprecursor_1894
ttgcattgcattcgaaatgtaaagtttacagaaacttaaaatggttcacaatcatacattttccttgcgtactcgtttctctctgcgctgggtactttgagtatataaggattttgtaaaaatgatttgcgaccttgaaatctgactaaaaaactgctatatatagacattcgaaaataaactgccctaacggtcgaacactatcctaatgccaagtgtcctgctacgtataccttgcatgcatataactgctccttagaacggttatccacattactcgaaattgaactgattttgtgaagttttgtcaaaaattgcgctaagtccagaactcttgctgcctcgacttcgactcgaccatacaccagttcgaatcgcccaatggttcgaagccctctttcttgtcttagccttatacttcataaatacttctttgatcccgtgaatccctttcaatcacctcttctttcttttcgattcgaacaggatctgacaagactcttgctctttaatacgcttcgaaattcaagacgacatctaatgcgtatttagagcatatttcagctcatcaaaaatatgggctaacaaattgcccccaaaaaatgtctgcttcgattcgagatcgaaggaagatgagaagttgacattttttctcttcttctaccagttttcctgaaacggcgtcatgatcgcacgttcactgtgtaaccgtcgcctcgatctcccactacccatcattaattccacctttctaggcagagtgggacacgtgtcacgctggggagtcggaaggtaaatatgatttgattgatttttgaccattgattattatattgtttttccctttttaaagtaaaaccccataaatagcacagagaactccagaaaaaaaaaccccttcagcttctctgcttccaaaacctttcttcttctttgcttccgaagacccttcttcttctttgcttccgaaaaccccttcttcttctaattcgtatccattatctctggcgaagctttcttattttcagataacaa

SEQ ID NO: 9062 - DNA, 1137 bp, Glycine max
  Gm_smallRNAprecursor_1895
acgtttctgaggggttagctcctctaactcataagcaccattcgaatagatatgaattattttaaacggtccttcccaatttggggaccatttgcccaaggctcgatccttactatctatgggcaggataaccttccaaactaaatctccaacattaaaagttttttacttcactttcttattataagctttagcaactctttctttttgtttagtcaaaacttctaatgctcttaatctctcctcatctaagtcaactaactcatctgacatcattttccaataatggtcgattggaatgtccatttgtttttgtaccctggctgattgcaaatatatttcgaccggaagtacagcatcatgcccataagtcagtcgaaatggggtagtattagttgattccttaggagaatttctacatgcccatagaacttgatctaacgttttattccaatttcttggcttttgggcaatgtgttttttaatcaagttaattacaatcttattggctgcttcgacctgaccatttgcttgcgcgtaatatggtgttgaggttaataatcgaaagccaattttttgggcaaattcttgcattttccgtccagtaaaaactgaaccttgatcagtggtaattgtttcaggaataccatacctataaataatatgattttgaatgaaactaattactgcttcctgatcaacatttggcaaagagactgcttcgatccattttgtaaagtaatcgataccaactataatataacgctggttcttagaagaagcaggcttgatttcaccaattaaatccaaagcccatcctctgaaaggccaaggtttgattatggaatgtaactcactagcaggtacatgctgtatccctgcatgcttttggcattcctgacagcctttagcaaattctatgcagtcttttaacatcgaaggccaatacaaaccttgtcgaaataaaagccatttcattttatggcctgcttgatgtgatccacaagccccactgtgaacatgggaaactgctaagtatgcttctgattcacttagacattttaacaacactccttctgtagtctttttaaacaaatcatttcccataaccacgtaatttaaagccctatatttgac

SEQ ID NO: 9063 - DNA, 1110 bp, Glycine max
  Gm_smallRNAprecursor_1896
tgatcaacatttggcaaagagactgcttcgatccattttgtaaagtaatcgataccaactataatataacgctggttcttagaagaagcaggcttgatttcaccaattaaatccaaagcccatcctctgaaaggccaaggtttgattatggaatgtaactcactagcaggtacatgctgtatccctgcatgcttttggcattcctgacagcctttagcaaattctatgcagtcttttaacatcgaaggccaatacaaaccttgtcgaaataaaagccatttcattttatggcctgcttgatgtgatccacaagccccactgtgaacatgggaaactgctaagtatgcttctgattcacttagacattttaacaacactccttctgtagtctttttaaacaaatcatttcccataaccacgtaatttaaagccctatatttgacctttcgagccacattgcctattggattttccaaatattcaacaatggactttctccaatcattatctaacatattgtcaatggccaaaatttgaatttttccctggagatcatccatgctttcatctccattattttgtggtatacttgcccccacaagttttgtcattggcaatttagtgcttaatggctctggtaacaccagtttgtcttttatttcgatcaactgagttaacttttccttcgacattttgtaccctgaagctatttgggctaaatcatttgcttcttggttttcttgtcgaggtatatgctcaatgttaatatgatcgaaatgattcagaagagaactcgccataacaaaatattttgctaagtgttcattaacacatttgtattcttgtgttaattgcttcaacactaattctgaatcaccccttatgttaacatttcttgcccccaggctaattaaaatttcaaggcctgtaattagagcctcatactcagcctcattattagaacaaagccctttgattttatatttgaatctagttggaactttattgggggatattattaaaactccaattccagttccatgtttgtgtttcgaaccatcgaaatacaaaatccaaggctctgtatccacatagtcttgcggcatttcg

SEQ ID NO: 9064 - DNA, 1176 bp, Glycine max
  Gm_smallRNAprecursor_1897
agccacaatttgacccttaacagatttcaaaggcttgtacgttaaaaaatattctgttaatgctaaagcccattttccaattctactgtgtagaataggttttgacaacatgtgcttaataatatcataatgagaatatacataaacatcaacaggctttatatattgcttaagtttcgcacaagagaaatacaaacaaagacaaagtttttctatggcagtatatctagtttctgcatcatttagtacacgactaagataataaattgcatgctctacgccatcatcatcttcctgagccaacatgctaccaatggtcttgtcagatgcagcaatatacaacttcatagtcttgtttcgactaggaggcattaacacaggaggcttgatcagatattctttaatttcatcgaaagccttttgatgctcttcattccatttgaatggttcatctttcttgagtcgaagtaatggcgaaaaaatttgagctttgccacttagattcgaaatgaatcgcctcaagaagttgatttttcctagcaaagattggagctgttttttggtcgaaggaggcttcgtctcaagaatagcctttgtcttattttgatttatctcaatgccttttttatgcaccacaaaaccaaggaaatctcctgcacgcacacaaaaagcacactttaatggattcatttttaatccatgtttcctcattcgttcgaaagattgcctaaggtaatccaaatggctatcttctgaggaggatttgatgattatatcatcaatataaacttgcataaatgtgtcaataaaatcatgaaacatggaattcatggccctttgataagtggccccagcatttttcaacccaaagggcataaccacccattcataagtgcctaaagcaccaggacatcgaaatgctgtttttgacacatcactttcagcaataaatatttggttatacccagaataaccatctaacatgcttaaaaattcgaagccagctgctgaatctaccaacatttccgctactggcatagcatattcatctttaggtgtagcattatttaaatccctaaaatctatgcatactctaagagttccattctttttaatgacagggactatatttgctagccattcgacatacctggcagatctgatgaatttacacct

SEQ ID NO: 9065 - DNA, 1157 bp, Glycine max
  Gm_smallRNAprecursor_1898
caattctactgtgtagaataggttttgacaacatgtgcttaataatatcataatgagaatatacataaacatcaacaggctttatatattgcttaagtttcgcacaagagaaatacaaacaaagacaaagtttttctatggcagtatatctagtttctgcatcatttagtacacgactaagataataaattgcatgctctacgccatcatcatcttcctgagccaacatgctaccaatggtcttgtcagatgcagcaatatacaacttcatagtcttgtttcgactaggaggcattaacacaggaggcttgatcagatattctttaatttcatcgaaagccttttgatgctcttcattccatttgaatggttcatctttcttgagtcgaagtaatggcgaaaaaatttgagctttgccacttagattcgaaatgaatcgcctcaagaagttgatttttcctagcaaagattggagctgttttttggtcgaaggaggcttcgtctcaagaatagcctttgtcttattttgatttatctcaatgccttttttatgcaccacaaaaccaaggaaatctcctgcacgcacacaaaaagcacactttaatggattcatttttaatccatgtttcctcattcgttcgaaagattgcctaaggtaatccaaatggctatcttctgaggaggatttgatgattatatcatcaatataaacttgcataaatgtgtcaataaaatcatgaaacatggaattcatggccctttgataagtggccccagcatttttcaacccaaagggcataaccacccattcataagtgcctaaagcaccaggacatcgaaatgctgtttttgacacatcactttcagcaataaatatttggttatacccagaataaccatctaacatgcttaaaaattcgaagccagctgctgaatctaccaacatttccgctactggcatagcatattcatctttaggtgtagcattatttaaatccctaaaatctatgcatactctaagagttccattctttttaatgacagggactatatttgctagccattcgacatacctggcagatctgatgaatttacacctcagcagcctttcgatctcttccttaattttggacatgatttctggtgcaaatcttctt

SEQ ID NO: 9066 - DNA, 1039 bp, Glycine max
  Gm_smallRNAprecursor_1899
atttctggtgcaaatcttcttggtagttgttttactggtctttttccctccttaatcggtaatttcatttcgaccatttctctgcttaacccaggcatttcgtggtaatcccaagcaaaacagtctttaaattctctaagaagaggcaccaacttttcttttagattggaggtgatattggcactgatatatgttggccttttcatcgagccatctccaatgtcgatttcctccaaaggatcttgagcctgcatctttggcacctcacttacgggatttttctcgaaacccagcggctcatcgtcataaatgcaatccagtcttcgatcctttgtttctttgtttttatgatcttcgatcttggcttcaactgccatattttgttgagattcagcctcaaaggccgtatttagtctattttcggccatataagccgtaattctggcccatgcagtggcctcagccatattaatcttcatatatattccacccagttggtggaatgactccatcttcagagggaacaacatcaatttcctccctctcccatataaacccataggtaggatggagtttgacagagtggataacattgtcacttgattcgacaatagcctccttatcaccacaaggtgctatgttagccaactttttgtcaaaggtttgtgcagtaacattatcgacctcagacttatagaagctttgatccgcctctatattttcaacaatcccatcctccctccagataatgagtttctggtgaagggtagatggcacagccccaactccatggatccattcccttcctaatagcaagttaaaattagccttggactgtatcaccaggaatagagttggtcgaactatactgcccacagcaacatctacttgaatggctcccaaagaatagccagttttaccctcataattcgaaagcacaatgttgtgggcagatagatcagtgtcatgtttcccgatcttgtagagcatagatcgaggcattaagttgacagccgctcctccatcaatgagcactttg

SEQ ID NO: 9067 - DNA, 1188 bp, Glycine max
  Gm_smallRNAprecursor_1900
aagtccttggttgcttggttagtagtttgttctccgaaaaaagaagggggtttaggcctttttaatctcaaggactggaaccttgcgtttctttcccgtatcctgtgggactttcattgtaagaaagattctctatgggttcggtgggttcaccattactatttcagagggagcgatgtgtggaattacaatacttcttcatcagattcagttttgataaagaaaatcattcaaataagggacttattatctctaaagagctaaatacggaagaggacaaaaaaaggattcaatcttggagcaccaatgaacaattgcttgttgacaaagtctatgaatacattagaggtgtcaagcctactgttagttggtgttttgttatatggaacccagcaatcccccctaagatgtctttcattttgtggcttgctaaaaggaatcggctgcttactcttgacaaagttgtttttttgaacaagggttccctctgccctttatgttcaaatgagtctgagtcaaatgctcatttattcttttcttgcaggaaatctctctaagtttgggctcacattcgtgatttggctctttttcgcagacgtttcacttctttacagcgtattactgactctttaattagggacagatccacatcaggtgtttaaggaaaattacgttgtctgactataacaattacagtctactgcatttggctgtctaggaacaagctgatttttaaagattatcaattttctgtcatagagattattagccagattaagtttcttatgtatagacaagcgcacctgttgcatttgttttagcatcttgatataagtcttcttgtattagggagacttttgattttctttaacggcgggatatgcgtttattattgtatcattttgggtttaatataatttacattttttttcaaaaaaaaaaagaatttgttttaatggtttcaagtaattgtttccatctaaccatctctacaaattatctggtgacgtacacacttgtttagagggtttttttttaagatgtcctgtattacttacgaaatgttatttggattttatgtcattcttttttttctacatataattataaaggagtattccccattaaccactaataattctttaatttcgtaagcgctaaacactaataagtgggtttgcacctttc

SEQ ID NO: 9068 - DNA, 1040 bp, Glycine max
  Gm_smallRNAprecursor_1901
agagagagagagaggaactacacaccattaaggaggatggatacctgtggttaatttgtttcgtgcatgaataagagcaatataatggagttccacttttcctttcattatttctgaaatcagcatagtttgacttaggaagaacagccatatatgcagtgaagtgtactagagtggtattgattcggctcgtcttatttaagaggatgtgattaaattcatatgcaaagatgaacagaagcaataccacgccagtccacttccgcagaatccattttctgaggtttctattcttcagtgctaagcagataatgtaactatagtaagctcttcttcctataaaataaaactgcatgtgagactccaacatgtcatgtaagggattcatggaacttctttcattcatagtgaaaaaaaagcacaaacaacaaggcatagtttggtttctaaagaaaaagctgctagtatatatatatatgcaatgaagcaaacaagagtgatattgattcggctcgtctcaatcgttgatatagtggttgaattaagatgagccgtaccaatatcacgccgtgtctacttttgcagaagccatttgtatataatatggccactcaggtaaggcaaaggttctatgttgaggaaaagaatggcaagctctacctcctataaatagaactaactaaagcactgtactactgtgtcagtatcgtataggaaaataatttatggacgtccaatatgctataccacatacagtgaaaaagagaaaaaagataaaaaaaaaataatattataagttatatgatgggatagaaaaaaaaaattaaaaatgataagtattgattagatgtttaaaaataaattaaatgtccatttatcattgttttatgatatatgacttctttagacactcatcaaggacgtccgcgaccacaagtgaaaaaacatttaatggttaagcatctagaacacttatcatgatcaagattcactaggtccactatcgaacccatcaattaatgtttatcaactctgcttaa

SEQ ID NO: 9069 - DNA, 1131 bp, Glycine max
  Gm_smallRNAprecursor_1902
catccttggctgcgccgagaggaaaacactcttggttttgccggttttttctcacgtgcgacaccgggaagatagttatggagaagcgttggttaagcacgaagaaaggttcgagcataacacggagaagttgcagaaatggaaaatgactttgtatcaagtagctctcttgtctggctatcatttcaaatatgggtacccaccttaccgatcttccttacactgtaatttttgttcgattaaagtttcacttgtctaattgaaaaattattaggtcgttctaaacaacaatttgttcatgtttcttaccaattcgttctaaacaacaacttcattaaaacttttttgtttgaaacagagatggatatgagtatgagttcattgggaggattgttgagcgggtctgcatcaagattaatcttactcatttacatgttgcgggttatttggttggactagagtcacaagtgccaagagccatgaagcttttggatgttggatctgatgatggtgtgcacatgatagagatccactgtataggtggaatagggaaaacaacattttagaatttgattgctaactgtttttgtggttcatgttttctttaagatgtgagagaaaaatcaaacaaacatggattacaacatttccagagcatccttctttcagaaataattaaactcataagtttaaaagaacatatgagctgaaagaattgagtaaggatgatgctcttcaattgcttactcaaaaaaagcttttaaaatgaaacaagttgatccaatacatgtggaggtcttaatggtgttgaaacatatgcatgaggccttccattgactttggaagtaataggttccaacttgttttgaaaaagtaagaagaagggaatatgctatcaaacaatatcaagaaattcctaataatcaaatcctagagatacttaaagtaagctttgatgcattggaagaagaagaaaaaagtgtttttcttgacattgcttgttgcttcaaaggatatgcattcatagaggttaaagatatacttgtgctcatcatggtgataacatgaaatatcatgttggcatgttagttgagaaatctctcataaaagttaagactgttacattgcatg

SEQ ID NO: 9070 - DNA, 1148 bp, Glycine max
  Gm_smallRNAprecursor_1903
catccttggctgcgccgagaggaaaacactcttggttttgccggttttttctcacgtgcgacaccgggaagatagttatggagaagcgttggttaagcacgaagaaaggttcgagcataacacggagaagttgcagaaatggaaaatgactttgtatcaagtagctctcttgtctggctatcatttcaaatatgggtacccaccttaccgatcttccttacactgtaatttttgttcgattaaagtttcacttgtctaattgaaaaattattaggtcgttctaaacaacaatttgttcatgtttcttaccaattcgttctaaacaacaacttcattaaaacttttttgtttgaaacagagatggatatgagtatgagttcattgggaggattgttgagcgggtctgcatcaagattaatcttactcatttacatgttgcgggttatttggttggactagagtcacaagtgccaagagccatgaagcttttggatgttggatctgatgatggtgtgcacatgatagagatccactgtataggtggaatagggaaaacaacattttagaatttgattgctaactgtttttgtggttcatgttttctttaagatgtgagagaaaaatcaaacaaacatggattacaacatttccagagcatccttctttcagaaataattaaactcataagtttaaaagaacatatgagctgaaagaattgagtaaggatgatgctcttcaattgcttactcaaaaaaagcttttaaaatgaaacaagttgatccaatacatgtggaggtcttaatggtgttgaaacatatgcatgaggccttccattgactttggaagtaataggttccaacttgttttgaaaaagtaagaagaagggaatatgctatcaaacaatatcaagaaattcctaataatcaaatcctagagatacttaaagtaagctttgatgcattggaagaagaagaaaaaagtgtttttcttgacattgcttgttgcttcaaaggatatgcattcatagaggttaaagatatacttgtgctcatcatggtgataacatgaaatatcatgttggcatgttagttgagaaatctctcataaaagttaagactgttacattgcatgacttgactgaggacatg

SEQ ID NO: 9071 - DNA, 1234 bp, Glycine max
  Gm_smallRNAprecursor_1904
catccttggctgcgccgagaggaaaacactcttggttttgccggttttttctcacgtgcgacaccgggaagatagttatggagaagcgttggttaagcacgaagaaaggttcgagcataacacggagaagttgcagaaatggaaaatgactttgtatcaagtagctctcttgtctggctatcatttcaaatatgggtacccaccttaccgatcttccttacactgtaatttttgttcgattaaagtttcacttgtctaattgaaaaattattaggtcgttctaaacaacaatttgttcatgtttcttaccaattcgttctaaacaacaacttcattaaaacttttttgtttgaaacagagatggatatgagtatgagttcattgggaggattgttgagcgggtctgcatcaagattaatcttactcatttacatgttgcgggttatttggttggactagagtcacaagtgccaagagccatgaagcttttggatgttggatctgatgatggtgtgcacatgatagagatccactgtataggtggaatagggaaaacaacattttagaatttgattgctaactgtttttgtggttcatgttttctttaagatgtgagagaaaaatcaaacaaacatggattacaacatttccagagcatccttctttcagaaataattaaactcataagtttaaaagaacatatgagctgaaagaattgagtaaggatgatgctcttcaattgcttactcaaaaaaagcttttaaaatgaaacaagttgatccaatacatgtggaggtcttaatggtgttgaaacatatgcatgaggccttccattgactttggaagtaataggttccaacttgttttgaaaaagtaagaagaagggaatatgctatcaaacaatatcaagaaattcctaataatcaaatcctagagatacttaaagtaagctttgatgcattggaagaagaagaaaaaagtgtttttcttgacattgcttgttgcttcaaaggatatgcattcatagaggttaaagatatacttgtgctcatcatggtgataacatgaaatatcatgttggcatgttagttgagaaatctctcataaaagttaagactgttacattgcatgacttgactgaggacatgggtaaaaaatttgtcactcaaggatcagcaagagagctgggaagcaaaggaagctataatccaagttttggaagacaacagagtga

SEQ ID NO: 9072 - DNA, 1113 bp, Glycine max
  Gm_smallRNAprecursor_1905
ggttaagcacgaagaaaggttcgagcataacacggagaagttgcagaaatggaaaatgactttgtatcaagtagctctcttgtctggctatcatttcaaatatgggtacccaccttaccgatcttccttacactgtaatttttgttcgattaaagtttcacttgtctaattgaaaaattattaggtcgttctaaacaacaatttgttcatgtttcttaccaattcgttctaaacaacaacttcattaaaacttttttgtttgaaacagagatggatatgagtatgagttcattgggaggattgttgagcgggtctgcatcaagattaatcttactcatttacatgttgcgggttatttggttggactagagtcacaagtgccaagagccatgaagcttttggatgttggatctgatgatggtgtgcacatgatagagatccactgtataggtggaatagggaaaacaacattttagaatttgattgctaactgtttttgtggttcatgttttctttaagatgtgagagaaaaatcaaacaaacatggattacaacatttccagagcatccttctttcagaaataattaaactcataagtttaaaagaacatatgagctgaaagaattgagtaaggatgatgctcttcaattgcttactcaaaaaaagcttttaaaatgaaacaagttgatccaatacatgtggaggtcttaatggtgttgaaacatatgcatgaggccttccattgactttggaagtaataggttccaacttgttttgaaaaagtaagaagaagggaatatgctatcaaacaatatcaagaaattcctaataatcaaatcctagagatacttaaagtaagctttgatgcattggaagaagaagaaaaaagtgtttttcttgacattgcttgttgcttcaaaggatatgcattcatagaggttaaagatatacttgtgctcatcatggtgataacatgaaatatcatgttggcatgttagttgagaaatctctcataaaagttaagactgttacattgcatgacttgactgaggacatgggtaaaaaatttgtcactcaaggatcagcaagagagctgggaagcaaaggaagct

SEQ ID NO: 9073 - DNA, 1067 bp, Glycine max
  Gm_smallRNAprecursor_1906
gttaagcacgaagaaaggttcgagcataacacggagaagttgcagaaatggaaaatgactttgtatcaagtagctctcttgtctggctatcatttcaaatatgggtacccaccttaccgatcttccttacactgtaatttttgttcgattaaagtttcacttgtctaattgaaaaattattaggtcgttctaaacaacaatttgttcatgtttcttaccaattcgttctaaacaacaacttcattaaaacttttttgtttgaaacagagatggatatgagtatgagttcattgggaggattgttgagcgggtctgcatcaagattaatcttactcatttacatgttgcgggttatttggttggactagagtcacaagtgccaagagccatgaagcttttggatgttggatctgatgatggtgtgcacatgatagagatccactgtataggtggaatagggaaaacaacattttagaatttgattgctaactgtttttgtggttcatgttttctttaagatgtgagagaaaaatcaaacaaacatggattacaacatttccagagcatccttctttcagaaataattaaactcataagtttaaaagaacatatgagctgaaagaattgagtaaggatgatgctcttcaattgcttactcaaaaaaagcttttaaaatgaaacaagttgatccaatacatgtggaggtcttaatggtgttgaaacatatgcatgaggccttccattgactttggaagtaataggttccaacttgttttgaaaaagtaagaagaagggaatatgctatcaaacaatatcaagaaattcctaataatcaaatcctagagatacttaaagtaagctttgatgcattggaagaagaagaaaaaagtgtttttcttgacattgcttgttgcttcaaaggatatgcattcatagaggttaaagatatacttgtgctcatcatggtgataacatgaaatatcatgttggcatgttagttgagaaatctctcataaaagttaagactgttacattgcatgacttgactgaggacatgggtaaaaaat

SEQ ID NO: 9074 - DNA, 1070 bp, Glycine max
  Gm_smallRNAprecursor_1907
aagcacgaagaaaggttcgagcataacacggagaagttgcagaaatggaaaatgactttgtatcaagtagctctcttgtctggctatcatttcaaatatgggtacccaccttaccgatcttccttacactgtaatttttgttcgattaaagtttcacttgtctaattgaaaaattattaggtcgttctaaacaacaatttgttcatgtttcttaccaattcgttctaaacaacaacttcattaaaacttttttgtttgaaacagagatggatatgagtatgagttcattgggaggattgttgagcgggtctgcatcaagattaatcttactcatttacatgttgcgggttatttggttggactagagtcacaagtgccaagagccatgaagcttttggatgttggatctgatgatggtgtgcacatgatagagatccactgtataggtggaatagggaaaacaacattttagaatttgattgctaactgtttttgtggttcatgttttctttaagatgtgagagaaaaatcaaacaaacatggattacaacatttccagagcatccttctttcagaaataattaaactcataagtttaaaagaacatatgagctgaaagaattgagtaaggatgatgctcttcaattgcttactcaaaaaaagcttttaaaatgaaacaagttgatccaatacatgtggaggtcttaatggtgttgaaacatatgcatgaggccttccattgactttggaagtaataggttccaacttgttttgaaaaagtaagaagaagggaatatgctatcaaacaatatcaagaaattcctaataatcaaatcctagagatacttaaagtaagctttgatgcattggaagaagaagaaaaaagtgtttttcttgacattgcttgttgcttcaaaggatatgcattcatagaggttaaagatatacttgtgctcatcatggtgataacatgaaatatcatgttggcatgttagttgagaaatctctcataaaagttaagactgttacattgcatgacttgactgaggacatgggtaaaaaatttgtca

SEQ ID NO: 9075 - DNA, 1140 bp, Glycine max
  Gm_smallRNAprecursor_1908
aagcacgaagaaaggttcgagcataacacggagaagttgcagaaatggaaaatgactttgtatcaagtagctctcttgtctggctatcatttcaaatatgggtacccaccttaccgatcttccttacactgtaatttttgttcgattaaagtttcacttgtctaattgaaaaattattaggtcgttctaaacaacaatttgttcatgtttcttaccaattcgttctaaacaacaacttcattaaaacttttttgtttgaaacagagatggatatgagtatgagttcattgggaggattgttgagcgggtctgcatcaagattaatcttactcatttacatgttgcgggttatttggttggactagagtcacaagtgccaagagccatgaagcttttggatgttggatctgatgatggtgtgcacatgatagagatccactgtataggtggaatagggaaaacaacattttagaatttgattgctaactgtttttgtggttcatgttttctttaagatgtgagagaaaaatcaaacaaacatggattacaacatttccagagcatccttctttcagaaataattaaactcataagtttaaaagaacatatgagctgaaagaattgagtaaggatgatgctcttcaattgcttactcaaaaaaagcttttaaaatgaaacaagttgatccaatacatgtggaggtcttaatggtgttgaaacatatgcatgaggccttccattgactttggaagtaataggttccaacttgttttgaaaaagtaagaagaagggaatatgctatcaaacaatatcaagaaattcctaataatcaaatcctagagatacttaaagtaagctttgatgcattggaagaagaagaaaaaagtgtttttcttgacattgcttgttgcttcaaaggatatgcattcatagaggttaaagatatacttgtgctcatcatggtgataacatgaaatatcatgttggcatgttagttgagaaatctctcataaaagttaagactgttacattgcatgacttgactgaggacatgggtaaaaaatttgtcactcaaggatcagcaagagagctgggaagcaaaggaagctataatccaagttttggaagacaacagagtga

SEQ ID NO: 9076 - DNA, 1035 bp, Glycine max
  Gm_smallRNAprecursor_1909
aatggaaaatgactttgtatcaagtagctctcttgtctggctatcatttcaaatatgggtacccaccttaccgatcttccttacactgtaatttttgttcgattaaagtttcacttgtctaattgaaaaattattaggtcgttctaaacaacaatttgttcatgtttcttaccaattcgttctaaacaacaacttcattaaaacttttttgtttgaaacagagatggatatgagtatgagttcattgggaggattgttgagcgggtctgcatcaagattaatcttactcatttacatgttgcgggttatttggttggactagagtcacaagtgccaagagccatgaagcttttggatgttggatctgatgatggtgtgcacatgatagagatccactgtataggtggaatagggaaaacaacattttagaatttgattgctaactgtttttgtggttcatgttttctttaagatgtgagagaaaaatcaaacaaacatggattacaacatttccagagcatccttctttcagaaataattaaactcataagtttaaaagaacatatgagctgaaagaattgagtaaggatgatgctcttcaattgcttactcaaaaaaagcttttaaaatgaaacaagttgatccaatacatgtggaggtcttaatggtgttgaaacatatgcatgaggccttccattgactttggaagtaataggttccaacttgttttgaaaaagtaagaagaagggaatatgctatcaaacaatatcaagaaattcctaataatcaaatcctagagatacttaaagtaagctttgatgcattggaagaagaagaaaaaagtgtttttcttgacattgcttgttgcttcaaaggatatgcattcatagaggttaaagatatacttgtgctcatcatggtgataacatgaaatatcatgttggcatgttagttgagaaatctctcataaaagttaagactgttacattgcatgacttgactgaggacatgggtaaaaaatttgtcactcaagga

SEQ ID NO: 9077 - DNA, 1090 bp, Glycine max
  Gm_smallRNAprecursor_1910
aatggaaaatgactttgtatcaagtagctctcttgtctggctatcatttcaaatatgggtacccaccttaccgatcttccttacactgtaatttttgttcgattaaagtttcacttgtctaattgaaaaattattaggtcgttctaaacaacaatttgttcatgtttcttaccaattcgttctaaacaacaacttcattaaaacttttttgtttgaaacagagatggatatgagtatgagttcattgggaggattgttgagcgggtctgcatcaagattaatcttactcatttacatgttgcgggttatttggttggactagagtcacaagtgccaagagccatgaagcttttggatgttggatctgatgatggtgtgcacatgatagagatccactgtataggtggaatagggaaaacaacattttagaatttgattgctaactgtttttgtggttcatgttttctttaagatgtgagagaaaaatcaaacaaacatggattacaacatttccagagcatccttctttcagaaataattaaactcataagtttaaaagaacatatgagctgaaagaattgagtaaggatgatgctcttcaattgcttactcaaaaaaagcttttaaaatgaaacaagttgatccaatacatgtggaggtcttaatggtgttgaaacatatgcatgaggccttccattgactttggaagtaataggttccaacttgttttgaaaaagtaagaagaagggaatatgctatcaaacaatatcaagaaattcctaataatcaaatcctagagatacttaaagtaagctttgatgcattggaagaagaagaaaaaagtgtttttcttgacattgcttgttgcttcaaaggatatgcattcatagaggttaaagatatacttgtgctcatcatggtgataacatgaaatatcatgttggcatgttagttgagaaatctctcataaaagttaagactgttacattgcatgacttgactgaggacatgggtaaaaaatttgtcactcaaggatcagcaagagagctgggaagcaaaggaagctataatccaagttttggaagacaac

SEQ ID NO: 9078 - DNA, 1058 bp, Glycine max
  Gm_smallRNAprecursor_1911
gactttgtatcaagtagctctcttgtctggctatcatttcaaatatgggtacccaccttaccgatcttccttacactgtaatttttgttcgattaaagtttcacttgtctaattgaaaaattattaggtcgttctaaacaacaatttgttcatgtttcttaccaattcgttctaaacaacaacttcattaaaacttttttgtttgaaacagagatggatatgagtatgagttcattgggaggattgttgagcgggtctgcatcaagattaatcttactcatttacatgttgcgggttatttggttggactagagtcacaagtgccaagagccatgaagcttttggatgttggatctgatgatggtgtgcacatgatagagatccactgtataggtggaatagggaaaacaacattttagaatttgattgctaactgtttttgtggttcatgttttctttaagatgtgagagaaaaatcaaacaaacatggattacaacatttccagagcatccttctttcagaaataattaaactcataagtttaaaagaacatatgagctgaaagaattgagtaaggatgatgctcttcaattgcttactcaaaaaaagcttttaaaatgaaacaagttgatccaatacatgtggaggtcttaatggtgttgaaacatatgcatgaggccttccattgactttggaagtaataggttccaacttgttttgaaaaagtaagaagaagggaatatgctatcaaacaatatcaagaaattcctaataatcaaatcctagagatacttaaagtaagctttgatgcattggaagaagaagaaaaaagtgtttttcttgacattgcttgttgcttcaaaggatatgcattcatagaggttaaagatatacttgtgctcatcatggtgataacatgaaatatcatgttggcatgttagttgagaaatctctcataaaagttaagactgttacattgcatgacttgactgaggacatgggtaaaaaatttgtcactcaaggatcagcaagagagctgggaagcaaaggaagctat

SEQ ID NO: 9079 - DNA, 1176 bp, Glycine max
  Gm_smallRNAprecursor_1912
gctctcttgtctggctatcatttcaaatatgggtacccaccttaccgatcttccttacactgtaatttttgttcgattaaagtttcacttgtctaattgaaaaattattaggtcgttctaaacaacaatttgttcatgtttcttaccaattcgttctaaacaacaacttcattaaaacttttttgtttgaaacagagatggatatgagtatgagttcattgggaggattgttgagcgggtctgcatcaagattaatcttactcatttacatgttgcgggttatttggttggactagagtcacaagtgccaagagccatgaagcttttggatgttggatctgatgatggtgtgcacatgatagagatccactgtataggtggaatagggaaaacaacattttagaatttgattgctaactgtttttgtggttcatgttttctttaagatgtgagagaaaaatcaaacaaacatggattacaacatttccagagcatccttctttcagaaataattaaactcataagtttaaaagaacatatgagctgaaagaattgagtaaggatgatgctcttcaattgcttactcaaaaaaagcttttaaaatgaaacaagttgatccaatacatgtggaggtcttaatggtgttgaaacatatgcatgaggccttccattgactttggaagtaataggttccaacttgttttgaaaaagtaagaagaagggaatatgctatcaaacaatatcaagaaattcctaataatcaaatcctagagatacttaaagtaagctttgatgcattggaagaagaagaaaaaagtgtttttcttgacattgcttgttgcttcaaaggatatgcattcatagaggttaaagatatacttgtgctcatcatggtgataacatgaaatatcatgttggcatgttagttgagaaatctctcataaaagttaagactgttacattgcatgacttgactgaggacatgggtaaaaaatttgtcactcaaggatcagcaagagagctgggaagcaaaggaagctataatccaagttttggaagacaacagagtgagagtgagtgagactcatgaatggtttggtttcttacctttatgtatctttttttactatcatatgttaacatcataattgttttttttataatatgtaaatttct

SEQ ID NO: 9080 - DNA, 1075 bp, Glycine max
  Gm_smallRNAprecursor_1913
gtctggctatcatttcaaatatgggtacccaccttaccgatcttccttacactgtaatttttgttcgattaaagtttcacttgtctaattgaaaaattattaggtcgttctaaacaacaatttgttcatgtttcttaccaattcgttctaaacaacaacttcattaaaacttttttgtttgaaacagagatggatatgagtatgagttcattgggaggattgttgagcgggtctgcatcaagattaatcttactcatttacatgttgcgggttatttggttggactagagtcacaagtgccaagagccatgaagcttttggatgttggatctgatgatggtgtgcacatgatagagatccactgtataggtggaatagggaaaacaacattttagaatttgattgctaactgtttttgtggttcatgttttctttaagatgtgagagaaaaatcaaacaaacatggattacaacatttccagagcatccttctttcagaaataattaaactcataagtttaaaagaacatatgagctgaaagaattgagtaaggatgatgctcttcaattgcttactcaaaaaaagcttttaaaatgaaacaagttgatccaatacatgtggaggtcttaatggtgttgaaacatatgcatgaggccttccattgactttggaagtaataggttccaacttgttttgaaaaagtaagaagaagggaatatgctatcaaacaatatcaagaaattcctaataatcaaatcctagagatacttaaagtaagctttgatgcattggaagaagaagaaaaaagtgtttttcttgacattgcttgttgcttcaaaggatatgcattcatagaggttaaagatatacttgtgctcatcatggtgataacatgaaatatcatgttggcatgttagttgagaaatctctcataaaagttaagactgttacattgcatgacttgactgaggacatgggtaaaaaatttgtcactcaaggatcagcaagagagctgggaagcaaaggaagctataatccaagttttggaagacaacagagtgagagtgagtgaga

SEQ ID NO: 9081 - DNA, 1124 bp, Glycine max
  Gm_smallRNAprecursor_1914
cttacactgtaatttttgttcgattaaagtttcacttgtctaattgaaaaattattaggtcgttctaaacaacaatttgttcatgtttcttaccaattcgttctaaacaacaacttcattaaaacttttttgtttgaaacagagatggatatgagtatgagttcattgggaggattgttgagcgggtctgcatcaagattaatcttactcatttacatgttgcgggttatttggttggactagagtcacaagtgccaagagccatgaagcttttggatgttggatctgatgatggtgtgcacatgatagagatccactgtataggtggaatagggaaaacaacattttagaatttgattgctaactgtttttgtggttcatgttttctttaagatgtgagagaaaaatcaaacaaacatggattacaacatttccagagcatccttctttcagaaataattaaactcataagtttaaaagaacatatgagctgaaagaattgagtaaggatgatgctcttcaattgcttactcaaaaaaagcttttaaaatgaaacaagttgatccaatacatgtggaggtcttaatggtgttgaaacatatgcatgaggccttccattgactttggaagtaataggttccaacttgttttgaaaaagtaagaagaagggaatatgctatcaaacaatatcaagaaattcctaataatcaaatcctagagatacttaaagtaagctttgatgcattggaagaagaagaaaaaagtgtttttcttgacattgcttgttgcttcaaaggatatgcattcatagaggttaaagatatacttgtgctcatcatggtgataacatgaaatatcatgttggcatgttagttgagaaatctctcataaaagttaagactgttacattgcatgacttgactgaggacatgggtaaaaaatttgtcactcaaggatcagcaagagagctgggaagcaaaggaagctataatccaagttttggaagacaacagagtgagagtgagtgagactcatgaatggtttggtttcttacctttatgtatctttttttactatcatatgttaacatcataattgttttttttataatatgtaaatttctc

SEQ ID NO: 9082 - DNA, 1125 bp, Glycine max
  Gm_smallRNAprecursor_1915
cttacactgtaatttttgttcgattaaagtttcacttgtctaattgaaaaattattaggtcgttctaaacaacaatttgttcatgtttcttaccaattcgttctaaacaacaacttcattaaaacttttttgtttgaaacagagatggatatgagtatgagttcattgggaggattgttgagcgggtctgcatcaagattaatcttactcatttacatgttgcgggttatttggttggactagagtcacaagtgccaagagccatgaagcttttggatgttggatctgatgatggtgtgcacatgatagagatccactgtataggtggaatagggaaaacaacattttagaatttgattgctaactgtttttgtggttcatgttttctttaagatgtgagagaaaaatcaaacaaacatggattacaacatttccagagcatccttctttcagaaataattaaactcataagtttaaaagaacatatgagctgaaagaattgagtaaggatgatgctcttcaattgcttactcaaaaaaagcttttaaaatgaaacaagttgatccaatacatgtggaggtcttaatggtgttgaaacatatgcatgaggccttccattgactttggaagtaataggttccaacttgttttgaaaaagtaagaagaagggaatatgctatcaaacaatatcaagaaattcctaataatcaaatcctagagatacttaaagtaagctttgatgcattggaagaagaagaaaaaagtgtttttcttgacattgcttgttgcttcaaaggatatgcattcatagaggttaaagatatacttgtgctcatcatggtgataacatgaaatatcatgttggcatgttagttgagaaatctctcataaaagttaagactgttacattgcatgacttgactgaggacatgggtaaaaaatttgtcactcaaggatcagcaagagagctgggaagcaaaggaagctataatccaagttttggaagacaacagagtgagagtgagtgagactcatgaatggtttggtttcttacctttatgtatctttttttactatcatatgttaacatcataattgttttttttataatatgtaaatttctct

SEQ ID NO: 9083 - DNA, 1088 bp, Glycine max
  Gm_smallRNAprecursor_1916
aatttttgttcgattaaagtttcacttgtctaattgaaaaattattaggtcgttctaaacaacaatttgttcatgtttcttaccaattcgttctaaacaacaacttcattaaaacttttttgtttgaaacagagatggatatgagtatgagttcattgggaggattgttgagcgggtctgcatcaagattaatcttactcatttacatgttgcgggttatttggttggactagagtcacaagtgccaagagccatgaagcttttggatgttggatctgatgatggtgtgcacatgatagagatccactgtataggtggaatagggaaaacaacattttagaatttgattgctaactgtttttgtggttcatgttttctttaagatgtgagagaaaaatcaaacaaacatggattacaacatttccagagcatccttctttcagaaataattaaactcataagtttaaaagaacatatgagctgaaagaattgagtaaggatgatgctcttcaattgcttactcaaaaaaagcttttaaaatgaaacaagttgatccaatacatgtggaggtcttaatggtgttgaaacatatgcatgaggccttccattgactttggaagtaataggttccaacttgttttgaaaaagtaagaagaagggaatatgctatcaaacaatatcaagaaattcctaataatcaaatcctagagatacttaaagtaagctttgatgcattggaagaagaagaaaaaagtgtttttcttgacattgcttgttgcttcaaaggatatgcattcatagaggttaaagatatacttgtgctcatcatggtgataacatgaaatatcatgttggcatgttagttgagaaatctctcataaaagttaagactgttacattgcatgacttgactgaggacatgggtaaaaaatttgtcactcaaggatcagcaagagagctgggaagcaaaggaagctataatccaagttttggaagacaacagagtgagagtgagtgagactcatgaatggtttggtttcttacctttatgtatctttttttactatcatatgttaacatcataattg

SEQ ID NO: 9084 - DNA, 1215 bp, Glycine max
  Gm_smallRNAprecursor_1917
aatttttgttcgattaaagtttcacttgtctaattgaaaaattattaggtcgttctaaacaacaatttgttcatgtttcttaccaattcgttctaaacaacaacttcattaaaacttttttgtttgaaacagagatggatatgagtatgagttcattgggaggattgttgagcgggtctgcatcaagattaatcttactcatttacatgttgcgggttatttggttggactagagtcacaagtgccaagagccatgaagcttttggatgttggatctgatgatggtgtgcacatgatagagatccactgtataggtggaatagggaaaacaacattttagaatttgattgctaactgtttttgtggttcatgttttctttaagatgtgagagaaaaatcaaacaaacatggattacaacatttccagagcatccttctttcagaaataattaaactcataagtttaaaagaacatatgagctgaaagaattgagtaaggatgatgctcttcaattgcttactcaaaaaaagcttttaaaatgaaacaagttgatccaatacatgtggaggtcttaatggtgttgaaacatatgcatgaggccttccattgactttggaagtaataggttccaacttgttttgaaaaagtaagaagaagggaatatgctatcaaacaatatcaagaaattcctaataatcaaatcctagagatacttaaagtaagctttgatgcattggaagaagaagaaaaaagtgtttttcttgacattgcttgttgcttcaaaggatatgcattcatagaggttaaagatatacttgtgctcatcatggtgataacatgaaatatcatgttggcatgttagttgagaaatctctcataaaagttaagactgttacattgcatgacttgactgaggacatgggtaaaaaatttgtcactcaaggatcagcaagagagctgggaagcaaaggaagctataatccaagttttggaagacaacagagtgagagtgagtgagactcatgaatggtttggtttcttacctttatgtatctttttttactatcatatgttaacatcataattgttttttttataatatgtaaatttctctaaacatgtgtattgaagaagttttacactgtggttgatttctgcctttgtattgacagggaattggtgaacttgaaatcatatgtcttgatttctccata

SEQ ID NO: 9085 - DNA, 1104 bp, Glycine max
  Gm_smallRNAprecursor_1918
tttcacttgtctaattgaaaaattattaggtcgttctaaacaacaatttgttcatgtttcttaccaattcgttctaaacaacaacttcattaaaacttttttgtttgaaacagagatggatatgagtatgagttcattgggaggattgttgagcgggtctgcatcaagattaatcttactcatttacatgttgcgggttatttggttggactagagtcacaagtgccaagagccatgaagcttttggatgttggatctgatgatggtgtgcacatgatagagatccactgtataggtggaatagggaaaacaacattttagaatttgattgctaactgtttttgtggttcatgttttctttaagatgtgagagaaaaatcaaacaaacatggattacaacatttccagagcatccttctttcagaaataattaaactcataagtttaaaagaacatatgagctgaaagaattgagtaaggatgatgctcttcaattgcttactcaaaaaaagcttttaaaatgaaacaagttgatccaatacatgtggaggtcttaatggtgttgaaacatatgcatgaggccttccattgactttggaagtaataggttccaacttgttttgaaaaagtaagaagaagggaatatgctatcaaacaatatcaagaaattcctaataatcaaatcctagagatacttaaagtaagctttgatgcattggaagaagaagaaaaaagtgtttttcttgacattgcttgttgcttcaaaggatatgcattcatagaggttaaagatatacttgtgctcatcatggtgataacatgaaatatcatgttggcatgttagttgagaaatctctcataaaagttaagactgttacattgcatgacttgactgaggacatgggtaaaaaatttgtcactcaaggatcagcaagagagctgggaagcaaaggaagctataatccaagttttggaagacaacagagtgagagtgagtgagactcatgaatggtttggtttcttacctttatgtatctttttttactatcatatgttaacatcataattgttttttttataatatgtaaatttctctaaacatgt

SEQ ID NO: 9086 - DNA, 1128 bp, Glycine max
  Gm_smallRNAprecursor_1919
tcgttctaaacaacaacttcattaaaacttttttgtttgaaacagagatggatatgagtatgagttcattgggaggattgttgagcgggtctgcatcaagattaatcttactcatttacatgttgcgggttatttggttggactagagtcacaagtgccaagagccatgaagcttttggatgttggatctgatgatggtgtgcacatgatagagatccactgtataggtggaatagggaaaacaacattttagaatttgattgctaactgtttttgtggttcatgttttctttaagatgtgagagaaaaatcaaacaaacatggattacaacatttccagagcatccttctttcagaaataattaaactcataagtttaaaagaacatatgagctgaaagaattgagtaaggatgatgctcttcaattgcttactcaaaaaaagcttttaaaatgaaacaagttgatccaatacatgtggaggtcttaatggtgttgaaacatatgcatgaggccttccattgactttggaagtaataggttccaacttgttttgaaaaagtaagaagaagggaatatgctatcaaacaatatcaagaaattcctaataatcaaatcctagagatacttaaagtaagctttgatgcattggaagaagaagaaaaaagtgtttttcttgacattgcttgttgcttcaaaggatatgcattcatagaggttaaagatatacttgtgctcatcatggtgataacatgaaatatcatgttggcatgttagttgagaaatctctcataaaagttaagactgttacattgcatgacttgactgaggacatgggtaaaaaatttgtcactcaaggatcagcaagagagctgggaagcaaaggaagctataatccaagttttggaagacaacagagtgagagtgagtgagactcatgaatggtttggtttcttacctttatgtatctttttttactatcatatgttaacatcataattgttttttttataatatgtaaatttctctaaacatgtgtattgaagaagttttacactgtggttgatttctgcctttgtattgacagggaattggtgaacttgaaatcatatgtcttgatttctccata

SEQ ID NO: 9087 - DNA, 1127 bp, Glycine max
  Gm_smallRNAprecursor_1920
cgttctaaacaacaacttcattaaaacttttttgtttgaaacagagatggatatgagtatgagttcattgggaggattgttgagcgggtctgcatcaagattaatcttactcatttacatgttgcgggttatttggttggactagagtcacaagtgccaagagccatgaagcttttggatgttggatctgatgatggtgtgcacatgatagagatccactgtataggtggaatagggaaaacaacattttagaatttgattgctaactgtttttgtggttcatgttttctttaagatgtgagagaaaaatcaaacaaacatggattacaacatttccagagcatccttctttcagaaataattaaactcataagtttaaaagaacatatgagctgaaagaattgagtaaggatgatgctcttcaattgcttactcaaaaaaagcttttaaaatgaaacaagttgatccaatacatgtggaggtcttaatggtgttgaaacatatgcatgaggccttccattgactttggaagtaataggttccaacttgttttgaaaaagtaagaagaagggaatatgctatcaaacaatatcaagaaattcctaataatcaaatcctagagatacttaaagtaagctttgatgcattggaagaagaagaaaaaagtgtttttcttgacattgcttgttgcttcaaaggatatgcattcatagaggttaaagatatacttgtgctcatcatggtgataacatgaaatatcatgttggcatgttagttgagaaatctctcataaaagttaagactgttacattgcatgacttgactgaggacatgggtaaaaaatttgtcactcaaggatcagcaagagagctgggaagcaaaggaagctataatccaagttttggaagacaacagagtgagagtgagtgagactcatgaatggtttggtttcttacctttatgtatctttttttactatcatatgttaacatcataattgttttttttataatatgtaaatttctctaaacatgtgtattgaagaagttttacactgtggttgatttctgcctttgtattgacagggaattggtgaacttgaaatcatatgtcttgatttctccata

SEQ ID NO: 9088 - DNA, 1152 bp, Glycine max
  Gm_smallRNAprecursor_1921
aacttttttgtttgaaacagagatggatatgagtatgagttcattgggaggattgttgagcgggtctgcatcaagattaatcttactcatttacatgttgcgggttatttggttggactagagtcacaagtgccaagagccatgaagcttttggatgttggatctgatgatggtgtgcacatgatagagatccactgtataggtggaatagggaaaacaacattttagaatttgattgctaactgtttttgtggttcatgttttctttaagatgtgagagaaaaatcaaacaaacatggattacaacatttccagagcatccttctttcagaaataattaaactcataagtttaaaagaacatatgagctgaaagaattgagtaaggatgatgctcttcaattgcttactcaaaaaaagcttttaaaatgaaacaagttgatccaatacatgtggaggtcttaatggtgttgaaacatatgcatgaggccttccattgactttggaagtaataggttccaacttgttttgaaaaagtaagaagaagggaatatgctatcaaacaatatcaagaaattcctaataatcaaatcctagagatacttaaagtaagctttgatgcattggaagaagaagaaaaaagtgtttttcttgacattgcttgttgcttcaaaggatatgcattcatagaggttaaagatatacttgtgctcatcatggtgataacatgaaatatcatgttggcatgttagttgagaaatctctcataaaagttaagactgttacattgcatgacttgactgaggacatgggtaaaaaatttgtcactcaaggatcagcaagagagctgggaagcaaaggaagctataatccaagttttggaagacaacagagtgagagtgagtgagactcatgaatggtttggtttcttacctttatgtatctttttttactatcatatgttaacatcataattgttttttttataatatgtaaatttctctaaacatgtgtattgaagaagttttacactgtggttgatttctgcctttgtattgacagggaattggtgaacttgaaatcatatgtcttgatttctccatatttaccaaagaaatagtagaatggagtagaggacatgggtaaaaaaatt

SEQ ID NO: 9089 - DNA, 1154 bp, Glycine max
  Gm_smallRNAprecursor_1922
aacttttttgtttgaaacagagatggatatgagtatgagttcattgggaggattgttgagcgggtctgcatcaagattaatcttactcatttacatgttgcgggttatttggttggactagagtcacaagtgccaagagccatgaagcttttggatgttggatctgatgatggtgtgcacatgatagagatccactgtataggtggaatagggaaaacaacattttagaatttgattgctaactgtttttgtggttcatgttttctttaagatgtgagagaaaaatcaaacaaacatggattacaacatttccagagcatccttctttcagaaataattaaactcataagtttaaaagaacatatgagctgaaagaattgagtaaggatgatgctcttcaattgcttactcaaaaaaagcttttaaaatgaaacaagttgatccaatacatgtggaggtcttaatggtgttgaaacatatgcatgaggccttccattgactttggaagtaataggttccaacttgttttgaaaaagtaagaagaagggaatatgctatcaaacaatatcaagaaattcctaataatcaaatcctagagatacttaaagtaagctttgatgcattggaagaagaagaaaaaagtgtttttcttgacattgcttgttgcttcaaaggatatgcattcatagaggttaaagatatacttgtgctcatcatggtgataacatgaaatatcatgttggcatgttagttgagaaatctctcataaaagttaagactgttacattgcatgacttgactgaggacatgggtaaaaaatttgtcactcaaggatcagcaagagagctgggaagcaaaggaagctataatccaagttttggaagacaacagagtgagagtgagtgagactcatgaatggtttggtttcttacctttatgtatctttttttactatcatatgttaacatcataattgttttttttataatatgtaaatttctctaaacatgtgtattgaagaagttttacactgtggttgatttctgcctttgtattgacagggaattggtgaacttgaaatcatatgtcttgatttctccatatttaccaaagaaatagtagaatggagtagaggacatgggtaaaaaaattgt

SEQ ID NO: 9090 - DNA, 1148 bp, Glycine max
  Gm_smallRNAprecursor_1923
tttttgtttgaaacagagatggatatgagtatgagttcattgggaggattgttgagcgggtctgcatcaagattaatcttactcatttacatgttgcgggttatttggttggactagagtcacaagtgccaagagccatgaagcttttggatgttggatctgatgatggtgtgcacatgatagagatccactgtataggtggaatagggaaaacaacattttagaatttgattgctaactgtttttgtggttcatgttttctttaagatgtgagagaaaaatcaaacaaacatggattacaacatttccagagcatccttctttcagaaataattaaactcataagtttaaaagaacatatgagctgaaagaattgagtaaggatgatgctcttcaattgcttactcaaaaaaagcttttaaaatgaaacaagttgatccaatacatgtggaggtcttaatggtgttgaaacatatgcatgaggccttccattgactttggaagtaataggttccaacttgttttgaaaaagtaagaagaagggaatatgctatcaaacaatatcaagaaattcctaataatcaaatcctagagatacttaaagtaagctttgatgcattggaagaagaagaaaaaagtgtttttcttgacattgcttgttgcttcaaaggatatgcattcatagaggttaaagatatacttgtgctcatcatggtgataacatgaaatatcatgttggcatgttagttgagaaatctctcataaaagttaagactgttacattgcatgacttgactgaggacatgggtaaaaaatttgtcactcaaggatcagcaagagagctgggaagcaaaggaagctataatccaagttttggaagacaacagagtgagagtgagtgagactcatgaatggtttggtttcttacctttatgtatctttttttactatcatatgttaacatcataattgttttttttataatatgtaaatttctctaaacatgtgtattgaagaagttttacactgtggttgatttctgcctttgtattgacagggaattggtgaacttgaaatcatatgtcttgatttctccatatttaccaaagaaatagtagaatggagtagaggacatgggtaaaaaaatt

SEQ ID NO: 9091 - DNA, 1087 bp, Glycine max
  Gm_smallRNAprecursor_1924
tttgtttgaaacagagatggatatgagtatgagttcattgggaggattgttgagcgggtctgcatcaagattaatcttactcatttacatgttgcgggttatttggttggactagagtcacaagtgccaagagccatgaagcttttggatgttggatctgatgatggtgtgcacatgatagagatccactgtataggtggaatagggaaaacaacattttagaatttgattgctaactgtttttgtggttcatgttttctttaagatgtgagagaaaaatcaaacaaacatggattacaacatttccagagcatccttctttcagaaataattaaactcataagtttaaaagaacatatgagctgaaagaattgagtaaggatgatgctcttcaattgcttactcaaaaaaagcttttaaaatgaaacaagttgatccaatacatgtggaggtcttaatggtgttgaaacatatgcatgaggccttccattgactttggaagtaataggttccaacttgttttgaaaaagtaagaagaagggaatatgctatcaaacaatatcaagaaattcctaataatcaaatcctagagatacttaaagtaagctttgatgcattggaagaagaagaaaaaagtgtttttcttgacattgcttgttgcttcaaaggatatgcattcatagaggttaaagatatacttgtgctcatcatggtgataacatgaaatatcatgttggcatgttagttgagaaatctctcataaaagttaagactgttacattgcatgacttgactgaggacatgggtaaaaaatttgtcactcaaggatcagcaagagagctgggaagcaaaggaagctataatccaagttttggaagacaacagagtgagagtgagtgagactcatgaatggtttggtttcttacctttatgtatctttttttactatcatatgttaacatcataattgttttttttataatatgtaaatttctctaaacatgtgtattgaagaagttttacactgtggttgatttctgcctttgtattgacagggaattggtgaacttgaaatcatatgtcttga

SEQ ID NO: 9092 - DNA, 1097 bp, Glycine max
  Gm_smallRNAprecursor_1925
tttgtttgaaacagagatggatatgagtatgagttcattgggaggattgttgagcgggtctgcatcaagattaatcttactcatttacatgttgcgggttatttggttggactagagtcacaagtgccaagagccatgaagcttttggatgttggatctgatgatggtgtgcacatgatagagatccactgtataggtggaatagggaaaacaacattttagaatttgattgctaactgtttttgtggttcatgttttctttaagatgtgagagaaaaatcaaacaaacatggattacaacatttccagagcatccttctttcagaaataattaaactcataagtttaaaagaacatatgagctgaaagaattgagtaaggatgatgctcttcaattgcttactcaaaaaaagcttttaaaatgaaacaagttgatccaatacatgtggaggtcttaatggtgttgaaacatatgcatgaggccttccattgactttggaagtaataggttccaacttgttttgaaaaagtaagaagaagggaatatgctatcaaacaatatcaagaaattcctaataatcaaatcctagagatacttaaagtaagctttgatgcattggaagaagaagaaaaaagtgtttttcttgacattgcttgttgcttcaaaggatatgcattcatagaggttaaagatatacttgtgctcatcatggtgataacatgaaatatcatgttggcatgttagttgagaaatctctcataaaagttaagactgttacattgcatgacttgactgaggacatgggtaaaaaatttgtcactcaaggatcagcaagagagctgggaagcaaaggaagctataatccaagttttggaagacaacagagtgagagtgagtgagactcatgaatggtttggtttcttacctttatgtatctttttttactatcatatgttaacatcataattgttttttttataatatgtaaatttctctaaacatgtgtattgaagaagttttacactgtggttgatttctgcctttgtattgacagggaattggtgaacttgaaatcatatgtcttgatttctccata

SEQ ID NO: 9093 - DNA, 1062 bp, Glycine max
  Gm_smallRNAprecursor_1926
tttgaaacagagatggatatgagtatgagttcattgggaggattgttgagcgggtctgcatcaagattaatcttactcatttacatgttgcgggttatttggttggactagagtcacaagtgccaagagccatgaagcttttggatgttggatctgatgatggtgtgcacatgatagagatccactgtataggtggaatagggaaaacaacattttagaatttgattgctaactgtttttgtggttcatgttttctttaagatgtgagagaaaaatcaaacaaacatggattacaacatttccagagcatccttctttcagaaataattaaactcataagtttaaaagaacatatgagctgaaagaattgagtaaggatgatgctcttcaattgcttactcaaaaaaagcttttaaaatgaaacaagttgatccaatacatgtggaggtcttaatggtgttgaaacatatgcatgaggccttccattgactttggaagtaataggttccaacttgttttgaaaaagtaagaagaagggaatatgctatcaaacaatatcaagaaattcctaataatcaaatcctagagatacttaaagtaagctttgatgcattggaagaagaagaaaaaagtgtttttcttgacattgcttgttgcttcaaaggatatgcattcatagaggttaaagatatacttgtgctcatcatggtgataacatgaaatatcatgttggcatgttagttgagaaatctctcataaaagttaagactgttacattgcatgacttgactgaggacatgggtaaaaaatttgtcactcaaggatcagcaagagagctgggaagcaaaggaagctataatccaagttttggaagacaacagagtgagagtgagtgagactcatgaatggtttggtttcttacctttatgtatctttttttactatcatatgttaacatcataattgttttttttataatatgtaaatttctctaaacatgtgtattgaagaagttttacactgtggttgatttctgcctttgtattgacagggaattggtga

SEQ ID NO: 9094 - DNA, 1040 bp, Glycine max
  Gm_smallRNAprecursor_1927
ggaggattgttgagcgggtctgcatcaagattaatcttactcatttacatgttgcgggttatttggttggactagagtcacaagtgccaagagccatgaagcttttggatgttggatctgatgatggtgtgcacatgatagagatccactgtataggtggaatagggaaaacaacattttagaatttgattgctaactgtttttgtggttcatgttttctttaagatgtgagagaaaaatcaaacaaacatggattacaacatttccagagcatccttctttcagaaataattaaactcataagtttaaaagaacatatgagctgaaagaattgagtaaggatgatgctcttcaattgcttactcaaaaaaagcttttaaaatgaaacaagttgatccaatacatgtggaggtcttaatggtgttgaaacatatgcatgaggccttccattgactttggaagtaataggttccaacttgttttgaaaaagtaagaagaagggaatatgctatcaaacaatatcaagaaattcctaataatcaaatcctagagatacttaaagtaagctttgatgcattggaagaagaagaaaaaagtgtttttcttgacattgcttgttgcttcaaaggatatgcattcatagaggttaaagatatacttgtgctcatcatggtgataacatgaaatatcatgttggcatgttagttgagaaatctctcataaaagttaagactgttacattgcatgacttgactgaggacatgggtaaaaaatttgtcactcaaggatcagcaagagagctgggaagcaaaggaagctataatccaagttttggaagacaacagagtgagagtgagtgagactcatgaatggtttggtttcttacctttatgtatctttttttactatcatatgttaacatcataattgttttttttataatatgtaaatttctctaaacatgtgtattgaagaagttttacactgtggttgatttctgcctttgtattgacagggaattggtgaacttgaaatcatat

SEQ ID NO: 9095 - DNA, 1106 bp, Glycine max
  Gm_smallRNAprecursor_1928
ggaggattgttgagcgggtctgcatcaagattaatcttactcatttacatgttgcgggttatttggttggactagagtcacaagtgccaagagccatgaagcttttggatgttggatctgatgatggtgtgcacatgatagagatccactgtataggtggaatagggaaaacaacattttagaatttgattgctaactgtttttgtggttcatgttttctttaagatgtgagagaaaaatcaaacaaacatggattacaacatttccagagcatccttctttcagaaataattaaactcataagtttaaaagaacatatgagctgaaagaattgagtaaggatgatgctcttcaattgcttactcaaaaaaagcttttaaaatgaaacaagttgatccaatacatgtggaggtcttaatggtgttgaaacatatgcatgaggccttccattgactttggaagtaataggttccaacttgttttgaaaaagtaagaagaagggaatatgctatcaaacaatatcaagaaattcctaataatcaaatcctagagatacttaaagtaagctttgatgcattggaagaagaagaaaaaagtgtttttcttgacattgcttgttgcttcaaaggatatgcattcatagaggttaaagatatacttgtgctcatcatggtgataacatgaaatatcatgttggcatgttagttgagaaatctctcataaaagttaagactgttacattgcatgacttgactgaggacatgggtaaaaaatttgtcactcaaggatcagcaagagagctgggaagcaaaggaagctataatccaagttttggaagacaacagagtgagagtgagtgagactcatgaatggtttggtttcttacctttatgtatctttttttactatcatatgttaacatcataattgttttttttataatatgtaaatttctctaaacatgtgtattgaagaagttttacactgtggttgatttctgcctttgtattgacagggaattggtgaacttgaaatcatatgtcttgatttctccatatttaccaaagaaatagtagaatggagtagaggacatgggtaaaaaaatt

SEQ ID NO: 9096 - DNA, 1127 bp, Glycine max
  Gm_smallRNAprecursor_1929
ggaggattgttgagcgggtctgcatcaagattaatcttactcatttacatgttgcgggttatttggttggactagagtcacaagtgccaagagccatgaagcttttggatgttggatctgatgatggtgtgcacatgatagagatccactgtataggtggaatagggaaaacaacattttagaatttgattgctaactgtttttgtggttcatgttttctttaagatgtgagagaaaaatcaaacaaacatggattacaacatttccagagcatccttctttcagaaataattaaactcataagtttaaaagaacatatgagctgaaagaattgagtaaggatgatgctcttcaattgcttactcaaaaaaagcttttaaaatgaaacaagttgatccaatacatgtggaggtcttaatggtgttgaaacatatgcatgaggccttccattgactttggaagtaataggttccaacttgttttgaaaaagtaagaagaagggaatatgctatcaaacaatatcaagaaattcctaataatcaaatcctagagatacttaaagtaagctttgatgcattggaagaagaagaaaaaagtgtttttcttgacattgcttgttgcttcaaaggatatgcattcatagaggttaaagatatacttgtgctcatcatggtgataacatgaaatatcatgttggcatgttagttgagaaatctctcataaaagttaagactgttacattgcatgacttgactgaggacatgggtaaaaaatttgtcactcaaggatcagcaagagagctgggaagcaaaggaagctataatccaagttttggaagacaacagagtgagagtgagtgagactcatgaatggtttggtttcttacctttatgtatctttttttactatcatatgttaacatcataattgttttttttataatatgtaaatttctctaaacatgtgtattgaagaagttttacactgtggttgatttctgcctttgtattgacagggaattggtgaacttgaaatcatatgtcttgatttctccatatttaccaaagaaatagtagaatggagtagaggacatgggtaaaaaaattgtcactcaagaatcaccaaga

SEQ ID NO: 9097 - DNA, 1128 bp, Glycine max
  Gm_smallRNAprecursor_1930
ggaggattgttgagcgggtctgcatcaagattaatcttactcatttacatgttgcgggttatttggttggactagagtcacaagtgccaagagccatgaagcttttggatgttggatctgatgatggtgtgcacatgatagagatccactgtataggtggaatagggaaaacaacattttagaatttgattgctaactgtttttgtggttcatgttttctttaagatgtgagagaaaaatcaaacaaacatggattacaacatttccagagcatccttctttcagaaataattaaactcataagtttaaaagaacatatgagctgaaagaattgagtaaggatgatgctcttcaattgcttactcaaaaaaagcttttaaaatgaaacaagttgatccaatacatgtggaggtcttaatggtgttgaaacatatgcatgaggccttccattgactttggaagtaataggttccaacttgttttgaaaaagtaagaagaagggaatatgctatcaaacaatatcaagaaattcctaataatcaaatcctagagatacttaaagtaagctttgatgcattggaagaagaagaaaaaagtgtttttcttgacattgcttgttgcttcaaaggatatgcattcatagaggttaaagatatacttgtgctcatcatggtgataacatgaaatatcatgttggcatgttagttgagaaatctctcataaaagttaagactgttacattgcatgacttgactgaggacatgggtaaaaaatttgtcactcaaggatcagcaagagagctgggaagcaaaggaagctataatccaagttttggaagacaacagagtgagagtgagtgagactcatgaatggtttggtttcttacctttatgtatctttttttactatcatatgttaacatcataattgttttttttataatatgtaaatttctctaaacatgtgtattgaagaagttttacactgtggttgatttctgcctttgtattgacagggaattggtgaacttgaaatcatatgtcttgatttctccatatttaccaaagaaatagtagaatggagtagaggacatgggtaaaaaaattgtcactcaagaatcaccaagag

SEQ ID NO: 9098 - DNA, 1197 bp, Glycine max
  Gm_smallRNAprecursor_1931
ggaggattgttgagcgggtctgcatcaagattaatcttactcatttacatgttgcgggttatttggttggactagagtcacaagtgccaagagccatgaagcttttggatgttggatctgatgatggtgtgcacatgatagagatccactgtataggtggaatagggaaaacaacattttagaatttgattgctaactgtttttgtggttcatgttttctttaagatgtgagagaaaaatcaaacaaacatggattacaacatttccagagcatccttctttcagaaataattaaactcataagtttaaaagaacatatgagctgaaagaattgagtaaggatgatgctcttcaattgcttactcaaaaaaagcttttaaaatgaaacaagttgatccaatacatgtggaggtcttaatggtgttgaaacatatgcatgaggccttccattgactttggaagtaataggttccaacttgttttgaaaaagtaagaagaagggaatatgctatcaaacaatatcaagaaattcctaataatcaaatcctagagatacttaaagtaagctttgatgcattggaagaagaagaaaaaagtgtttttcttgacattgcttgttgcttcaaaggatatgcattcatagaggttaaagatatacttgtgctcatcatggtgataacatgaaatatcatgttggcatgttagttgagaaatctctcataaaagttaagactgttacattgcatgacttgactgaggacatgggtaaaaaatttgtcactcaaggatcagcaagagagctgggaagcaaaggaagctataatccaagttttggaagacaacagagtgagagtgagtgagactcatgaatggtttggtttcttacctttatgtatctttttttactatcatatgttaacatcataattgttttttttataatatgtaaatttctctaaacatgtgtattgaagaagttttacactgtggttgatttctgcctttgtattgacagggaattggtgaacttgaaatcatatgtcttgatttctccatatttaccaaagaaatagtagaatggagtagaggacatgggtaaaaaaattgtcactcaagaatcaccaagagagctggggaagcaagtagattacagttagtggaagctataatccaagttttggaagacaacaccgcgag

SEQ ID NO: 9099 - DNA, 1063 bp, Glycine max
  Gm_smallRNAprecursor_1932
gattgttgagcgggtctgcatcaagattaatcttactcatttacatgttgcgggttatttggttggactagagtcacaagtgccaagagccatgaagcttttggatgttggatctgatgatggtgtgcacatgatagagatccactgtataggtggaatagggaaaacaacattttagaatttgattgctaactgtttttgtggttcatgttttctttaagatgtgagagaaaaatcaaacaaacatggattacaacatttccagagcatccttctttcagaaataattaaactcataagtttaaaagaacatatgagctgaaagaattgagtaaggatgatgctcttcaattgcttactcaaaaaaagcttttaaaatgaaacaagttgatccaatacatgtggaggtcttaatggtgttgaaacatatgcatgaggccttccattgactttggaagtaataggttccaacttgttttgaaaaagtaagaagaagggaatatgctatcaaacaatatcaagaaattcctaataatcaaatcctagagatacttaaagtaagctttgatgcattggaagaagaagaaaaaagtgtttttcttgacattgcttgttgcttcaaaggatatgcattcatagaggttaaagatatacttgtgctcatcatggtgataacatgaaatatcatgttggcatgttagttgagaaatctctcataaaagttaagactgttacattgcatgacttgactgaggacatgggtaaaaaatttgtcactcaaggatcagcaagagagctgggaagcaaaggaagctataatccaagttttggaagacaacagagtgagagtgagtgagactcatgaatggtttggtttcttacctttatgtatctttttttactatcatatgttaacatcataattgttttttttataatatgtaaatttctctaaacatgtgtattgaagaagttttacactgtggttgatttctgcctttgtattgacagggaattggtgaacttgaaatcatatgtcttgatttctccatatttaccaaag

SEQ ID NO: 9100 - DNA, 1102 bp, Glycine max
  Gm_smallRNAprecursor_1933
caagattaatcttactcatttacatgttgcgggttatttggttggactagagtcacaagtgccaagagccatgaagcttttggatgttggatctgatgatggtgtgcacatgatagagatccactgtataggtggaatagggaaaacaacattttagaatttgattgctaactgtttttgtggttcatgttttctttaagatgtgagagaaaaatcaaacaaacatggattacaacatttccagagcatccttctttcagaaataattaaactcataagtttaaaagaacatatgagctgaaagaattgagtaaggatgatgctcttcaattgcttactcaaaaaaagcttttaaaatgaaacaagttgatccaatacatgtggaggtcttaatggtgttgaaacatatgcatgaggccttccattgactttggaagtaataggttccaacttgttttgaaaaagtaagaagaagggaatatgctatcaaacaatatcaagaaattcctaataatcaaatcctagagatacttaaagtaagctttgatgcattggaagaagaagaaaaaagtgtttttcttgacattgcttgttgcttcaaaggatatgcattcatagaggttaaagatatacttgtgctcatcatggtgataacatgaaatatcatgttggcatgttagttgagaaatctctcataaaagttaagactgttacattgcatgacttgactgaggacatgggtaaaaaatttgtcactcaaggatcagcaagagagctgggaagcaaaggaagctataatccaagttttggaagacaacagagtgagagtgagtgagactcatgaatggtttggtttcttacctttatgtatctttttttactatcatatgttaacatcataattgttttttttataatatgtaaatttctctaaacatgtgtattgaagaagttttacactgtggttgatttctgcctttgtattgacagggaattggtgaacttgaaatcatatgtcttgatttctccatatttaccaaagaaatagtagaatggagtagaggacatgggtaaaaaaattgtcactcaagaatcaccaaga

SEQ ID NO: 9101 - DNA, 1060 bp, Glycine max
  Gm_smallRNAprecursor_1934
acatgttgcgggttatttggttggactagagtcacaagtgccaagagccatgaagcttttggatgttggatctgatgatggtgtgcacatgatagagatccactgtataggtggaatagggaaaacaacattttagaatttgattgctaactgtttttgtggttcatgttttctttaagatgtgagagaaaaatcaaacaaacatggattacaacatttccagagcatccttctttcagaaataattaaactcataagtttaaaagaacatatgagctgaaagaattgagtaaggatgatgctcttcaattgcttactcaaaaaaagcttttaaaatgaaacaagttgatccaatacatgtggaggtcttaatggtgttgaaacatatgcatgaggccttccattgactttggaagtaataggttccaacttgttttgaaaaagtaagaagaagggaatatgctatcaaacaatatcaagaaattcctaataatcaaatcctagagatacttaaagtaagctttgatgcattggaagaagaagaaaaaagtgtttttcttgacattgcttgttgcttcaaaggatatgcattcatagaggttaaagatatacttgtgctcatcatggtgataacatgaaatatcatgttggcatgttagttgagaaatctctcataaaagttaagactgttacattgcatgacttgactgaggacatgggtaaaaaatttgtcactcaaggatcagcaagagagctgggaagcaaaggaagctataatccaagttttggaagacaacagagtgagagtgagtgagactcatgaatggtttggtttcttacctttatgtatctttttttactatcatatgttaacatcataattgttttttttataatatgtaaatttctctaaacatgtgtattgaagaagttttacactgtggttgatttctgcctttgtattgacagggaattggtgaacttgaaatcatatgtcttgatttctccatatttaccaaagaaatagtagaatggagtagaggacatgggtaaaaaaatt

SEQ ID NO: 9102 - DNA, 1151 bp, Glycine max
  Gm_smallRNAprecursor_1935
acatgttgcgggttatttggttggactagagtcacaagtgccaagagccatgaagcttttggatgttggatctgatgatggtgtgcacatgatagagatccactgtataggtggaatagggaaaacaacattttagaatttgattgctaactgtttttgtggttcatgttttctttaagatgtgagagaaaaatcaaacaaacatggattacaacatttccagagcatccttctttcagaaataattaaactcataagtttaaaagaacatatgagctgaaagaattgagtaaggatgatgctcttcaattgcttactcaaaaaaagcttttaaaatgaaacaagttgatccaatacatgtggaggtcttaatggtgttgaaacatatgcatgaggccttccattgactttggaagtaataggttccaacttgttttgaaaaagtaagaagaagggaatatgctatcaaacaatatcaagaaattcctaataatcaaatcctagagatacttaaagtaagctttgatgcattggaagaagaagaaaaaagtgtttttcttgacattgcttgttgcttcaaaggatatgcattcatagaggttaaagatatacttgtgctcatcatggtgataacatgaaatatcatgttggcatgttagttgagaaatctctcataaaagttaagactgttacattgcatgacttgactgaggacatgggtaaaaaatttgtcactcaaggatcagcaagagagctgggaagcaaaggaagctataatccaagttttggaagacaacagagtgagagtgagtgagactcatgaatggtttggtttcttacctttatgtatctttttttactatcatatgttaacatcataattgttttttttataatatgtaaatttctctaaacatgtgtattgaagaagttttacactgtggttgatttctgcctttgtattgacagggaattggtgaacttgaaatcatatgtcttgatttctccatatttaccaaagaaatagtagaatggagtagaggacatgggtaaaaaaattgtcactcaagaatcaccaagagagctggggaagcaagtagattacagttagtggaagctataatccaagttttggaagacaacaccgcgag

SEQ ID NO: 9103 - DNA, 1109 bp, Glycine max
  Gm_smallRNAprecursor_1936
tttggtccttgtatttttctcattcaaaagaagaagagaaatcaaatgatccaaccatgtcaaaaaaatttttaaaaaaaatacataagtactcactcacttttagtatagtcctttcaagcttgacactttgaagaagccttcataaggtaactgacttgtttaataatggaaacaaggttagaaagtaaaagggtaaaccatagtgtatatcttcataggaaattttaacaaaccttttattatatatacaagtaaccttacagctggaaattctccaatcttggaagagttatctgtaaatcaaaaagccttcttcggtggtatctgatagcaagatgcaaaactagaaagcagcatatatatacagtaagcagaagaagattgtacaaattaaaataatttaaacagaaagccttaccaatcctatgaagatgaggatcttcataaaacaaacgcaaattaagtagttgtattgagtagtagcaaatgttggctggggggaatgaagcctggtccgagaatcatttagggtataaattaatttccattaatttatataccctggaatttaactgaaacactttcatatatatctccatatcatgacctcgagccagacaacattcctctcaacataacctttgcagggctaacttacacacttgtaaccaaacatatacacataataatgcatatatataacacaacaccacctttggcacttgatgaacacaaatccaagaagatatgaagccccccaaaaaacacgagctttgaggggaatgaagcctggtccgaagccttatagttcttgccagtgagaacctcctttgagaaaaagcctcgagccagccaacattcccctcaacactactactaacccatctcactcaaaaccctaacccgcttagaggttcttatatatagacaaagcaagagagagagaaagagagagcactgactcacactagctagctacacttatggcgctttttagctacccattcagatgttttttgttcccaaattagcttgtgcaaaagggcatttaaactaactgctatggtcaaagataaaattaaaactcataagtaaacaaaaccaaa

SEQ ID NO: 9104 - DNA, 1109 bp, Glycine max; identical to SEQ ID NO: 9103
  Gm_smallRNAprecursor_1937

SEQ ID NO: 9105 - DNA, 1110 bp, Glycine max
  Gm_smallRNAprecursor_1938
tttggtccttgtatttttctcattcaaaagaagaagagaaatcaaatgatccaaccatgtcaaaaaaatttttaaaaaaaatacataagtactcactcacttttagtatagtcctttcaagcttgacactttgaagaagccttcataaggtaactgacttgtttaataatggaaacaaggttagaaagtaaaagggtaaaccatagtgtatatcttcataggaaattttaacaaaccttttattatatatacaagtaaccttacagctggaaattctccaatcttggaagagttatctgtaaatcaaaaagccttcttcggtggtatctgatagcaagatgcaaaactagaaagcagcatatatatacagtaagcagaagaagattgtacaaattaaaataatttaaacagaaagccttaccaatcctatgaagatgaggatcttcataaaacaaacgcaaattaagtagttgtattgagtagtagcaaatgttggctggggggaatgaagcctggtccgagaatcatttagggtataaattaatttccattaatttatataccctggaatttaactgaaacactttcatatatatctccatatcatgacctcgagccagacaacattcctctcaacataacctttgcagggctaacttacacacttgtaaccaaacatatacacataataatgcatatatataacacaacaccacctttggcacttgatgaacacaaatccaagaagatatgaagccccccaaaaaacacgagctttgaggggaatgaagcctggtccgaagccttatagttcttgccagtgagaacctcctttgagaaaaagcctcgagccagccaacattcccctcaacactactactaacccatctcactcaaaaccctaacccgcttagaggttcttatatatagacaaagcaagagagagagaaagagagagcactgactcacactagctagctacacttatggcgctttttagctacccattcagatgttttttgttcccaaattagcttgtgcaaaagggcatttaaactaactgctatggtcaaagataaaattaaaactcataagtaaacaaaaccaaaa

SEQ ID NO: 9106 - DNA, 1110 bp, Glycine max; identical to SEQ ID NO: 9105
  Gm_smallRNAprecursor_1939

SEQ ID NO: 9107 - DNA, 1111 bp, Glycine max
  Gm_smallRNAprecursor_1940
tttggtccttgtatttttctcattcaaaagaagaagagaaatcaaatgatccaaccatgtcaaaaaaatttttaaaaaaaatacataagtactcactcacttttagtatagtcctttcaagcttgacactttgaagaagccttcataaggtaactgacttgtttaataatggaaacaaggttagaaagtaaaagggtaaaccatagtgtatatcttcataggaaattttaacaaaccttttattatatatacaagtaaccttacagctggaaattctccaatcttggaagagttatctgtaaatcaaaaagccttcttcggtggtatctgatagcaagatgcaaaactagaaagcagcatatatatacagtaagcagaagaagattgtacaaattaaaataatttaaacagaaagccttaccaatcctatgaagatgaggatcttcataaaacaaacgcaaattaagtagttgtattgagtagtagcaaatgttggctggggggaatgaagcctggtccgagaatcatttagggtataaattaatttccattaatttatataccctggaatttaactgaaacactttcatatatatctccatatcatgacctcgagccagacaacattcctctcaacataacctttgcagggctaacttacacacttgtaaccaaacatatacacataataatgcatatatataacacaacaccacctttggcacttgatgaacacaaatccaagaagatatgaagccccccaaaaaacacgagctttgaggggaatgaagcctggtccgaagccttatagttcttgccagtgagaacctcctttgagaaaaagcctcgagccagccaacattcccctcaacactactactaacccatctcactcaaaaccctaacccgcttagaggttcttatatatagacaaagcaagagagagagaaagagagagcactgactcacactagctagctacacttatggcgctttttagctacccattcagatgttttttgttcccaaattagcttgtgcaaaagggcatttaaactaactgctatggtcaaagataaaattaaaactcataagtaaacaaaaccaaaag

SEQ ID NO: 9108 - DNA, 1173 bp, Glycine max
  Gm_smallRNAprecursor_1941
tagtcctttcaagcttgacactttgaagaagccttcataaggtaactgacttgtttaataatggaaacaaggttagaaagtaaaagggtaaaccatagtgtatatcttcataggaaattttaacaaaccttttattatatatacaagtaaccttacagctggaaattctccaatcttggaagagttatctgtaaatcaaaaagccttcttcggtggtatctgatagcaagatgcaaaactagaaagcagcatatatatacagtaagcagaagaagattgtacaaattaaaataatttaaacagaaagccttaccaatcctatgaagatgaggatcttcataaaacaaacgcaaattaagtagttgtattgagtagtagcaaatgttggctggggggaatgaagcctggtccgagaatcatttagggtataaattaatttccattaatttatataccctggaatttaactgaaacactttcatatatatctccatatcatgacctcgagccagacaacattcctctcaacataacctttgcagggctaacttacacacttgtaaccaaacatatacacataataatgcatatatataacacaacaccacctttggcacttgatgaacacaaatccaagaagatatgaagccccccaaaaaacacgagctttgaggggaatgaagcctggtccgaagccttatagttcttgccagtgagaacctcctttgagaaaaagcctcgagccagccaacattcccctcaacactactactaacccatctcactcaaaaccctaacccgcttagaggttcttatatatagacaaagcaagagagagagaaagagagagcactgactcacactagctagctacacttatggcgctttttagctacccattcagatgttttttgttcccaaattagcttgtgcaaaagggcatttaaactaactgctatggtcaaagataaaattaaaactcataagtaaacaaaaccaaaagcactacttgagcagacaagaccaccaccaccccacaaaacaaaaagactgagattgaggagaggcccctccgtccttactatttgtaattttatacaaatacaaaaaacaaattagtaaaaaaagaagtgtatgatgcataatgcagagtgtagtagtaggctaggctta

SEQ ID NO: 9109 - DNA, 1173 bp, Glycine max; identical to SEQ ID NO: 9108
  Gm_smallRNAprecursor_1942

SEQ ID NO: 9110 - DNA, 1172 bp, Glycine max
  Gm_smallRNAprecursor_1943
agtcctttcaagcttgacactttgaagaagccttcataaggtaactgacttgtttaataatggaaacaaggttagaaagtaaaagggtaaaccatagtgtatatcttcataggaaattttaacaaaccttttattatatatacaagtaaccttacagctggaaattctccaatcttggaagagttatctgtaaatcaaaaagccttcttcggtggtatctgatagcaagatgcaaaactagaaagcagcatatatatacagtaagcagaagaagattgtacaaattaaaataatttaaacagaaagccttaccaatcctatgaagatgaggatcttcataaaacaaacgcaaattaagtagttgtattgagtagtagcaaatgttggctggggggaatgaagcctggtccgagaatcatttagggtataaattaatttccattaatttatataccctggaatttaactgaaacactttcatatatatctccatatcatgacctcgagccagacaacattcctctcaacataacctttgcagggctaacttacacacttgtaaccaaacatatacacataataatgcatatatataacacaacaccacctttggcacttgatgaacacaaatccaagaagatatgaagccccccaaaaaacacgagctttgaggggaatgaagcctggtccgaagccttatagttcttgccagtgagaacctcctttgagaaaaagcctcgagccagccaacattcccctcaacactactactaacccatctcactcaaaaccctaacccgcttagaggttcttatatatagacaaagcaagagagagagaaagagagagcactgactcacactagctagctacacttatggcgctttttagctacccattcagatgttttttgttcccaaattagcttgtgcaaaagggcatttaaactaactgctatggtcaaagataaaattaaaactcataagtaaacaaaaccaaaagcactacttgagcagacaagaccaccaccaccccacaaaacaaaaagactgagattgaggagaggcccctccgtccttactatttgtaattttatacaaatacaaaaaacaaattagtaaaaaaagaagtgtatgatgcataatgcagagtgtagtagtaggctaggctta

SEQ ID NO: 9111 - DNA, 1172 bp, Glycine max; identical to SEQ ID NO: 9110
  Gm_smallRNAprecursor_1944

SEQ ID NO: 9112 - DNA, 1171 bp, Glycine max
  Gm_smallRNAprecursor_1945
gtcctttcaagcttgacactttgaagaagccttcataaggtaactgacttgtttaataatggaaacaaggttagaaagtaaaagggtaaaccatagtgtatatcttcataggaaattttaacaaaccttttattatatatacaagtaaccttacagctggaaattctccaatcttggaagagttatctgtaaatcaaaaagccttcttcggtggtatctgatagcaagatgcaaaactagaaagcagcatatatatacagtaagcagaagaagattgtacaaattaaaataatttaaacagaaagccttaccaatcctatgaagatgaggatcttcataaaacaaacgcaaattaagtagttgtattgagtagtagcaaatgttggctggggggaatgaagcctggtccgagaatcatttagggtataaattaatttccattaatttatataccctggaatttaactgaaacactttcatatatatctccatatcatgacctcgagccagacaacattcctctcaacataacctttgcagggctaacttacacacttgtaaccaaacatatacacataataatgcatatatataacacaacaccacctttggcacttgatgaacacaaatccaagaagatatgaagccccccaaaaaacacgagctttgaggggaatgaagcctggtccgaagccttatagttcttgccagtgagaacctcctttgagaaaaagcctcgagccagccaacattcccctcaacactactactaacccatctcactcaaaaccctaacccgcttagaggttcttatatatagacaaagcaagagagagagaaagagagagcactgactcacactagctagctacacttatggcgctttttagctacccattcagatgttttttgttcccaaattagcttgtgcaaaagggcatttaaactaactgctatggtcaaagataaaattaaaactcataagtaaacaaaaccaaaagcactacttgagcagacaagaccaccaccaccccacaaaacaaaaagactgagattgaggagaggcccctccgtccttactatttgtaattttatacaaatacaaaaaacaaattagtaaaaaaagaagtgtatgatgcataatgcagagtgtagtagtaggctaggctta

SEQ ID NO: 9113 - DNA, 1171 bp, Glycine max; identical to SEQ ID NO: 9112
  Gm_smallRNAprecursor_1946

SEQ ID NO: 9114 - DNA, 1065 bp, Glycine max
  Gm_smallRNAprecursor_1947
atcttggaagagttatctgtaaatcaaaaagccttcttcggtggtatctgatagcaagatgcaaaactagaaagcagcatatatatacagtaagcagaagaagattgtacaaattaaaataatttaaacagaaagccttaccaatcctatgaagatgaggatcttcataaaacaaacgcaaattaagtagttgtattgagtagtagcaaatgttggctggggggaatgaagcctggtccgagaatcatttagggtataaattaatttccattaatttatataccctggaatttaactgaaacactttcatatatatctccatatcatgacctcgagccagacaacattcctctcaacataacctttgcagggctaacttacacacttgtaaccaaacatatacacataataatgcatatatataacacaacaccacctttggcacttgatgaacacaaatccaagaagatatgaagccccccaaaaaacacgagctttgaggggaatgaagcctggtccgaagccttatagttcttgccagtgagaacctcctttgagaaaaagcctcgagccagccaacattcccctcaacactactactaacccatctcactcaaaaccctaacccgcttagaggttcttatatatagacaaagcaagagagagagaaagagagagcactgactcacactagctagctacacttatggcgctttttagctacccattcagatgttttttgttcccaaattagcttgtgcaaaagggcatttaaactaactgctatggtcaaagataaaattaaaactcataagtaaacaaaaccaaaagcactacttgagcagacaagaccaccaccaccccacaaaacaaaaagactgagattgaggagaggcccctccgtccttactatttgtaattttatacaaatacaaaaaacaaattagtaaaaaaagaagtgtatgatgcataatgcagagtgtagtagtaggctaggcttaaaaagtaggaattttgttagatttcctatgcgagtgacctggtgatgccggtgaaccaaccgac

SEQ ID NO: 9115 - DNA, 1065 bp, Glycine max; identical to SEQ ID NO: 9114
  Gm_smallRNAprecursor_1948

SEQ ID NO: 9116 - DNA, 1066 bp, Glycine max
  Gm_smallRNAprecursor_1949
atcttggaagagttatctgtaaatcaaaaagccttcttcggtggtatctgatagcaagatgcaaaactagaaagcagcatatatatacagtaagcagaagaagattgtacaaattaaaataatttaaacagaaagccttaccaatcctatgaagatgaggatcttcataaaacaaacgcaaattaagtagttgtattgagtagtagcaaatgttggctggggggaatgaagcctggtccgagaatcatttagggtataaattaatttccattaatttatataccctggaatttaactgaaacactttcatatatatctccatatcatgacctcgagccagacaacattcctctcaacataacctttgcagggctaacttacacacttgtaaccaaacatatacacataataatgcatatatataacacaacaccacctttggcacttgatgaacacaaatccaagaagatatgaagccccccaaaaaacacgagctttgaggggaatgaagcctggtccgaagccttatagttcttgccagtgagaacctcctttgagaaaaagcctcgagccagccaacattcccctcaacactactactaacccatctcactcaaaaccctaacccgcttagaggttcttatatatagacaaagcaagagagagagaaagagagagcactgactcacactagctagctacacttatggcgctttttagctacccattcagatgttttttgttcccaaattagcttgtgcaaaagggcatttaaactaactgctatggtcaaagataaaattaaaactcataagtaaacaaaaccaaaagcactacttgagcagacaagaccaccaccaccccacaaaacaaaaagactgagattgaggagaggcccctccgtccttactatttgtaattttatacaaatacaaaaaacaaattagtaaaaaaagaagtgtatgatgcataatgcagagtgtagtagtaggctaggcttaaaaagtaggaattttgttagatttcctatgcgagtgacctggtgatgccggtgaaccaaccgacc

SEQ ID NO: 9117 - DNA, 1050 bp, Glycine max
  Gm_smallRNAprecursor_1950
atttaagatattttttggtgaatatatgttttaaaatttaaattttgtataataatatatttattttagtaaatatttattttgtataataatctgaattttaaaatttttaatttaactattttactaaatataattagtttgtttatgtttttagatttaattaaaaatgataaaactaaagcttttaacaatttatttatataagaacattatactacgtcatcaataaaatatttaaacaatgacatttgtctaaggaaaaactaagatgaggatacattaggacaattatttctgctatgaccatgttgccggcaaagtccacatttttttctacttgctcgttcattttcgtcttcgtccatctcagtaggaatgcgagttgaaacgggacgaccctttacagtcctctttctccttggatcaggaccccattgatctccttcatattcttgccacattgattcgtgtggcaataaaccaaaggagttgtcgtagatgtgcaaaatgtgttgtaaagtgaatacatcggcacataggtcatgggatcaacattgacagatttacaggcagccatgacgtgagaacacggtaaatgtttagcctgaaattcaccacaatcacacttttgggattgtaacattactctaaaccttccaggtggtctgggtgtttcaagtggggattgagtctcggttataataaaagtgtgattgtgtctgtcgaattcatttacaatgtgtgtattagattcttgttgaccactattgattgcatcgaagacgacttcagaatactgtgagccggagttgatcattgcctgagtttgtcgacctctattagcaaaaagttgtgcggtcttgaaataggtctcctcaaccaatgatgacaccggcaaatgtcttgtgtttttgaacatggaattaacagactccgacaaattggtagtcatatgtcccaaacgcttcccctcatcaaagcattgtacccatttttgtttgggtaattgatcaagccattcagctgcacttggcttattcgcacgaa

SEQ ID NO: 9118 - DNA, 1167 bp, Glycine max
  Gm_smallRNAprecursor_1951
taataatatatttattttagtaaatatttattttgtataataatctgaattttaaaatttttaatttaactattttactaaatataattagtttgtttatgtttttagatttaattaaaaatgataaaactaaagcttttaacaatttatttatataagaacattatactacgtcatcaataaaatatttaaacaatgacatttgtctaaggaaaaactaagatgaggatacattaggacaattatttctgctatgaccatgttgccggcaaagtccacatttttttctacttgctcgttcattttcgtcttcgtccatctcagtaggaatgcgagttgaaacgggacgaccctttacagtcctctttctccttggatcaggaccccattgatctccttcatattcttgccacattgattcgtgtggcaataaaccaaaggagttgtcgtagatgtgcaaaatgtgttgtaaagtgaatacatcggcacataggtcatgggatcaacattgacagatttacaggcagccatgacgtgagaacacggtaaatgtttagcctgaaattcaccacaatcacacttttgggattgtaacattactctaaaccttccaggtggtctgggtgtttcaagtggggattgagtctcggttataataaaagtgtgattgtgtctgtcgaattcatttacaatgtgtgtattagattcttgttgaccactattgattgcatcgaagacgacttcagaatactgtgagccggagttgatcattgcctgagtttgtcgacctctattagcaaaaagttgtgcggtcttgaaataggtctcctcaaccaatgatgacaccggcaaatgtcttgtgtttttgaacatggaattaacagactccgacaaattggtagtcatatgtcccaaacgcttcccctcatcaaagcattgtacccatttttgtttgggtaattgatcaagccattcagctgcacttggcttattcgcacgaatatccccaagatgtcgccagtgcatcttctctgtgtatgcgtaccctgtaaatatttaatcaatgtattatgttataaaatttgattgaaagaaaattataacgaataaataaaatagattctcaccagccaacataagtggtttctttaaatgtttgcagtttga

SEQ ID NO: 9119 - DNA, 1092 bp, Glycine max
  Gm_smallRNAprecursor_1952
aggacaattatttctgctatgaccatgttgccggcaaagtccacatttttttctacttgctcgttcattttcgtcttcgtccatctcagtaggaatgcgagttgaaacgggacgaccctttacagtcctctttctccttggatcaggaccccattgatctccttcatattcttgccacattgattcgtgtggcaataaaccaaaggagttgtcgtagatgtgcaaaatgtgttgtaaagtgaatacatcggcacataggtcatgggatcaacattgacagatttacaggcagccatgacgtgagaacacggtaaatgtttagcctgaaattcaccacaatcacacttttgggattgtaacattactctaaaccttccaggtggtctgggtgtttcaagtggggattgagtctcggttataataaaagtgtgattgtgtctgtcgaattcatttacaatgtgtgtattagattcttgttgaccactattgattgcatcgaagacgacttcagaatactgtgagccggagttgatcattgcctgagtttgtcgacctctattagcaaaaagttgtgcggtcttgaaataggtctcctcaaccaatgatgacaccggcaaatgtcttgtgtttttgaacatggaattaacagactccgacaaattggtagtcatatgtcccaaacgcttcccctcatcaaagcattgtacccatttttgtttgggtaattgatcaagccattcagctgcacttggcttattcgcacgaatatccccaagatgtcgccagtgcatcttctctgtgtatgcgtaccctgtaaatatttaatcaatgtattatgttataaaatttgattgaaagaaaattataacgaataaataaaatagattctcaccagccaacataagtggtttctttaaatgtttgcagtttgagttaccacgaagaaagttttgtgcaatgtggcgcaggcaaaagaaatgggatgtgtcctggacccataagttacttgggttgttgtaggcacttataattgaggggtgtcggtctgaaataagagaaatgttaatttgcggagtaacatgtcttctcaaa

SEQ ID NO: 9120 - DNA, 1040 bp, Glycine max
  Gm_smallRNAprecursor_1953
attcgcacgaatatccccaagatgtcgccagtgcatcttctctgtgtatgcgtaccctgtaaatatttaatcaatgtattatgttataaaatttgattgaaagaaaattataacgaataaataaaatagattctcaccagccaacataagtggtttctttaaatgtttgcagtttgagttaccacgaagaaagttttgtgcaatgtggcgcaggcaaaagaaatgggatgtgtcctggacccataagttacttgggttgttgtaggcacttataattgaggggtgtcggtctgaaataagagaaatgttaatttgcggagtaacatgtcttctcaaattctttagaaaaaacccccaagctgaagttgtctccccttctacaatggcataggcaatcgggaagatatggttagctccatcttgtgcggtagctatcaacagtgtgccagtatactttccgtaaagccatgtaccgtctacttgtacaatgggtttgcaaaatgcaaaaccattaatgcatggaccaaatgaccaaaagacacgtttaaacaatcttttgcccggtactatttctcccccctcatacaaggattctgtttgagcagcgaccacagtcccgggaacacaagattgcaaagctccgaaaagttttggcagtttggcatatgattcttcccagtttccatgaatcatctccaatgctttttgctttgctaaccatgtcttcttgtaggatggggtataattcatgaacgttttaatctctgcaatcaatgtcttgatggagacagttgggtttgttttgacaattggttggatgatctgtgctatgacgtgtttgtcgagttggcgatgatcttgtgtaagcatcggcacgagacaagtgtgatgacctctgatactcttgataatccatttgttatgcctctttgaattgcatgcgcccaagctccatgtacaaccattttcatgtaacttgcagacgaagtgtagccttctttggtcagagtaaattgttctgcaatcaaaatgatttctga

SEQ ID NO: 9121 - DNA, 1035 bp, Glycine max
  Gm_smallRNAprecursor_1954
acgtgacaagctaacaaagtgtcatattatcgattaagtgatgatgtgacatgttaatagaatattttgtcattacttaacggatttagactaacagcaattatctaaaataaaagtttgaaaatgtgagatttttatgtagtaaactgaaaatgagtatattacaggtatcaaaaacaaatttaaatctttctttgaataagcaattgaaaaggagtatatcaatcgcatgagtagaaacttaccttctaactctatcccgtgtccatgcatttcacatgcaacaatcctttcttttagtgtctctgaaactaaaaagtagtctattctcatccgttttccgcgataccttcaaagaaaacactcgtgagaactaacaggacaaaatgtaattagtctagacaattagtatagctttaatagttaaaaaaaaaaaaaaatccttatcacatcacacattttaacagctattacctatgaagcacggacacttcagccctttgccgtatccggtgtccgacacgcgtccgtgtcagtgtccgacaccgacacaacacccgtattacgttctatattttggatattacaggtgtccacgtgtccgtattcgtgtcgtgtcccgtatccgtgtcggtgtttgttgccttccttctggcactcacatcatatattattaattatatttcaaaaatgcaaaaactattaaattaatatagttaatactgaataactgatatactgatatttgaaataatgcaggtaaaattaaaaaatatttttaggggtggtatggtatgcgaaatgaagtcaaactgtcaaacatacatgttaaaagtgttttttttttaagttagattgaaaaatacatatacagttaattaaaaaaaattaaatttatgatttaaaatagatttgttttgaagaagtcgttgatttatgatttaaattcttctttcttcaaaaagatttgtaaaatagataataattacatgattcagtctctaaatcagcaaattgttggcatgagtattgagt

SEQ ID NO: 9122 - DNA, 1034 bp, Glycine max
  Gm_smallRNAprecursor_1955
cgtgacaagctaacaaagtgtcatattatcgattaagtgatgatgtgacatgttaatagaatattttgtcattacttaacggatttagactaacagcaattatctaaaataaaagtttgaaaatgtgagatttttatgtagtaaactgaaaatgagtatattacaggtatcaaaaacaaatttaaatctttctttgaataagcaattgaaaaggagtatatcaatcgcatgagtagaaacttaccttctaactctatcccgtgtccatgcatttcacatgcaacaatcctttcttttagtgtctctgaaactaaaaagtagtctattctcatccgttttccgcgataccttcaaagaaaacactcgtgagaactaacaggacaaaatgtaattagtctagacaattagtatagctttaatagttaaaaaaaaaaaaaaatccttatcacatcacacattttaacagctattacctatgaagcacggacacttcagccctttgccgtatccggtgtccgacacgcgtccgtgtcagtgtccgacaccgacacaacacccgtattacgttctatattttggatattacaggtgtccacgtgtccgtattcgtgtcgtgtcccgtatccgtgtcggtgtttgttgccttccttctggcactcacatcatatattattaattatatttcaaaaatgcaaaaactattaaattaatatagttaatactgaataactgatatactgatatttgaaataatgcaggtaaaattaaaaaatatttttaggggtggtatggtatgcgaaatgaagtcaaactgtcaaacatacatgttaaaagtgttttttttttaagttagattgaaaaatacatatacagttaattaaaaaaaattaaatttatgatttaaaatagatttgttttgaagaagtcgttgatttatgatttaaattcttctttcttcaaaaagatttgtaaaatagataataattacatgattcagtctctaaatcagcaaattgttggcatgagtattgagt

SEQ ID NO: 9123 - DNA, 1212 bp, Glycine max
  Gm_smallRNAprecursor_1956
ttatgaaaccaaatcaaatagcaatccttactgttagttttgacaagtatcgaaatttgctaataaagcattgaaattagaattttttgttattaccaaccgataaaatcggtgattaacaccaaaaatccatatataggtaattcaattttaccagtggatttatcacagaagaaaacccaatgaaaatatgccgataggtaattttatcaacaaatattaggcaaatttctcaaactaggttacttttagaaactaattctcaaaaatgggttgttttgaaacttttttcgggggggtccgtttttgaaggggactcgccagtggggctggcgagttggacacgtggcggcgcctggtggactcgccagtggagttggcgagttgttgtccacgtggcaggtcccgccactcgtactggcgaaatgcttttttacggaaattttttttttaacttcaaacgggtataacttttgataagaatgtccgtttgaggcccataatatgtcaaaatgctcgaaattgaatgaagaatcccttggcaaatacccatagtggatctggtcaactcattttcccaaaaaatgcctctaagtagcttaaaaataggatttaagattaaaaaaatgggtggttgaatcttaaatccattttttgggaaaatgagttgaccaaatcccctatgggtatttgccaagggattcttcattcaatttcgagcattttgacatattatgtgcctcaaacggacattcctatcaaaagttatacccgtttgaagttaaaaatttttttcccgtaaaaaagcattttgccagtacgagtggcgggatccgccacgtggacaacaactcgccaactccactggtgagtcccccaggcgccgccacgtgtccaactcgtcagccccactggcgagtccccttcaaaaacggaccacccctagaaaaagtttcaaaacaacccctttttgagaattagtttctaaaagtaacctagtctgaaaaatttaccaccaaaataccaaattcatgggaaattatccataaaataatctgttagttagtaattatatgtacagacagattatcttgtgggcaagtatagatgaattattccatgggtaactttccatgaatttttccatgaataatttgaaaaattatctacagattattatgtcgacactaataaaaaaaactcctttttata

SEQ ID NO: 9124 - DNA, 1212 bp, Glycine max; identical to SEQ ID NO: 9123
  Gm_smallRNAprecursor_1957

SEQ ID NO: 9125 - DNA, 1213 bp, Glycine max
  Gm_smallRNAprecursor_1958
ttatgaaaccaaatcaaatagcaatccttactgttagttttgacaagtatcgaaatttgctaataaagcattgaaattagaattttttgttattaccaaccgataaaatcggtgattaacaccaaaaatccatatataggtaattcaattttaccagtggatttatcacagaagaaaacccaatgaaaatatgccgataggtaattttatcaacaaatattaggcaaatttctcaaactaggttacttttagaaactaattctcaaaaatgggttgttttgaaacttttttcgggggggtccgtttttgaaggggactcgccagtggggctggcgagttggacacgtggcggcgcctggtggactcgccagtggagttggcgagttgttgtccacgtggcaggtcccgccactcgtactggcgaaatgcttttttacggaaattttttttttaacttcaaacgggtataacttttgataagaatgtccgtttgaggcccataatatgtcaaaatgctcgaaattgaatgaagaatcccttggcaaatacccatagtggatctggtcaactcattttcccaaaaaatgcctctaagtagcttaaaaataggatttaagattaaaaaaatgggtggttgaatcttaaatccattttttgggaaaatgagttgaccaaatcccctatgggtatttgccaagggattcttcattcaatttcgagcattttgacatattatgtgcctcaaacggacattcctatcaaaagttatacccgtttgaagttaaaaatttttttcccgtaaaaaagcattttgccagtacgagtggcgggatccgccacgtggacaacaactcgccaactccactggtgagtcccccaggcgccgccacgtgtccaactcgtcagccccactggcgagtccccttcaaaaacggaccacccctagaaaaagtttcaaaacaacccctttttgagaattagtttctaaaagtaacctagtctgaaaaatttaccaccaaaataccaaattcatgggaaattatccataaaataatctgttagttagtaattatatgtacagacagattatcttgtgggcaagtatagatgaattattccatgggtaactttccatgaatttttccatgaataatttgaaaaattatctacagattattatgtcgacactaataaaaaaaactcctttttataa

SEQ ID NO: 9126 - DNA, 1157 bp, Glycine max
  Gm_smallRNAprecursor_1959
ttgctaataaagcattgaaattagaattttttgttattaccaaccgataaaatcggtgattaacaccaaaaatccatatataggtaattcaattttaccagtggatttatcacagaagaaaacccaatgaaaatatgccgataggtaattttatcaacaaatattaggcaaatttctcaaactaggttacttttagaaactaattctcaaaaatgggttgttttgaaacttttttcgggggggtccgtttttgaaggggactcgccagtggggctggcgagttggacacgtggcggcgcctggtggactcgccagtggagttggcgagttgttgtccacgtggcaggtcccgccactcgtactggcgaaatgcttttttacggaaattttttttttaacttcaaacgggtataacttttgataagaatgtccgtttgaggcccataatatgtcaaaatgctcgaaattgaatgaagaatcccttggcaaatacccatagtggatctggtcaactcattttcccaaaaaatgcctctaagtagcttaaaaataggatttaagattaaaaaaatgggtggttgaatcttaaatccattttttgggaaaatgagttgaccaaatcccctatgggtatttgccaagggattcttcattcaatttcgagcattttgacatattatgtgcctcaaacggacattcctatcaaaagttatacccgtttgaagttaaaaatttttttcccgtaaaaaagcattttgccagtacgagtggcgggatccgccacgtggacaacaactcgccaactccactggtgagtcccccaggcgccgccacgtgtccaactcgtcagccccactggcgagtccccttcaaaaacggaccacccctagaaaaagtttcaaaacaacccctttttgagaattagtttctaaaagtaacctagtctgaaaaatttaccaccaaaataccaaattcatgggaaattatccataaaataatctgttagttagtaattatatgtacagacagattatcttgtgggcaagtatagatgaattattccatgggtaactttccatgaatttttccatgaataatttgaaaaattatctacagattattatgtcgacactaataaaaaaaactcctttttataa

SEQ ID NO: 9127 - DNA, 1195 bp, Glycine max
  Gm_smallRNAprecursor_1960
tagtttttttaaaattttgatggactaatatgaacaattttttttgaaggattaaaaagataattatctaaatttgagagactaaacacatatttaagcctataaaagttcgtttgtgtcaataattttgtcaacatgaataagggtgtgaacttaatgaataaggagtgggagaataacagaactcgactgggaatgaacttccaagcagcctaagtgtgggccgtgggatgttacttaaagcctcgagtgttgctaggtgcacccagcattattgctgttgcacccagcattctaagaaaatgacgaaattgtccttgtttgattttcctctttcggatcaacttgatccgtaagaggaaaaataaaaattttattaattatacaagatatttaaagatatttatttcattaattataatataattaaatatatttttttattttattaattataatatatttataaatattaatttattataaataattaatgctaatcaatcataatcataattcatgttaatcaatcataatttcctaaaagaggatataaataatttcagagttagcaatcataatgcagttttggaaattgctaactctgaaattatttatatcctcttttagggaattatgattgattagcataattgattgattaacatgaattatgattatgattgattgattagcatgaattatgattatgattgattgattaacatgaattatgattatgattgattagcatgaattatttataataaatcaatatttataaatatattataattaataaaataaataaataaatttaattatattataattaatgaaataaatatcttgtataattaacaaaatttttatttttcctcttacggatcaagttgatccggaagaggaaaaccaaacaatggtaattttgtcattttgttagaatgctgggtgcaccagcaataatgctgggtgcatctagcaacactctaaagcctctcattatttggtttgatgcagcccaaatcattagccgaagcctgatagctgcacccagggaatttctttgtgcacccagcccaattgctggtacacctagccaaatacagtaaaattccattttttgttcttccataaattagctgctttctcaatctttcgacgacttgaaagcaaactagtcctggttatacct

SEQ ID NO: 9128 - DNA, 1035 bp, Glycine max
  Gm_smallRNAprecursor_1961
ccaatgtagccgtctttgcattttctgggtcaacaaacatctttgtctttcgcctataccagaccatgtagtccgagttaaaactcaataggccttcttgtcggggataagcgtcgaccctaaatgcatgtcgattattccactgttgaatcattggggcgaataattgcccccaattttcgtcatgtttcccctttaatgttatgccatgaatgtttaggggttgtgaaggagactctggaactggttgctgcatcccgaattgtctcaagactctgtctggttggtgccactcaataacttggaaacaaattagtggcaccaccacgtaccacgcgatacttccgactaaacaaacgggaggcaacaatgatataacggttgatgggtaaggctcccacacaaactgcatataacaacatagttgtgaacactgtagtaaaataagacataattttttattttacaaatacaatagcatgcttcttacctcatgacgtttcataatatccaacttgcgacgaaaaactttcacatcatcattgccgatatgttggtttccacgtcgcagccacctacaaagaataaaatttaatataccctaaaaccatttattctattgaaatgaaagacgctgttaaaaatgactcacctgtgccctagtggtgtattttctatttgggaaggagtcctctttggagccaaggttggacatcgttcccatgcccacaattgtagtaagatgcacatacctccgattgatttagttttataatcggtggcactgcacatctctctatatagaaaaccaagtacggcagctccccatgcatatctgccacattcttcaaagtcacgtaaaaattgaaggtaccttaccgaaactctgttactggttttgtcaacgaacaagacacctccaataaatctcagtatccatgcacgggcaaaccttcgtacttgttcttcgtcgtcatcattatttatttgatcaaaatggtgagccagccaacttaatttaaccacactaccttt

SEQ ID NO: 9129 - DNA, 1045 bp, Glycine max
  Gm_smallRNAprecursor_1962
tattatatttaagatttttatttatgaatacaggtaaaaatcacttccacatcggtgaggaagtaatttatagcttcacattagaacccaccaaatagaacctaaaattatggatattaatcattttaatcttacaattacaaaaacttactttaattatttgaattttatatataaagactacaacgaatgaaatgaaaaaggtttaatatatacagagagaggaaggtttatgatacctaatactcataaaatgtaacatttaagtgtccaaatacactattcaatttcaaacaaactagttttgacagctcctaaaaaataaagcttaaactagttttttagtattttatttattatttaagatgaattttatacgagtgaatagacaatttagtctttgagattgtacctattttgtatattagtctctaacttaatgttaaattcaaaatagtctctatctttgcataagtgttgcaaaatagtcattccgttaaattttaaagtaacgccgttagtgaggtcaattttagtgccgcgtggactatccaacgtgacactaaaggatgacgtgacatgacacatggacgtgcttcctaaaagatgccacgtcatttgataataacaaaacgagtaaataggcaatttagtccctgactttgtatccatgttgcatattagtccctaacttaatgaaaaattcaaagtagtccctatcttttgcataagtgttgcaaaatagtccttaacttaaaagatgctagaaatcgtgcttaaagtgtccatgcattgcaaaggttgtgccttgcatgatttctggcagcacaaattcctccttggattccttgtcatcttttgattcctctggttttttctcttctttcttttcttcttcctctgcttttttcttctccactttgttgtcctctggttttttctcttcctattcaaaacacaaaaaaaaaaaaatcaaaacccggaatgatacattgttggtagttgaagaaaaaaaagaggaaaagagaatggttatgcatacctc

SEQ ID NO: 9130 - DNA, 1044 bp, Glycine max
  Gm_smallRNAprecursor_1963
attatatttaagatttttatttatgaatacaggtaaaaatcacttccacatcggtgaggaagtaatttatagcttcacattagaacccaccaaatagaacctaaaattatggatattaatcattttaatcttacaattacaaaaacttactttaattatttgaattttatatataaagactacaacgaatgaaatgaaaaaggtttaatatatacagagagaggaaggtttatgatacctaatactcataaaatgtaacatttaagtgtccaaatacactattcaatttcaaacaaactagttttgacagctcctaaaaaataaagcttaaactagttttttagtattttatttattatttaagatgaattttatacgagtgaatagacaatttagtctttgagattgtacctattttgtatattagtctctaacttaatgttaaattcaaaatagtctctatctttgcataagtgttgcaaaatagtcattccgttaaattttaaagtaacgccgttagtgaggtcaattttagtgccgcgtggactatccaacgtgacactaaaggatgacgtgacatgacacatggacgtgcttcctaaaagatgccacgtcatttgataataacaaaacgagtaaataggcaatttagtccctgactttgtatccatgttgcatattagtccctaacttaatgaaaaattcaaagtagtccctatcttttgcataagtgttgcaaaatagtccttaacttaaaagatgctagaaatcgtgcttaaagtgtccatgcattgcaaaggttgtgccttgcatgatttctggcagcacaaattcctccttggattccttgtcatcttttgattcctctggttttttctcttctttcttttcttcttcctctgcttttttcttctccactttgttgtcctctggttttttctcttcctattcaaaacacaaaaaaaaaaaaatcaaaacccggaatgatacattgttggtagttgaagaaaaaaaagaggaaaagagaatggttatgcatacctc

SEQ ID NO: 9131 - DNA, 1044 bp, Glycine max; identical to SEQ ID NO: 9130
  Gm_smallRNAprecursor_1964

SEQ ID NO: 9132 - DNA, 1043 bp, Glycine max
  Gm_smallRNAprecursor_1965
ttatatttaagatttttatttatgaatacaggtaaaaatcacttccacatcggtgaggaagtaatttatagcttcacattagaacccaccaaatagaacctaaaattatggatattaatcattttaatcttacaattacaaaaacttactttaattatttgaattttatatataaagactacaacgaatgaaatgaaaaaggtttaatatatacagagagaggaaggtttatgatacctaatactcataaaatgtaacatttaagtgtccaaatacactattcaatttcaaacaaactagttttgacagctcctaaaaaataaagcttaaactagttttttagtattttatttattatttaagatgaattttatacgagtgaatagacaatttagtctttgagattgtacctattttgtatattagtctctaacttaatgttaaattcaaaatagtctctatctttgcataagtgttgcaaaatagtcattccgttaaattttaaagtaacgccgttagtgaggtcaattttagtgccgcgtggactatccaacgtgacactaaaggatgacgtgacatgacacatggacgtgcttcctaaaagatgccacgtcatttgataataacaaaacgagtaaataggcaatttagtccctgactttgtatccatgttgcatattagtccctaacttaatgaaaaattcaaagtagtccctatcttttgcataagtgttgcaaaatagtccttaacttaaaagatgctagaaatcgtgcttaaagtgtccatgcattgcaaaggttgtgccttgcatgatttctggcagcacaaattcctccttggattccttgtcatcttttgattcctctggttttttctcttctttcttttcttcttcctctgcttttttcttctccactttgttgtcctctggttttttctcttcctattcaaaacacaaaaaaaaaaaaatcaaaacccggaatgatacattgttggtagttgaagaaaaaaaagaggaaaagagaatggttatgcatacctc

SEQ ID NO: 9133 - DNA, 1118 bp, Glycine max
  Gm_smallRNAprecursor_1966
atggcaggagactttgaagaaggactagccacacaaggtttcaaaaaagaggaggagaagcgctagtaggctaggctttcaccacgaagaaagaatatatgcatggaaaagagaaggtaaaaagaagatgaaagaaaaaatgttaaaggaataagaagatgcaagaaaaaatggcaaggttttgaagttttacctctatcaaagcttgaagtgaaaatgatatgatttttgtttgcttggaacaggaacgtaataggaaacgttaaaaggaaaaggaaacattaacagaaataggaaaataagccaataaaaataataaagaatataaagggacacatgactcacacctaaattgtaattaaagtcttacttgattataggaataagagttatgaagcagtaatgtgttaatcaaagtctgctagtttaaaaaaaatattaattgtacccaaaaaataatataagtatatacatatatatatatatatatatatatataggccgacctatcagacttataaggctttttaataagtctaagcctgatctatttaatttaataggcttttaaaaaagtctgagcctaaccttttaattaaatatgtcagtccaagccagactttatgtaggtcaggtcgtaggtcccctgtaggccaacctaacatattcccacccctacataaaaggataattagtagaatatcctacctgaagacagagtgataattaatttataacttttgttttattctttataattacaaatttaaagtcataaatattttaatttttttaaaaatggttagtgatttatgactttaaagttgtaatttttaaattaattattaatgaatttaaattagttttaatttatagttttatttaatatttttgtatattgttttatttaatattttctatattttatatttttgtatattattttatttaatatattttaaatatttttatattattttattgaatattttctaactaatgttaaggattattatttgtttcgtatattagaaaaataatataaacaaaagacttaaatttaaataaaaatattaaaatatactacacacatttgtttaagaaaaacattaacagtg

SEQ ID NO: 9134 - DNA, 1095 bp, Glycine max
  Gm_smallRNAprecursor_1967
attctttgagatgaggtgttgttctttaaaaataaaagatttggacagacacttccaaagaatgaataagagattttatcttctcaatggtctcaatgatcctagcctgaagaatacatatgtagcttcgttatcagaagaaatacaatcaaaattgaacaagatggtagcggccgcccaaatggatttttctaccatgtctatgggacagatccatcaattcactctggaggtcgttgacaaattttgcagacaacatcaatatttctcagacatcatgaacagaaaagtcaagtataacagatcatgcaaaaagccttacttggagatcaaatgcagagagaagactttccatttctcaccaaagaaaaagaaagccttacaagctgacaccaaggggaaaagaaggacattgaagtttttcaggagaagccagaggaaaggaaaatcaagggggcaaagatgtctcatttgttgtcctaagaagtcacaaaaagccatcagactaatctctcatcttcaaatccgtgaatatgatgatatagaatctctgtactctgaacatagtgaactagatgatgagactgaatttgccttaaatcagacagattcttctgacgaagaatcttcagctcctccaattcccatcttctccatacaagaagtaacaatctatcaggtcgacgattcctcaaccatgtgttgaaattcaagtgttggaaaaaaagtttgaaaaacctatcaaggttattgcttttatagacactagaggagctcaaaggacgatgatggatccagatattcttccacaaggatattggaaagatcaagtagcctattttgtagcagttgatgggaaagtttttagaactgacttagtaacacatgctccgataggcatcaagtttttccctgattgtatcatctggaccaaagtcattggaagaaaattgcctgatagagacctccttgtcggaatggatgtctatactacggccaataaactccaaatacattctatcgggatcaaattcaagagagaattcaagcctttttcaaaaattacaaggctattccctttagcagaagccccgc

SEQ ID NO: 9135 - DNA, 1078 bp, Glycine max
  Gm_smallRNAprecursor_1968
ggacggtaactgtggatatcggtccattgccgctttattaggtataggggaagattcatggctgttagtgcgtaatgaattgattaaagaacttggcaggtggtcacatgagtacatgaacctcttcggtggcacagagagatttgaacaattaaagttgtccctacttgttgatgggttttcgaaggtatgtttttaggttaatttttttaataacaaactttaaattacttacatgtgtatgtttggttgattcaggttagtgtgggcaagtggatggatataacggagatgagatatgtgattgcatcactgtataacataatccttgtatcgttgtcccgacaacaaagcatgacattttttcctcttagaagtcaaccaccacctgattcttctgggcatcgcatgatatgtgtcggtcacgtgtttggaaatcattttgttcaggtacattgaatatagttagtataacaattatgcaatgacttcgctggttcatttgacacggtcaccgcatgatataatctttgttcatgtacaacaggtttatttgatagaccattgtcccttaccgcctccagcgttgttgtggtcaagcaattgttattctcaggcaaagcattggacaactccatatattagtagaatgcagcaatacacaagcttgatgtcattcaaaagacactatgtcgacctaaatgaagactaaacatgcattgtttatgtaattatattcactatgcgatataatttgttgtaagccattactaaccaattaatattattaagtactcgtttggtgaagcaaaaaaattattggtccaacaaaaatcatttgcgcgtgtagcatacatcattgtcataattgacaacacataatgacatgcatgcgtattaaagtttgagcgcgacaatacattgactgacttgactacatattctcaaggaaacataaacacgaaacatgttcacgcatgcctatttttttgtaaacaaagtgaagcaattgtcggtcacaaccatctatatatatagcagacacggctaataaatcacacattatcttgctttcaca

SEQ ID NO: 9136 - DNA, 1063 bp, Glycine max
  Gm_smallRNAprecursor_1969
aaagagtgatatcagataaaaagttaatatgatagagaaacaaagagaagaaattatataaatatgatatctcaataactgatgataccgtcacaagttattggtcaaacaataatatacacaaaacaactgaaaagcaagaaaggaatagaaaaaaggatggggctctcaatcttcaaatcgttctcagtagaacttttgaaactgatcaatcgccacaaaagaaaaaggcacagaaatatttcagaaattttcattagattgcagcaatagcttttaatactattaaacattgaatctgtattatctgcataatagcccccacagaattggaatatcagcatcacaacaaaagcataagtaagcatctagatttacatcaattactccaaagattcaacccattgattaaactgcaataaataaacaacaccagaaacaaaaaacagaaaaataaagggttccaaaatatgattgtgcactaaggagagtgagtgagcgctggatgcagaggtttatcgatcgattcatggttctgatgttaaacaacgattcaggaagagatcgatgaaccgctgcatccagtgacttcaccaatcctccaaactaaacacccaaagtttttgcaacaaagatgaaaacgaataaatagatggatctaaggagcaaacacatgttggaaatctgatatagaaagcgattgagagagaagaggacaaggtaaatataatattattatttatatgctatgaatacgatggagtgaaccaggaatccgtaaagtcgtcgttccaatgtcgtggatgtagtttatttctctgttcctccctcttttctcttggcgtggacagacacgtttttttagaagagggacccttggaaagggtgaagatttagaagaggctccttggaaagggtgaagattttgcttcctgtttttataggagactagaactacggttttgcccttgcttttcaacgtgtatcaccagttgaattcggtcggattttaggtcaaaaaagtccaatttgaatcgaattcgacccatttaatttctggccc

SEQ ID NO: 9137 - DNA, 1062 bp, Glycine max
  Gm_smallRNAprecursor_1970
aagagtgatatcagataaaaagttaatatgatagagaaacaaagagaagaaattatataaatatgatatctcaataactgatgataccgtcacaagttattggtcaaacaataatatacacaaaacaactgaaaagcaagaaaggaatagaaaaaaggatggggctctcaatcttcaaatcgttctcagtagaacttttgaaactgatcaatcgccacaaaagaaaaaggcacagaaatatttcagaaattttcattagattgcagcaatagcttttaatactattaaacattgaatctgtattatctgcataatagcccccacagaattggaatatcagcatcacaacaaaagcataagtaagcatctagatttacatcaattactccaaagattcaacccattgattaaactgcaataaataaacaacaccagaaacaaaaaacagaaaaataaagggttccaaaatatgattgtgcactaaggagagtgagtgagcgctggatgcagaggtttatcgatcgattcatggttctgatgttaaacaacgattcaggaagagatcgatgaaccgctgcatccagtgacttcaccaatcctccaaactaaacacccaaagtttttgcaacaaagatgaaaacgaataaatagatggatctaaggagcaaacacatgttggaaatctgatatagaaagcgattgagagagaagaggacaaggtaaatataatattattatttatatgctatgaatacgatggagtgaaccaggaatccgtaaagtcgtcgttccaatgtcgtggatgtagtttatttctctgttcctccctcttttctcttggcgtggacagacacgtttttttagaagagggacccttggaaagggtgaagatttagaagaggctccttggaaagggtgaagattttgcttcctgtttttataggagactagaactacggttttgcccttgcttttcaacgtgtatcaccagttgaattcggtcggattttaggtcaaaaaagtccaatttgaatcgaattcgacccatttaatttctggccc

SEQ ID NO: 9138 - DNA, 1224 bp, Glycine max
  Gm_smallRNAprecursor_1971
gatagaaagaaacatattgttgatctcccttatgagaaagactttcgggaaaaaaaaattcccacaaaagccagaccaattcaaatgaacgaagaactcctttaatactgccaaaaggaaatcaaggatttgcttgataaaggcctaatccggaaaagaaaaagcccatggtcttgtgccgctttttatgtcaataaacaatctgagcttgagcgaggaacacctcgcttagtcataaattacaaaccactgaatcaggcattacaatggattaggtatcctattccaaacacaaaagatttacttcacagattaaattctacaaaaatattttcaaaatttgatatgaaatctggattttggcaaatccaaattcaagaatcagataggtacaaaacaacttttactgtacctttcgggcaatatgaatggaatgtgatgccattcggactgaagaatgcccctttagaatttcaaaaattatgaatgatatttttaatccctattcaaaatttgtcattgtctacatagatgatgttttaatcttttcccaaaacattgaccaacatttcaaacatctccagactttcatccatatcattaaacaaaatggtttggcagtctccaaatcaaaaatcaatcttttccaaactcgaattcgattccttggtcacaatatatatcaaggtacaatcattccaatagaaaggtcatgctagcaaatttcccaaccaaatcttagacaaaatccagttacaaagatttctaggttgtctaaattatgtaggagaatttgtcccctatttaaacaatattgttaagccattgcatgataggctgaagaaaaatccgcctccttggtctgatctccatacccaaacagttaatgagatcaaactcaaagtccaatctataaaatgtctatatcttcctattcctcaggcatttaaaattgtcgaaatcgatgcatcagacataggttatggtggcatcctcaaacaaagagtacatggtcaagatcatgtcattgcatatacatcaaaacattggaatcctgcacaattaaaatattcaattgttaaaaaggaagttttagcaattgttttgtgcatttccaaatttcaatctgatttactaaatcaaaattttttaataagggttgattggaaatcagccaaagacattcttcaaaaagatgttaaaaatcttgcatcaaaacaaatt

SEQ ID NO: 9139 - DNA, 1048 bp, Glycine max
  Gm_smallRNAprecursor_1972
cctcgcttagtcataaattacaaaccactgaatcaggcattacaatggattaggtatcctattccaaacacaaaagatttacttcacagattaaattctacaaaaatattttcaaaatttgatatgaaatctggattttggcaaatccaaattcaagaatcagataggtacaaaacaacttttactgtacctttcgggcaatatgaatggaatgtgatgccattcggactgaagaatgcccctttagaatttcaaaaattatgaatgatatttttaatccctattcaaaatttgtcattgtctacatagatgatgttttaatcttttcccaaaacattgaccaacatttcaaacatctccagactttcatccatatcattaaacaaaatggtttggcagtctccaaatcaaaaatcaatcttttccaaactcgaattcgattccttggtcacaatatatatcaaggtacaatcattccaatagaaaggtcatgctagcaaatttcccaaccaaatcttagacaaaatccagttacaaagatttctaggttgtctaaattatgtaggagaatttgtcccctatttaaacaatattgttaagccattgcatgataggctgaagaaaaatccgcctccttggtctgatctccatacccaaacagttaatgagatcaaactcaaagtccaatctataaaatgtctatatcttcctattcctcaggcatttaaaattgtcgaaatcgatgcatcagacataggttatggtggcatcctcaaacaaagagtacatggtcaagatcatgtcattgcatatacatcaaaacattggaatcctgcacaattaaaatattcaattgttaaaaaggaagttttagcaattgttttgtgcatttccaaatttcaatctgatttactaaatcaaaattttttaataagggttgattggaaatcagccaaagacattcttcaaaaagatgttaaaaatcttgcatcaaaacaaatttttgctagatggcaagcaatcttgagtgtctttgattttgaaatag

SEQ ID NO: 9140 - DNA, 1048 bp, Glycine max; identical to SEQ ID NO: 9139
  Gm_smallRNAprecursor_1973

SEQ ID NO: 9141 - DNA, 1049 bp, Glycine max
  Gm_smallRNAprecursor_1974
cctcgcttagtcataaattacaaaccactgaatcaggcattacaatggattaggtatcctattccaaacacaaaagatttacttcacagattaaattctacaaaaatattttcaaaatttgatatgaaatctggattttggcaaatccaaattcaagaatcagataggtacaaaacaacttttactgtacctttcgggcaatatgaatggaatgtgatgccattcggactgaagaatgcccctttagaatttcaaaaattatgaatgatatttttaatccctattcaaaatttgtcattgtctacatagatgatgttttaatcttttcccaaaacattgaccaacatttcaaacatctccagactttcatccatatcattaaacaaaatggtttggcagtctccaaatcaaaaatcaatcttttccaaactcgaattcgattccttggtcacaatatatatcaaggtacaatcattccaatagaaaggtcatgctagcaaatttcccaaccaaatcttagacaaaatccagttacaaagatttctaggttgtctaaattatgtaggagaatttgtcccctatttaaacaatattgttaagccattgcatgataggctgaagaaaaatccgcctccttggtctgatctccatacccaaacagttaatgagatcaaactcaaagtccaatctataaaatgtctatatcttcctattcctcaggcatttaaaattgtcgaaatcgatgcatcagacataggttatggtggcatcctcaaacaaagagtacatggtcaagatcatgtcattgcatatacatcaaaacattggaatcctgcacaattaaaatattcaattgttaaaaaggaagttttagcaattgttttgtgcatttccaaatttcaatctgatttactaaatcaaaattttttaataagggttgattggaaatcagccaaagacattcttcaaaaagatgttaaaaatcttgcatcaaaacaaatttttgctagatggcaagcaatcttgagtgtctttgattttgaaataga

SEQ ID NO: 9142 - DNA, 1049 bp, Glycine max; identical to SEQ ID NO: 9141
  Gm_smallRNAprecursor_1975

SEQ ID NO: 9143 - DNA, 1050 bp, Glycine max
  Gm_smallRNAprecursor_1976
cctcgcttagtcataaattacaaaccactgaatcaggcattacaatggattaggtatcctattccaaacacaaaagatttacttcacagattaaattctacaaaaatattttcaaaatttgatatgaaatctggattttggcaaatccaaattcaagaatcagataggtacaaaacaacttttactgtacctttcgggcaatatgaatggaatgtgatgccattcggactgaagaatgcccctttagaatttcaaaaattatgaatgatatttttaatccctattcaaaatttgtcattgtctacatagatgatgttttaatcttttcccaaaacattgaccaacatttcaaacatctccagactttcatccatatcattaaacaaaatggtttggcagtctccaaatcaaaaatcaatcttttccaaactcgaattcgattccttggtcacaatatatatcaaggtacaatcattccaatagaaaggtcatgctagcaaatttcccaaccaaatcttagacaaaatccagttacaaagatttctaggttgtctaaattatgtaggagaatttgtcccctatttaaacaatattgttaagccattgcatgataggctgaagaaaaatccgcctccttggtctgatctccatacccaaacagttaatgagatcaaactcaaagtccaatctataaaatgtctatatcttcctattcctcaggcatttaaaattgtcgaaatcgatgcatcagacataggttatggtggcatcctcaaacaaagagtacatggtcaagatcatgtcattgcatatacatcaaaacattggaatcctgcacaattaaaatattcaattgttaaaaaggaagttttagcaattgttttgtgcatttccaaatttcaatctgatttactaaatcaaaattttttaataagggttgattggaaatcagccaaagacattcttcaaaaagatgttaaaaatcttgcatcaaaacaaatttttgctagatggcaagcaatcttgagtgtctttgattttgaaatagaa

SEQ ID NO: 9144 - DNA, 1047 bp, Glycine max
  Gm_smallRNAprecursor_1977
ctcgcttagtcataaattacaaaccactgaatcaggcattacaatggattaggtatcctattccaaacacaaaagatttacttcacagattaaattctacaaaaatattttcaaaatttgatatgaaatctggattttggcaaatccaaattcaagaatcagataggtacaaaacaacttttactgtacctttcgggcaatatgaatggaatgtgatgccattcggactgaagaatgcccctttagaatttcaaaaattatgaatgatatttttaatccctattcaaaatttgtcattgtctacatagatgatgttttaatcttttcccaaaacattgaccaacatttcaaacatctccagactttcatccatatcattaaacaaaatggtttggcagtctccaaatcaaaaatcaatcttttccaaactcgaattcgattccttggtcacaatatatatcaaggtacaatcattccaatagaaaggtcatgctagcaaatttcccaaccaaatcttagacaaaatccagttacaaagatttctaggttgtctaaattatgtaggagaatttgtcccctatttaaacaatattgttaagccattgcatgataggctgaagaaaaatccgcctccttggtctgatctccatacccaaacagttaatgagatcaaactcaaagtccaatctataaaatgtctatatcttcctattcctcaggcatttaaaattgtcgaaatcgatgcatcagacataggttatggtggcatcctcaaacaaagagtacatggtcaagatcatgtcattgcatatacatcaaaacattggaatcctgcacaattaaaatattcaattgttaaaaaggaagttttagcaattgttttgtgcatttccaaatttcaatctgatttactaaatcaaaattttttaataagggttgattggaaatcagccaaagacattcttcaaaaagatgttaaaaatcttgcatcaaaacaaatttttgctagatggcaagcaatcttgagtgtctttgattttgaaatag

SEQ ID NO: 9145 - DNA, 1164 bp, Glycine max
  Gm_smallRNAprecursor_1978
ccaattgtgatcaaattggatcctacaagtcctaaatcatgtataaatcatatttaaaccaaaaacaagcttcagaccaaggcaattcaaaatctaggtatctaaaacccatcaatttagtggattttcaaggtttgagaagtgaaaatgagaatgaggtaattttggagtaaactctcatctcaaacaagtctataacattaatttaaacttgctcaaactggttttacggcgaaaactccaccgattcaaaatttgacccctcaacatccaatttaccctagaaatggctcttgctttcacctttgtcactcatttttctcatttactctgcccaagctttcctacaagttctaattgacattttaaactagcatcaactcactttagactccaatttacactaaccccaaatttagcttttcaaaccctcaaaacctcacacttttccactcacatcactacgattttcacatttaaccctaggttaactctccccatcatctctaccagttttctaccaacaatttcagcacacaaacatcacaaagcatcatcataaaacccttaaacagaatgggtaaatttggctcacatcaaacatgtcaagtttagcatgctttcaacaaatttcttcgcaaataactacataaggcataaacatagtagaactacccatcatatctcccaaaaacccaatacccacgaaattcatgtgagaagaagtccacccatacgtgaaattcgaagtcccacaacgtagaggtgcgcttcatgacttcgaaaatggcttccttttgcaatttggagtagaaatgatgagcaaagtttggagctttaatggagaacaaaggtggagaagaaagggagaagaaaagcaacgtgggagatgagaagaagagcttctgaattttctgctgagtgaagagagagaatgtggctttttaagaaaaatgattttctttttcctattttttttcctcataaagcacttgccacttgtcccattttgagtggagcaaaagggcccacttttctcttgatgtgacttcatactcaaccacaaggagagagaaatttgaccttttgaatgctaaaatcttgcctcggtttgtgtgctgcttctctggttccagttcctcgcgtttctctgcacccgtcggg

SEQ ID NO: 9146 - DNA, 1133 bp, Glycine max
  Gm_smallRNAprecursor_1979
cgaaaaatgacggatgtcatggcggacaaaaaaaaaatacatatatataaactcattgaaattgaaaaaaacaatggattacattcaaataaactaaaaaagtttcatgagctcatacaataatcaattaccaacaccaaataaactcattaaagagttcaaaataagaaaatgataaaaacataatgtaaagtgcaaagtgaaggttgaggctctaatcatcttctccaatcctaacataatcatcttcgttgttatcatattgtaatggagcatctccctctccctcttccccatcagacgcctcaaaattgaccatgatttcttctttttcatattcaagatcaatattctcctcaaaatctagatcctcatcattttcttggactgctttttgcttccttgatgaagatccaacaatcattgcctgttttttagaagtttgggcagcaacaacacttgttgttttttgctttttccgcctagtatacatcctacactctccaacccccgaagcctgatacacagttgcccaatttagagcatcatcatcttcaaataccaaatcatttccagcatcattatcatcatcttgatccatctctcccacgagccattcattgcacacatcaatatcattaagagaaattggatcaatttcatctcttgcattatatctttgcttcaattgttggttgtatttgacaaacacaaaatcatgcaacctcttgtgctcaaacctatttcttttattgggaatgaatctacaacataacaaataaatgttgatttcaatctcaaatatactccaaataaaacttgatcatcaaaattaaataaaattaaaaagtatagttagagttttgccacaattacttactcaaacacactccaatttctttcacatcctgaagcactgcaagtcaaactcaaaattttaatagctagcttctgcaaatttggagtttgtgatccaaacattcgccaccaatatactgcaataccaattaccaaccaagagcataacttagaattctaaattataacactaatacataaaaaaatagtatagtatttgtatttgttatatggtaaaagtttcttactaggagaatgagttttcctttgagcca

SEQ ID NO: 9147 - DNA, 1053 bp, Glycine max
  Gm_smallRNAprecursor_1980
ctgagggagcaacacaactctcctttgtactgacacgaggacctgagggaccaacctctgactctggaggtagtgcaattccctgtgattgcatctgagactgaaactgcgactgcatctggctgaaggattccatcatctttcgagtcactttttctgtgattgactcctccagttggtctctgatttgttgggtcagctgttctaggtcttcaagaggcatggaggaagaactgcaggatgttcgtgaagctgatccaaagtattgctttatggtgacaccggctccaacagcacgaacacggccagggtgctctggtcgcccaatggcagcagtcaggatatcctgacgtccatgggggacaaacgatccctgtgacgcctgctcgtccaaagaatcctgtaccgaacacatatttgtccaaggaattcacaaaatacacaaagataattacaattattaattaaaaatgacttacaatcctgtcagctatttcttttgctgcctcagacgtcatctgtccagttttcttcgtgcgggccatcttccatttcacgtggcgtctgatgggagatggagggtcaatgatgccctcagtgcttccagactgggcagcttcttccagtcttttctttgccttctcagccatgagcttttcttctaaatattcataacccccacgagacaatacgtggggggcagtgttttgcttctgggaggcctgtgccttttttcgtacatcctgcaaaagtttaacattaatgaaaatgattattacaataaattataagaaatgattttgttgtggaaaacaactaaaatgacaaagtacatacctcccatgaggggtctctacgggtctgacaaaactgagtccatttctccttgctaatgccatatttttcacagacaatgtcgtccgcaccgtccttgtcgactgcaagtgctcatttcctagtcaagtcagatttaaattgcctccagcgctcgccgacaatctgaagaattttcttctttgtcctattgtcagaagcttcagggatttgaaattc

SEQ ID NO: 9148 - DNA, 1130 bp, Glycine max
  Gm_smallRNAprecursor_1981
gttctgactttgcaatggctcaaaggaaaactcattctcctagtaagaaacttttaccatatgacaaatacaaataccatactattttttaatgtattagtgttataattcagaattctaactttgaagttatgctcttggttggtaattggtattgcagcatattggtggcgaatgtttgggtcacaaactccaaatttgcagaagctagcaattaaaattttgagtttgacttgcagtgcttcaagatgtgaaagaaattggagtgtgtttgagcaagtaattgtgacaaaactctaactatactttttaattttatttaattttgatgatcaagttttatttggagtatatttgagattgaaatcaacatttatttgttatgttgtagattcattccaaaaaaagaaataggcttgagcacaagaggttgcatgatttggtgtttgtcaaatacaaccaacaattgaagcaaagatataatgcaagagatgaaattgatccaatttctcttaatgatattgatgtgtgcaatgaatggcttgtgggagagatggatcaagatgatgataatgatgctggaaatgatttggtatttgaagatgatgatgctctaaattgggcaactgtgtatcaggcttcgggggttggagagtgtaggatgtatactaggcggaaaaagcaaaaaacaagtgttgctgctgcccaaacttctaaaaaacaggcaatggttgttggatcttcatcaaggaagcaaaaagcagtccaagaaaatgatgaggatctagattttgaggaaatattgatgttgaatctgaagaagaagaagtcatggtcaattttgaggcgtctgatggggaagaaggagagggagatgctccattagcatatgataacaacgaagatgattatgttgggattagagaagatgattagagcctcaaccttcactttgcactttgcattatatttttatcattttcttattttgaactctttaatgagtttatttggtgttggtacttaattattgtatgaactcatgaaactttcttagtttattagaatgcaatcctttgtttgtttcaatttcaatgagtttatatatatgttttttttttgtccgccat

SEQ ID NO: 9149 - DNA, 1076 bp, Glycine max
  Gm_smallRNAprecursor_1982
gtcgtggcggttatggcggagtggcggaaaatggcgtccctcccgcaccccacacgcgcacccagccgcgacacccgtagccgcacgcgcacgcagccgcgacgacctccggcagcgacgcaccggcacaaacggcggcgacgagctccgacagcgacgcatctgtcacaaacggcggcctgcagcgaggagttctcgcggagaagacgaagctgctgtcgcgaagaagaagaaggcgtcgcgaggaagaagaaggcgtaggttttagttttatttttgctgtttgacaccccctattttctgtctgcagctttttttttccttttgctatttgacacccctttttacttttaacagtcccatttttttttcgtatttgacaccacaattttttttttctgttcagtcctcttttaaatggctgagtttatttgaactctttaatgagtttatttggtgttggtacttgattattgtatgaactcatgaaacttttttagtttatttgaatgcaatcctttgtttttttcaatttcaatgagtttatatatatgtttttttttttggtccgccatgacatccgccattttccgctacgccatccgccatgaaccgccatccgtcattaacaacattgatcacctctaatttccctggaccaaggtaatataatgttttggcaaaaaagtctgcaaaaacattcataaaatttgctactaaaaatcctctgatggtgattctcttgtacacaacgtccaacgtgtttggtgaagatctctttccggcatcaatatactcagatattaccccacaaatagtcactcttccaaatgctttcatattaacaatttctgcctccagcatctcaccccccaacatcgtcaaaatatatgtcaattccatcaggaaaatacctgcaatataaaataaaatacaccaaatgtaaacaatttttaaagtactagttttgaacttctctatatatatatagaaagaggttatgttccttgctcacaataatgagtccttagaagtcttctttaaattttgtaaaagattcaaaatgaaaaaggagt

SEQ ID NO: 9150 - DNA, 1084 bp, Glycine max
  Gm_smallRNAprecursor_1983
caagttacaggtttcatatatgtccaccaaagatcttactcgtcttggagtagactctggtgatgatagttcttgatcttgttgttgtggtggaggtgaaggtggttcacctgggtcttcttcctcagcttcttcttgaggtagttgagcaggtataagaacattcttctccactttttcttcatcccaattccaagaagcatactcataaacttcaacatctcgactgatgacgagtttcttagtttgcaagttgtagacacggtagcccttggagatattgctatacccaaggaagatacctcgtatagtcttgtcttcaagcttgtgcctcttcacgtctggaatatgaatgtagcatatagatccaaaaacccttaggtgctttgctgatggcttcttcccgttccaagcttcaattggagtcttgtcttttacaaacttagttggacatttattgagtatgtaaacagcagtgtagactgcttctgcccagaatgtgttaggtagtcccttctccttaagcattgatctagccatttccataactgtgcaattctttctctcggacactccattttgttgaggagaatatgcgactgtaagttgttgctcaatgccttcatcctcacaaaatctttcaaactcgtgagaggtgtactctttgccgcgatcacttcttggtacttttatttgttttccactttgattttcagcaagggccttgaactttttgaatactccaaagacttttgatttttcttttagaaaatatacccatgtcattctagagaagtcatcaatgaagagtatgaagtacctgttgttctcatgtgatggtgtcctcattggtccacagacgtccgtatgtatcagctccaatagatcttttgctctccatgctccacttgttgagaaaggaaatcagtgttgcttaccaaggagacatccttcacacacttcattgttctcctttatgcttggaagatctctcatcatgttcttctcatgtaacaacttcaaggcatgtgtgttgaagtggccaaatcttcgatgccatagccatgaatcatcaacttgtacc

SEQ ID NO: 9151 - DNA, 1101 bp, Glycine max
  Gm_smallRNAprecursor_1984
cccaactgtgttttggagaagtggttagtgtcaaataccaacatagtcatcctaggctgcattactttctctctttagagattcttctatcatctatatagtttctagtgaaccaaattactattaaaaactggtgtgcagtataacctgatattatgcactgtagtttcctttatgtactcaaataagatatgctccatagacatgatttagatcagatacttaattgctggttgttcattttaattgcttaaacagtggctagtctagataatacttatgtgtcaatcatctgtcttctttgttaatgcaagacaaattgacatgggatacatttctttgattattgggtatcatttgagtactgcaatattccataggctttcttgagtcctgatgtataagagagtagtattttatgctgagtgttttttacttagttttctgttagacagttgtaagctatgaagtacggacacttcagccccttgtcgtgtccggtgtccgacacgcgtccgtgtcagtgtccgacactgacccgacacctgtactacattctatattttggaaattacaggtgtccacgagtctgtgtccgtgtcgtgtccggtgtccgtgtcggtgttggtgcttcataggttgtaaggttagttttctattacagttgtaagtacaattgtcatcaactttatcattttgttatgcaactgcctatatgtactgcttcattccccaacctatagttgggttgaattctcttcaatacaaaaacattttccccctccctctttctctctctctctcttctccctaaatctctttatggtatcaaagagcttggttaaatccttgcttctgaaaatgacttctgcgaacaacaattcttctctgccaccacctttgcctcctcctccaccaccagttccgatgctggtgccgtgctcccctgtctcgttctttgcatgctgtaacggcgaaactcacagatcccacttacctttatggcgttcttaggttcaacttgtaatcatcaggcatggtcttctcggttgcattccctctctacagattccgcagaaatttctcattgctgaaaatcgt

SEQ ID NO: 9152 - DNA, 1101 bp, Glycine max; identical to SEQ ID NO: 9151
  Gm_smallRNAprecursor_1985

SEQ ID NO: 9153 - DNA, 1102 bp, Glycine max
  Gm_smallRNAprecursor_1986
cccaactgtgttttggagaagtggttagtgtcaaataccaacatagtcatcctaggctgcattactttctctctttagagattcttctatcatctatatagtttctagtgaaccaaattactattaaaaactggtgtgcagtataacctgatattatgcactgtagtttcctttatgtactcaaataagatatgctccatagacatgatttagatcagatacttaattgctggttgttcattttaattgcttaaacagtggctagtctagataatacttatgtgtcaatcatctgtcttctttgttaatgcaagacaaattgacatgggatacatttctttgattattgggtatcatttgagtactgcaatattccataggctttcttgagtcctgatgtataagagagtagtattttatgctgagtgttttttacttagttttctgttagacagttgtaagctatgaagtacggacacttcagccccttgtcgtgtccggtgtccgacacgcgtccgtgtcagtgtccgacactgacccgacacctgtactacattctatattttggaaattacaggtgtccacgagtctgtgtccgtgtcgtgtccggtgtccgtgtcggtgttggtgcttcataggttgtaaggttagttttctattacagttgtaagtacaattgtcatcaactttatcattttgttatgcaactgcctatatgtactgcttcattccccaacctatagttgggttgaattctcttcaatacaaaaacattttccccctccctctttctctctctctctcttctccctaaatctctttatggtatcaaagagcttggttaaatccttgcttctgaaaatgacttctgcgaacaacaattcttctctgccaccacctttgcctcctcctccaccaccagttccgatgctggtgccgtgctcccctgtctcgttctttgcatgctgtaacggcgaaactcacagatcccacttacctttatggcgttcttaggttcaacttgtaatcatcaggcatggtcttctcggttgcattccctctctacagattccgcagaaatttctcattgctgaaaatcgtg

SEQ ID NO: 9154 - DNA, 1103 bp, Glycine max
  Gm_smallRNAprecursor_1987
cccaactgtgttttggagaagtggttagtgtcaaataccaacatagtcatcctaggctgcattactttctctctttagagattcttctatcatctatatagtttctagtgaaccaaattactattaaaaactggtgtgcagtataacctgatattatgcactgtagtttcctttatgtactcaaataagatatgctccatagacatgatttagatcagatacttaattgctggttgttcattttaattgcttaaacagtggctagtctagataatacttatgtgtcaatcatctgtcttctttgttaatgcaagacaaattgacatgggatacatttctttgattattgggtatcatttgagtactgcaatattccataggctttcttgagtcctgatgtataagagagtagtattttatgctgagtgttttttacttagttttctgttagacagttgtaagctatgaagtacggacacttcagccccttgtcgtgtccggtgtccgacacgcgtccgtgtcagtgtccgacactgacccgacacctgtactacattctatattttggaaattacaggtgtccacgagtctgtgtccgtgtcgtgtccggtgtccgtgtcggtgttggtgcttcataggttgtaaggttagttttctattacagttgtaagtacaattgtcatcaactttatcattttgttatgcaactgcctatatgtactgcttcattccccaacctatagttgggttgaattctcttcaatacaaaaacattttccccctccctctttctctctctctctcttctccctaaatctctttatggtatcaaagagcttggttaaatccttgcttctgaaaatgacttctgcgaacaacaattcttctctgccaccacctttgcctcctcctccaccaccagttccgatgctggtgccgtgctcccctgtctcgttctttgcatgctgtaacggcgaaactcacagatcccacttacctttatggcgttcttaggttcaacttgtaatcatcaggcatggtcttctcggttgcattccctctctacagattccgcagaaatttctcattgctgaaaatcgtga

SEQ ID NO: 9155 - DNA, 1076 bp, Glycine max
  Gm_smallRNAprecursor_1988
cgtgaagttaagataggcacttagtaattaaaggtagtaatgggagcacacaattataattctccaatgtgaagattcttccactatacaaaagaaaggtagggttacaaggatgtgtttacaaaattaactcactctacagtgactcactcatgcttgaggatagagacttcccaagctatttaacttctttctcaaagaggctctctaactttctagctttctcactctaagaagtggattcactcttgtcttggatggtgtcttctctagcctaatgccatatttcttgtaataggcttcaaagggacctctatactcacctccattgtcagatcgtatgttcttgatctttcttccaatctcacgctccactagagcatggaattatttgaaggtgtcaagcacttgatcctttgattttaacaagtgcaaccacaccttccttgaatggtcatcaatgaaggtgacaaagtacaatgcaccaccaatgaatctctcggacattgaacacacatcggtgtgtacaaggtcaagaatgttctttctccttgtgggcggagaagatcttttgaaaacaactctgtgttgttttccagctaaacaatgagcacaaggatcaagtggcttacctttcccgttagggaggagatatttccgagctagcatgcgaaaacccttctcactgatatgcccaagtcgtttatgccatacttgcatatcaacaagattgaatagtgtttttagaaattttaatcttttcttgtatcaaaaacacactttattgttagatacaagttttagtaaaaatagataaaagatgttgagaaaattttgatcaaatgatgtatgaaaattgtttattgtttcctgttttgttgtatttgtattgccaggaaaatatccatgcaagagcaaaactggaaaaatatttgaggtcaactggaattcttgattcctcaaaattgaaaagctttttgaactgagcaaatccttgttgaacctgttcaagaaaaaattctaaaattggtccaaaaaagtcccaccattgaaggaactagtttggaaaattgtgc

SEQ ID NO: 9156 - DNA, 1199 bp, Glycine max
  Gm_smallRNAprecursor_1989
actattggtgtcacaatacacacgcgagcgtgcttagaggtaagggatgagttattcacaattggggagtagtgagaatatgtgtaaggatccttagagtatcaattggaatgagttttggggtgtttccgcaaattttgattctatccttacaattataactgtgaattatatatgcttcacgaaccaattgatgtcccaatgagaaattgttgtgaaattgatgtgttcatgtgttgagtgtgaacctttaaaaaattgagttctttttattcacgtgaattatactctaaataatattatttaataacttattttatacaaattattatcttgttctaattttcccatgatcataaaccgaagcggcggcagagccgcacaggatcggtgaagggagaagagagaagaatgaaaaatagaaatttattgaatctagaaagaagcgcttacaaaaatcttgtttcagagcacctctcttccgaaacctgaaaaaatggctaaatgaaagggtgcctcacaacatacttgaggactccttatatagccaaaaatctaagaccggtagttgccggtagttttgaccgggactatttgactgtttgttacaagacaagtagttttgaccgggactttaatggctacaggacaggtagtattgtccagcattaattacacataaattacaaacagacggttttgtgaccgaaattaaatttaatctaaacagataccaaaacaatcatcttcgttttggtaaaagggatcttcttcgtcttcagtagaacttgtttcttccttctttgaggatgaagcttcttcttcctgttgtaacatttgtagaacttccttcagatttttagctaagacctcctttgatgtcgatcctgctaaaaatgctgccagatgagacttttggttcaaaaacacagaagtctctggatcagctgttttgaggaattctggatgggattggaaccatagttttacttgttctggatccgctttggatgagtcaaattgtgtccaccattttacaaatgcgtgtctttgtggtgatggatattggtttgtcttttcagtcttgctgtaacgatattgccatgagaatatccatgacagtgcaaagcttgaaaagtatttaagatctgctggaattcgtgattcctgcgaattgtactgtttcttaaattaggaaa

SEQ ID NO: 9157 - DNA, 1141 bp, Glycine max
  Gm_smallRNAprecursor_1990
tgtaaggatccttagagtatcaattggaatgagttttggggtgtttccgcaaattttgattctatccttacaattataactgtgaattatatatgcttcacgaaccaattgatgtcccaatgagaaattgttgtgaaattgatgtgttcatgtgttgagtgtgaacctttaaaaaattgagttctttttattcacgtgaattatactctaaataatattatttaataacttattttatacaaattattatcttgttctaattttcccatgatcataaaccgaagcggcggcagagccgcacaggatcggtgaagggagaagagagaagaatgaaaaatagaaatttattgaatctagaaagaagcgcttacaaaaatcttgtttcagagcacctctcttccgaaacctgaaaaaatggctaaatgaaagggtgcctcacaacatacttgaggactccttatatagccaaaaatctaagaccggtagttgccggtagttttgaccgggactatttgactgtttgttacaagacaagtagttttgaccgggactttaatggctacaggacaggtagtattgtccagcattaattacacataaattacaaacagacggttttgtgaccgaaattaaatttaatctaaacagataccaaaacaatcatcttcgttttggtaaaagggatcttcttcgtcttcagtagaacttgtttcttccttctttgaggatgaagcttcttcttcctgttgtaacatttgtagaacttccttcagatttttagctaagacctcctttgatgtcgatcctgctaaaaatgctgccagatgagacttttggttcaaaaacacagaagtctctggatcagctgttttgaggaattctggatgggattggaaccatagttttacttgttctggatccgctttggatgagtcaaattgtgtccaccattttacaaatgcgtgtctttgtggtgatggatattggtttgtcttttcagtcttgctgtaacgatattgccatgagaatatccatgacagtgcaaagcttgaaaagtatttaagatctgctggaattcgtgattcctgcgaattgtactgtttcttaaattaggaaaatccttgttggaccgtttttggga

SEQ ID NO: 9158 - DNA, 1154 bp, Glycine max
  Gm_smallRNAprecursor_1991
tgtaaggatccttagagtatcaattggaatgagttttggggtgtttccgcaaattttgattctatccttacaattataactgtgaattatatatgcttcacgaaccaattgatgtcccaatgagaaattgttgtgaaattgatgtgttcatgtgttgagtgtgaacctttaaaaaattgagttctttttattcacgtgaattatactctaaataatattatttaataacttattttatacaaattattatcttgttctaattttcccatgatcataaaccgaagcggcggcagagccgcacaggatcggtgaagggagaagagagaagaatgaaaaatagaaatttattgaatctagaaagaagcgcttacaaaaatcttgtttcagagcacctctcttccgaaacctgaaaaaatggctaaatgaaagggtgcctcacaacatacttgaggactccttatatagccaaaaatctaagaccggtagttgccggtagttttgaccgggactatttgactgtttgttacaagacaagtagttttgaccgggactttaatggctacaggacaggtagtattgtccagcattaattacacataaattacaaacagacggttttgtgaccgaaattaaatttaatctaaacagataccaaaacaatcatcttcgttttggtaaaagggatcttcttcgtcttcagtagaacttgtttcttccttctttgaggatgaagcttcttcttcctgttgtaacatttgtagaacttccttcagatttttagctaagacctcctttgatgtcgatcctgctaaaaatgctgccagatgagacttttggttcaaaaacacagaagtctctggatcagctgttttgaggaattctggatgggattggaaccatagttttacttgttctggatccgctttggatgagtcaaattgtgtccaccattttacaaatgcgtgtctttgtggtgatggatattggtttgtcttttcagtcttgctgtaacgatattgccatgagaatatccatgacagtgcaaagcttgaaaagtatttaagatctgctggaattcgtgattcctgcgaattgtactgtttcttaaattaggaaaatccttgttggaccgtttttgggaatatctctgggat

SEQ ID NO: 9159 - DNA, 1206 bp, Glycine max
  Gm_smallRNAprecursor_1992
gatgtgttcatgtgttgagtgtgaacctttaaaaaattgagttctttttattcacgtgaattatactctaaataatattatttaataacttattttatacaaattattatcttgttctaattttcccatgatcataaaccgaagcggcggcagagccgcacaggatcggtgaagggagaagagagaagaatgaaaaatagaaatttattgaatctagaaagaagcgcttacaaaaatcttgtttcagagcacctctcttccgaaacctgaaaaaatggctaaatgaaagggtgcctcacaacatacttgaggactccttatatagccaaaaatctaagaccggtagttgccggtagttttgaccgggactatttgactgtttgttacaagacaagtagttttgaccgggactttaatggctacaggacaggtagtattgtccagcattaattacacataaattacaaacagacggttttgtgaccgaaattaaatttaatctaaacagataccaaaacaatcatcttcgttttggtaaaagggatcttcttcgtcttcagtagaacttgtttcttccttctttgaggatgaagcttcttcttcctgttgtaacatttgtagaacttccttcagatttttagctaagacctcctttgatgtcgatcctgctaaaaatgctgccagatgagacttttggttcaaaaacacagaagtctctggatcagctgttttgaggaattctggatgggattggaaccatagttttacttgttctggatccgctttggatgagtcaaattgtgtccaccattttacaaatgcgtgtctttgtggtgatggatattggtttgtcttttcagtcttgctgtaacgatattgccatgagaatatccatgacagtgcaaagcttgaaaagtatttaagatctgctggaattcgtgattcctgcgaattgtactgtttcttaaattaggaaaatccttgttggaccgtttttgggaatatctctgggattggtccaaagaagtcccaccattgcaaaaaccaattgggaaaattgtaaattgtgttggtcttgaaatatatcagccatgaatgcttgaagcgggtattttggtgccaaaacaccttagtccaagcatcaacgtaatcccaataggtataacctaccggatcaaatggaactgaaaatctctttcctttgtt

SEQ ID NO: 9160 - DNA, 1080 bp, Glycine max
  Gm_smallRNAprecursor_1993
gtgttcatgtgttgagtgtgaacctttaaaaaattgagttctttttattcacgtgaattatactctaaataatattatttaataacttattttatacaaattattatcttgttctaattttcccatgatcataaaccgaagcggcggcagagccgcacaggatcggtgaagggagaagagagaagaatgaaaaatagaaatttattgaatctagaaagaagcgcttacaaaaatcttgtttcagagcacctctcttccgaaacctgaaaaaatggctaaatgaaagggtgcctcacaacatacttgaggactccttatatagccaaaaatctaagaccggtagttgccggtagttttgaccgggactatttgactgtttgttacaagacaagtagttttgaccgggactttaatggctacaggacaggtagtattgtccagcattaattacacataaattacaaacagacggttttgtgaccgaaattaaatttaatctaaacagataccaaaacaatcatcttcgttttggtaaaagggatcttcttcgtcttcagtagaacttgtttcttccttctttgaggatgaagcttcttcttcctgttgtaacatttgtagaacttccttcagatttttagctaagacctcctttgatgtcgatcctgctaaaaatgctgccagatgagacttttggttcaaaaacacagaagtctctggatcagctgttttgaggaattctggatgggattggaaccatagttttacttgttctggatccgctttggatgagtcaaattgtgtccaccattttacaaatgcgtgtctttgtggtgatggatattggtttgtcttttcagtcttgctgtaacgatattgccatgagaatatccatgacagtgcaaagcttgaaaagtatttaagatctgctggaattcgtgattcctgcgaattgtactgtttcttaaattaggaaaatccttgttggaccgtttttgggaatatctctgggattggtccaaagaagtcccaccattgcaaaaaccaattgggaaaattgtaaattgtgttggtcttgaaata

SEQ ID NO: 9161 - DNA, 1079 bp, Glycine max
  Gm_smallRNAprecursor_1994
tgttcatgtgttgagtgtgaacctttaaaaaattgagttctttttattcacgtgaattatactctaaataatattatttaataacttattttatacaaattattatcttgttctaattttcccatgatcataaaccgaagcggcggcagagccgcacaggatcggtgaagggagaagagagaagaatgaaaaatagaaatttattgaatctagaaagaagcgcttacaaaaatcttgtttcagagcacctctcttccgaaacctgaaaaaatggctaaatgaaagggtgcctcacaacatacttgaggactccttatatagccaaaaatctaagaccggtagttgccggtagttttgaccgggactatttgactgtttgttacaagacaagtagttttgaccgggactttaatggctacaggacaggtagtattgtccagcattaattacacataaattacaaacagacggttttgtgaccgaaattaaatttaatctaaacagataccaaaacaatcatcttcgttttggtaaaagggatcttcttcgtcttcagtagaacttgtttcttccttctttgaggatgaagcttcttcttcctgttgtaacatttgtagaacttccttcagatttttagctaagacctcctttgatgtcgatcctgctaaaaatgctgccagatgagacttttggttcaaaaacacagaagtctctggatcagctgttttgaggaattctggatgggattggaaccatagttttacttgttctggatccgctttggatgagtcaaattgtgtccaccattttacaaatgcgtgtctttgtggtgatggatattggtttgtcttttcagtcttgctgtaacgatattgccatgagaatatccatgacagtgcaaagcttgaaaagtatttaagatctgctggaattcgtgattcctgcgaattgtactgtttcttaaattaggaaaatccttgttggaccgtttttgggaatatctctgggattggtccaaagaagtcccaccattgcaaaaaccaattgggaaaattgtaaattgtgttggtcttgaaata

SEQ ID NO: 9162 - DNA, 1078 bp, Glycine max
  Gm_smallRNAprecursor_1995
gttcatgtgttgagtgtgaacctttaaaaaattgagttctttttattcacgtgaattatactctaaataatattatttaataacttattttatacaaattattatcttgttctaattttcccatgatcataaaccgaagcggcggcagagccgcacaggatcggtgaagggagaagagagaagaatgaaaaatagaaatttattgaatctagaaagaagcgcttacaaaaatcttgtttcagagcacctctcttccgaaacctgaaaaaatggctaaatgaaagggtgcctcacaacatacttgaggactccttatatagccaaaaatctaagaccggtagttgccggtagttttgaccgggactatttgactgtttgttacaagacaagtagttttgaccgggactttaatggctacaggacaggtagtattgtccagcattaattacacataaattacaaacagacggttttgtgaccgaaattaaatttaatctaaacagataccaaaacaatcatcttcgttttggtaaaagggatcttcttcgtcttcagtagaacttgtttcttccttctttgaggatgaagcttcttcttcctgttgtaacatttgtagaacttccttcagatttttagctaagacctcctttgatgtcgatcctgctaaaaatgctgccagatgagacttttggttcaaaaacacagaagtctctggatcagctgttttgaggaattctggatgggattggaaccatagttttacttgttctggatccgctttggatgagtcaaattgtgtccaccattttacaaatgcgtgtctttgtggtgatggatattggtttgtcttttcagtcttgctgtaacgatattgccatgagaatatccatgacagtgcaaagcttgaaaagtatttaagatctgctggaattcgtgattcctgcgaattgtactgtttcttaaattaggaaaatccttgttggaccgtttttgggaatatctctgggattggtccaaagaagtcccaccattgcaaaaaccaattgggaaaattgtaaattgtgttggtcttgaaata

SEQ ID NO: 9163 - DNA, 1185 bp, Glycine max
  Gm_smallRNAprecursor_1996
gttgagtgtgaacctttaaaaaattgagttctttttattcacgtgaattatactctaaataatattatttaataacttattttatacaaattattatcttgttctaattttcccatgatcataaaccgaagcggcggcagagccgcacaggatcggtgaagggagaagagagaagaatgaaaaatagaaatttattgaatctagaaagaagcgcttacaaaaatcttgtttcagagcacctctcttccgaaacctgaaaaaatggctaaatgaaagggtgcctcacaacatacttgaggactccttatatagccaaaaatctaagaccggtagttgccggtagttttgaccgggactatttgactgtttgttacaagacaagtagttttgaccgggactttaatggctacaggacaggtagtattgtccagcattaattacacataaattacaaacagacggttttgtgaccgaaattaaatttaatctaaacagataccaaaacaatcatcttcgttttggtaaaagggatcttcttcgtcttcagtagaacttgtttcttccttctttgaggatgaagcttcttcttcctgttgtaacatttgtagaacttccttcagatttttagctaagacctcctttgatgtcgatcctgctaaaaatgctgccagatgagacttttggttcaaaaacacagaagtctctggatcagctgttttgaggaattctggatgggattggaaccatagttttacttgttctggatccgctttggatgagtcaaattgtgtccaccattttacaaatgcgtgtctttgtggtgatggatattggtttgtcttttcagtcttgctgtaacgatattgccatgagaatatccatgacagtgcaaagcttgaaaagtatttaagatctgctggaattcgtgattcctgcgaattgtactgtttcttaaattaggaaaatccttgttggaccgtttttgggaatatctctgggattggtccaaagaagtcccaccattgcaaaaaccaattgggaaaattgtaaattgtgttggtcttgaaatatatcagccatgaatgcttgaagcgggtattttggtgccaaaacaccttagtccaagcatcaacgtaatcccaataggtataacctaccggatcaaatggaactgaaaatctcttt

SEQ ID NO: 9164 - DNA, 1032 bp, Glycine max
  Gm_smallRNAprecursor_1997
ggagaagagagaagaatgaaaaatagaaatttattgaatctagaaagaagcgcttacaaaaatcttgtttcagagcacctctcttccgaaacctgaaaaaatggctaaatgaaagggtgcctcacaacatacttgaggactccttatatagccaaaaatctaagaccggtagttgccggtagttttgaccgggactatttgactgtttgttacaagacaagtagttttgaccgggactttaatggctacaggacaggtagtattgtccagcattaattacacataaattacaaacagacggttttgtgaccgaaattaaatttaatctaaacagataccaaaacaatcatcttcgttttggtaaaagggatcttcttcgtcttcagtagaacttgtttcttccttctttgaggatgaagcttcttcttcctgttgtaacatttgtagaacttccttcagatttttagctaagacctcctttgatgtcgatcctgctaaaaatgctgccagatgagacttttggttcaaaaacacagaagtctctggatcagctgttttgaggaattctggatgggattggaaccatagttttacttgttctggatccgctttggatgagtcaaattgtgtccaccattttacaaatgcgtgtctttgtggtgatggatattggtttgtcttttcagtcttgctgtaacgatattgccatgagaatatccatgacagtgcaaagcttgaaaagtatttaagatctgctggaattcgtgattcctgcgaattgtactgtttcttaaattaggaaaatccttgttggaccgtttttgggaatatctctgggattggtccaaagaagtcccaccattgcaaaaaccaattgggaaaattgtaaattgtgttggtcttgaaatatatcagccatgaatgcttgaagcgggtattttggtgccaaaacaccttagtccaagcatcaacgtaatcccaataggtataacctaccggatcaaatggaactgaaaatctctttcctttgtt

SEQ ID NO: 9165 - DNA, 1058 bp, Glycine max
  Gm_smallRNAprecursor_1998
tagaaatttattgaatctagaaagaagcgcttacaaaaatcttgtttcagagcacctctcttccgaaacctgaaaaaatggctaaatgaaagggtgcctcacaacatacttgaggactccttatatagccaaaaatctaagaccggtagttgccggtagttttgaccgggactatttgactgtttgttacaagacaagtagttttgaccgggactttaatggctacaggacaggtagtattgtccagcattaattacacataaattacaaacagacggttttgtgaccgaaattaaatttaatctaaacagataccaaaacaatcatcttcgttttggtaaaagggatcttcttcgtcttcagtagaacttgtttcttccttctttgaggatgaagcttcttcttcctgttgtaacatttgtagaacttccttcagatttttagctaagacctcctttgatgtcgatcctgctaaaaatgctgccagatgagacttttggttcaaaaacacagaagtctctggatcagctgttttgaggaattctggatgggattggaaccatagttttacttgttctggatccgctttggatgagtcaaattgtgtccaccattttacaaatgcgtgtctttgtggtgatggatattggtttgtcttttcagtcttgctgtaacgatattgccatgagaatatccatgacagtgcaaagcttgaaaagtatttaagatctgctggaattcgtgattcctgcgaattgtactgtttcttaaattaggaaaatccttgttggaccgtttttgggaatatctctgggattggtccaaagaagtcccaccattgcaaaaaccaattgggaaaattgtaaattgtgttggtcttgaaatatatcagccatgaatgcttgaagcgggtattttggtgccaaaacaccttagtccaagcatcaacgtaatcccaataggtataacctaccggatcaaatggaactgaaaatctctttcctttgttcaagtccgaaccaaagtgtcttggttgaagaacttttagtatttggatg

SEQ ID NO: 9166 - DNA, 1131 bp, Glycine max
  Gm_smallRNAprecursor_1999
aagacaagtagttttgaccgggactttaatggctacaggacaggtagtattgtccagcattaattacacataaattacaaacagacggttttgtgaccgaaattaaatttaatctaaacagataccaaaacaatcatcttcgttttggtaaaagggatcttcttcgtcttcagtagaacttgtttcttccttctttgaggatgaagcttcttcttcctgttgtaacatttgtagaacttccttcagatttttagctaagacctcctttgatgtcgatcctgctaaaaatgctgccagatgagacttttggttcaaaaacacagaagtctctggatcagctgttttgaggaattctggatgggattggaaccatagttttacttgttctggatccgctttggatgagtcaaattgtgtccaccattttacaaatgcgtgtctttgtggtgatggatattggtttgtcttttcagtcttgctgtaacgatattgccatgagaatatccatgacagtgcaaagcttgaaaagtatttaagatctgctggaattcgtgattcctgcgaattgtactgtttcttaaattaggaaaatccttgttggaccgtttttgggaatatctctgggattggtccaaagaagtcccaccattgcaaaaaccaattgggaaaattgtaaattgtgttggtcttgaaatatatcagccatgaatgcttgaagcgggtattttggtgccaaaacaccttagtccaagcatcaacgtaatcccaataggtataacctaccggatcaaatggaactgaaaatctctttcctttgttcaagtccgaaccaaagtgtcttggttgaagaacttttagtatttggatggttgaatgggtgtttaaggtttggtcttttggatctttgaaatgtttgatagatactgagtttgaatctaccaaaatcaattcataaaaagttcttgtcttcaggatggtggttggtttgtagtgaaatcctggtgggaaagccttggccgtcgccttgaagggatttttgtcccaaaattcaggttccatatgcaaaacagttaacaatttatttttataaatataattgttagtttgtttggtaggtggtgtttgagcttt

SEQ ID NO: 9167 - DNA, 1146 bp, Glycine max
  Gm_smallRNAprecursor_2000
atggctacaggacaggtagtattgtccagcattaattacacataaattacaaacagacggttttgtgaccgaaattaaatttaatctaaacagataccaaaacaatcatcttcgttttggtaaaagggatcttcttcgtcttcagtagaacttgtttcttccttctttgaggatgaagcttcttcttcctgttgtaacatttgtagaacttccttcagatttttagctaagacctcctttgatgtcgatcctgctaaaaatgctgccagatgagacttttggttcaaaaacacagaagtctctggatcagctgttttgaggaattctggatgggattggaaccatagttttacttgttctggatccgctttggatgagtcaaattgtgtccaccattttacaaatgcgtgtctttgtggtgatggatattggtttgtcttttcagtcttgctgtaacgatattgccatgagaatatccatgacagtgcaaagcttgaaaagtatttaagatctgctggaattcgtgattcctgcgaattgtactgtttcttaaattaggaaaatccttgttggaccgtttttgggaatatctctgggattggtccaaagaagtcccaccattgcaaaaaccaattgggaaaattgtaaattgtgttggtcttgaaatatatcagccatgaatgcttgaagcgggtattttggtgccaaaacaccttagtccaagcatcaacgtaatcccaataggtataacctaccggatcaaatggaactgaaaatctctttcctttgttcaagtccgaaccaaagtgtcttggttgaagaacttttagtatttggatggttgaatgggtgtttaaggtttggtcttttggatctttgaaatgtttgatagatactgagtttgaatctaccaaaatcaattcataaaaagttcttgtcttcaggatggtggttggtttgtagtgaaatcctggtgggaaagccttggccgtcgccttgaagggatttttgtcccaaaattcaggttccatatgcaaaacagttaacaatttatttttataaatataattgttagtttgtttggtaggtggtgtttgagctttggctaaaggtagttttcctttagtattggtggttgttttggtc

SEQ ID NO: 9168 - DNA, 1080 bp, Glycine max
  Gm_smallRNAprecursor_2001
ttcagtagaacttgtttcttccttctttgaggatgaagcttcttcttcctgttgtaacatttgtagaacttccttcagatttttagctaagacctcctttgatgtcgatcctgctaaaaatgctgccagatgagacttttggttcaaaaacacagaagtctctggatcagctgttttgaggaattctggatgggattggaaccatagttttacttgttctggatccgctttggatgagtcaaattgtgtccaccattttacaaatgcgtgtctttgtggtgatggatattggtttgtcttttcagtcttgctgtaacgatattgccatgagaatatccatgacagtgcaaagcttgaaaagtatttaagatctgctggaattcgtgattcctgcgaattgtactgtttcttaaattaggaaaatccttgttggaccgtttttgggaatatctctgggattggtccaaagaagtcccaccattgcaaaaaccaattgggaaaattgtaaattgtgttggtcttgaaatatatcagccatgaatgcttgaagcgggtattttggtgccaaaacaccttagtccaagcatcaacgtaatcccaataggtataacctaccggatcaaatggaactgaaaatctctttcctttgttcaagtccgaaccaaagtgtcttggttgaagaacttttagtatttggatggttgaatgggtgtttaaggtttggtcttttggatctttgaaatgtttgatagatactgagtttgaatctaccaaaatcaattcataaaaagttcttgtcttcaggatggtggttggtttgtagtgaaatcctggtgggaaagccttggccgtcgccttgaagggatttttgtcccaaaattcaggttccatatgcaaaacagttaacaatttatttttataaatataattgttagtttgtttggtaggtggtgtttgagctttggctaaaggtagttttcctttagtattggtggttgttttggtcattgacgcattttggatcattgtttgtaaatttgattcagattcatcatcagattctgaggcaatgtctgccca

SEQ ID NO: 9169 - DNA, 1104 bp, Glycine max
  Gm_smallRNAprecursor_2002
ttcagtagaacttgtttcttccttctttgaggatgaagcttcttcttcctgttgtaacatttgtagaacttccttcagatttttagctaagacctcctttgatgtcgatcctgctaaaaatgctgccagatgagacttttggttcaaaaacacagaagtctctggatcagctgttttgaggaattctggatgggattggaaccatagttttacttgttctggatccgctttggatgagtcaaattgtgtccaccattttacaaatgcgtgtctttgtggtgatggatattggtttgtcttttcagtcttgctgtaacgatattgccatgagaatatccatgacagtgcaaagcttgaaaagtatttaagatctgctggaattcgtgattcctgcgaattgtactgtttcttaaattaggaaaatccttgttggaccgtttttgggaatatctctgggattggtccaaagaagtcccaccattgcaaaaaccaattgggaaaattgtaaattgtgttggtcttgaaatatatcagccatgaatgcttgaagcgggtattttggtgccaaaacaccttagtccaagcatcaacgtaatcccaataggtataacctaccggatcaaatggaactgaaaatctctttcctttgttcaagtccgaaccaaagtgtcttggttgaagaacttttagtatttggatggttgaatgggtgtttaaggtttggtcttttggatctttgaaatgtttgatagatactgagtttgaatctaccaaaatcaattcataaaaagttcttgtcttcaggatggtggttggtttgtagtgaaatcctggtgggaaagccttggccgtcgccttgaagggatttttgtcccaaaattcaggttccatatgcaaaacagttaacaatttatttttataaatataattgttagtttgtttggtaggtggtgtttgagctttggctaaaggtagttttcctttagtattggtggttgttttggtcattgacgcattttggatcattgtttgtaaatttgattcagattcatcatcagattctgaggcaatgtctgcccaagattttttgattatttttggaaa

SEQ ID NO: 9170 - DNA, 1107 bp, Glycine max
  Gm_smallRNAprecursor_2003
gtagaacttccttcagatttttagctaagacctcctttgatgtcgatcctgctaaaaatgctgccagatgagacttttggttcaaaaacacagaagtctctggatcagctgttttgaggaattctggatgggattggaaccatagttttacttgttctggatccgctttggatgagtcaaattgtgtccaccattttacaaatgcgtgtctttgtggtgatggatattggtttgtcttttcagtcttgctgtaacgatattgccatgagaatatccatgacagtgcaaagcttgaaaagtatttaagatctgctggaattcgtgattcctgcgaattgtactgtttcttaaattaggaaaatccttgttggaccgtttttgggaatatctctgggattggtccaaagaagtcccaccattgcaaaaaccaattgggaaaattgtaaattgtgttggtcttgaaatatatcagccatgaatgcttgaagcgggtattttggtgccaaaacaccttagtccaagcatcaacgtaatcccaataggtataacctaccggatcaaatggaactgaaaatctctttcctttgttcaagtccgaaccaaagtgtcttggttgaagaacttttagtatttggatggttgaatgggtgtttaaggtttggtcttttggatctttgaaatgtttgatagatactgagtttgaatctaccaaaatcaattcataaaaagttcttgtcttcaggatggtggttggtttgtagtgaaatcctggtgggaaagccttggccgtcgccttgaagggatttttgtcccaaaattcaggttccatatgcaaaacagttaacaatttatttttataaatataattgttagtttgtttggtaggtggtgtttgagctttggctaaaggtagttttcctttagtattggtggttgttttggtcattgacgcattttggatcattgtttgtaaatttgattcagattcatcatcagattctgaggcaatgtctgcccaagattttttgattatttttggaaatttggtcagacccatgtcttgaagggcctgaagggtttcaattggccatgcatagtcggctgatg

SEQ ID NO: 9171 - DNA, 1107 bp, Glycine max; identical to SEQ ID NO: 9170
  Gm_smallRNAprecursor_2004

SEQ ID NO: 9172 - DNA, 1108 bp, Glycine max
  Gm_smallRNAprecursor_2005
gtagaacttccttcagatttttagctaagacctcctttgatgtcgatcctgctaaaaatgctgccagatgagacttttggttcaaaaacacagaagtctctggatcagctgttttgaggaattctggatgggattggaaccatagttttacttgttctggatccgctttggatgagtcaaattgtgtccaccattttacaaatgcgtgtctttgtggtgatggatattggtttgtcttttcagtcttgctgtaacgatattgccatgagaatatccatgacagtgcaaagcttgaaaagtatttaagatctgctggaattcgtgattcctgcgaattgtactgtttcttaaattaggaaaatccttgttggaccgtttttgggaatatctctgggattggtccaaagaagtcccaccattgcaaaaaccaattgggaaaattgtaaattgtgttggtcttgaaatatatcagccatgaatgcttgaagcgggtattttggtgccaaaacaccttagtccaagcatcaacgtaatcccaataggtataacctaccggatcaaatggaactgaaaatctctttcctttgttcaagtccgaaccaaagtgtcttggttgaagaacttttagtatttggatggttgaatgggtgtttaaggtttggtcttttggatctttgaaatgtttgatagatactgagtttgaatctaccaaaatcaattcataaaaagttcttgtcttcaggatggtggttggtttgtagtgaaatcctggtgggaaagccttggccgtcgccttgaagggatttttgtcccaaaattcaggttccatatgcaaaacagttaacaatttatttttataaatataattgttagtttgtttggtaggtggtgtttgagctttggctaaaggtagttttcctttagtattggtggttgttttggtcattgacgcattttggatcattgtttgtaaatttgattcagattcatcatcagattctgaggcaatgtctgcccaagattttttgattatttttggaaatttggtcagacccatgtcttgaagggcctgaagggtttcaattggccatgcatagtcggctgatgt

SEQ ID NO: 9173 - DNA, 1101 bp, Glycine max
  Gm_smallRNAprecursor_2006
gaacttccttcagatttttagctaagacctcctttgatgtcgatcctgctaaaaatgctgccagatgagacttttggttcaaaaacacagaagtctctggatcagctgttttgaggaattctggatgggattggaaccatagttttacttgttctggatccgctttggatgagtcaaattgtgtccaccattttacaaatgcgtgtctttgtggtgatggatattggtttgtcttttcagtcttgctgtaacgatattgccatgagaatatccatgacagtgcaaagcttgaaaagtatttaagatctgctggaattcgtgattcctgcgaattgtactgtttcttaaattaggaaaatccttgttggaccgtttttgggaatatctctgggattggtccaaagaagtcccaccattgcaaaaaccaattgggaaaattgtaaattgtgttggtcttgaaatatatcagccatgaatgcttgaagcgggtattttggtgccaaaacaccttagtccaagcatcaacgtaatcccaataggtataacctaccggatcaaatggaactgaaaatctctttcctttgttcaagtccgaaccaaagtgtcttggttgaagaacttttagtatttggatggttgaatgggtgtttaaggtttggtcttttggatctttgaaatgtttgatagatactgagtttgaatctaccaaaatcaattcataaaaagttcttgtcttcaggatggtggttggtttgtagtgaaatcctggtgggaaagccttggccgtcgccttgaagggatttttgtcccaaaattcaggttccatatgcaaaacagttaacaatttatttttataaatataattgttagtttgtttggtaggtggtgtttgagctttggctaaaggtagttttcctttagtattggtggttgttttggtcattgacgcattttggatcattgtttgtaaatttgattcagattcatcatcagattctgaggcaatgtctgcccaagattttttgattatttttggaaatttggtcagacccatgtcttgaagggcctgaagggtttcaattggccatgcatagtcggctg

SEQ ID NO: 9174 - DNA, 1140 bp, Glycine max
  Gm_smallRNAprecursor_2007
tttttagctaagacctcctttgatgtcgatcctgctaaaaatgctgccagatgagacttttggttcaaaaacacagaagtctctggatcagctgttttgaggaattctggatgggattggaaccatagttttacttgttctggatccgctttggatgagtcaaattgtgtccaccattttacaaatgcgtgtctttgtggtgatggatattggtttgtcttttcagtcttgctgtaacgatattgccatgagaatatccatgacagtgcaaagcttgaaaagtatttaagatctgctggaattcgtgattcctgcgaattgtactgtttcttaaattaggaaaatccttgttggaccgtttttgggaatatctctgggattggtccaaagaagtcccaccattgcaaaaaccaattgggaaaattgtaaattgtgttggtcttgaaatatatcagccatgaatgcttgaagcgggtattttggtgccaaaacaccttagtccaagcatcaacgtaatcccaataggtataacctaccggatcaaatggaactgaaaatctctttcctttgttcaagtccgaaccaaagtgtcttggttgaagaacttttagtatttggatggttgaatgggtgtttaaggtttggtcttttggatctttgaaatgtttgatagatactgagtttgaatctaccaaaatcaattcataaaaagttcttgtcttcaggatggtggttggtttgtagtgaaatcctggtgggaaagccttggccgtcgccttgaagggatttttgtcccaaaattcaggttccatatgcaaaacagttaacaatttatttttataaatataattgttagtttgtttggtaggtggtgtttgagctttggctaaaggtagttttcctttagtattggtggttgttttggtcattgacgcattttggatcattgtttgtaaatttgattcagattcatcatcagattctgaggcaatgtctgcccaagattttttgattatttttggaaatttggtcagacccatgtcttgaagggcctgaagggtttcaattggccatgcatagtcggctgatgtttgtttggcggttgccggtttgggagattcctgagtggatggctcaggt

SEQ ID NO: 9175 - DNA, 1189 bp, Glycine max
  Gm_smallRNAprecursor_2008
acacagaagtctctggatcagctgttttgaggaattctggatgggattggaaccatagttttacttgttctggatccgctttggatgagtcaaattgtgtccaccattttacaaatgcgtgtctttgtggtgatggatattggtttgtcttttcagtcttgctgtaacgatattgccatgagaatatccatgacagtgcaaagcttgaaaagtatttaagatctgctggaattcgtgattcctgcgaattgtactgtttcttaaattaggaaaatccttgttggaccgtttttgggaatatctctgggattggtccaaagaagtcccaccattgcaaaaaccaattgggaaaattgtaaattgtgttggtcttgaaatatatcagccatgaatgcttgaagcgggtattttggtgccaaaacaccttagtccaagcatcaacgtaatcccaataggtataacctaccggatcaaatggaactgaaaatctctttcctttgttcaagtccgaaccaaagtgtcttggttgaagaacttttagtatttggatggttgaatgggtgtttaaggtttggtcttttggatctttgaaatgtttgatagatactgagtttgaatctaccaaaatcaattcataaaaagttcttgtcttcaggatggtggttggtttgtagtgaaatcctggtgggaaagccttggccgtcgccttgaagggatttttgtcccaaaattcaggttccatatgcaaaacagttaacaatttatttttataaatataattgttagtttgtttggtaggtggtgtttgagctttggctaaaggtagttttcctttagtattggtggttgttttggtcattgacgcattttggatcattgtttgtaaatttgattcagattcatcatcagattctgaggcaatgtctgcccaagattttttgattatttttggaaatttggtcagacccatgtcttgaagggcctgaagggtttcaattggccatgcatagtcggctgatgtttgtttggcggttgccggtttgggagattcctgagtggatggctcaggtttgattgaggcaatctgggttgatgacccttctaaattggttttctgggtagatgacccagcctgggttggtgacccagaagaggtagatgatttcttgatggttagctctggaagagc

SEQ ID NO: 9176 - DNA, 1224 bp, Glycine max
  Gm_smallRNAprecursor_2009
tgttttgaggaattctggatgggattggaaccatagttttacttgttctggatccgctttggatgagtcaaattgtgtccaccattttacaaatgcgtgtctttgtggtgatggatattggtttgtcttttcagtcttgctgtaacgatattgccatgagaatatccatgacagtgcaaagcttgaaaagtatttaagatctgctggaattcgtgattcctgcgaattgtactgtttcttaaattaggaaaatccttgttggaccgtttttgggaatatctctgggattggtccaaagaagtcccaccattgcaaaaaccaattgggaaaattgtaaattgtgttggtcttgaaatatatcagccatgaatgcttgaagcgggtattttggtgccaaaacaccttagtccaagcatcaacgtaatcccaataggtataacctaccggatcaaatggaactgaaaatctctttcctttgttcaagtccgaaccaaagtgtcttggttgaagaacttttagtatttggatggttgaatgggtgtttaaggtttggtcttttggatctttgaaatgtttgatagatactgagtttgaatctaccaaaatcaattcataaaaagttcttgtcttcaggatggtggttggtttgtagtgaaatcctggtgggaaagccttggccgtcgccttgaagggatttttgtcccaaaattcaggttccatatgcaaaacagttaacaatttatttttataaatataattgttagtttgtttggtaggtggtgtttgagctttggctaaaggtagttttcctttagtattggtggttgttttggtcattgacgcattttggatcattgtttgtaaatttgattcagattcatcatcagattctgaggcaatgtctgcccaagattttttgattatttttggaaatttggtcagacccatgtcttgaagggcctgaagggtttcaattggccatgcatagtcggctgatgtttgtttggcggttgccggtttgggagattcctgagtggatggctcaggtttgattgaggcaatctgggttgatgacccttctaaattggttttctgggtagatgacccagcctgggttggtgacccagaagaggtagatgatttcttgatggttagctctggaagagccagcctggctcctttgcctatactccttcctccccgtagggagattcccgatgcctt

SEQ ID NO: 9177 - DNA, 1222 bp, Glycine max
  Gm_smallRNAprecursor_2010
ttttgaggaattctggatgggattggaaccatagttttacttgttctggatccgctttggatgagtcaaattgtgtccaccattttacaaatgcgtgtctttgtggtgatggatattggtttgtcttttcagtcttgctgtaacgatattgccatgagaatatccatgacagtgcaaagcttgaaaagtatttaagatctgctggaattcgtgattcctgcgaattgtactgtttcttaaattaggaaaatccttgttggaccgtttttgggaatatctctgggattggtccaaagaagtcccaccattgcaaaaaccaattgggaaaattgtaaattgtgttggtcttgaaatatatcagccatgaatgcttgaagcgggtattttggtgccaaaacaccttagtccaagcatcaacgtaatcccaataggtataacctaccggatcaaatggaactgaaaatctctttcctttgttcaagtccgaaccaaagtgtcttggttgaagaacttttagtatttggatggttgaatgggtgtttaaggtttggtcttttggatctttgaaatgtttgatagatactgagtttgaatctaccaaaatcaattcataaaaagttcttgtcttcaggatggtggttggtttgtagtgaaatcctggtgggaaagccttggccgtcgccttgaagggatttttgtcccaaaattcaggttccatatgcaaaacagttaacaatttatttttataaatataattgttagtttgtttggtaggtggtgtttgagctttggctaaaggtagttttcctttagtattggtggttgttttggtcattgacgcattttggatcattgtttgtaaatttgattcagattcatcatcagattctgaggcaatgtctgcccaagattttttgattatttttggaaatttggtcagacccatgtcttgaagggcctgaagggtttcaattggccatgcatagtcggctgatgtttgtttggcggttgccggtttgggagattcctgagtggatggctcaggtttgattgaggcaatctgggttgatgacccttctaaattggttttctgggtagatgacccagcctgggttggtgacccagaagaggtagatgatttcttgatggttagctctggaagagccagcctggctcctttgcctatactccttcctccccgtagggagattcccgatgcctt

SEQ ID NO: 9178 - DNA, 1058 bp, Glycine max
  Gm_smallRNAprecursor_2011
tacttgttctggatccgctttggatgagtcaaattgtgtccaccattttacaaatgcgtgtctttgtggtgatggatattggtttgtcttttcagtcttgctgtaacgatattgccatgagaatatccatgacagtgcaaagcttgaaaagtatttaagatctgctggaattcgtgattcctgcgaattgtactgtttcttaaattaggaaaatccttgttggaccgtttttgggaatatctctgggattggtccaaagaagtcccaccattgcaaaaaccaattgggaaaattgtaaattgtgttggtcttgaaatatatcagccatgaatgcttgaagcgggtattttggtgccaaaacaccttagtccaagcatcaacgtaatcccaataggtataacctaccggatcaaatggaactgaaaatctctttcctttgttcaagtccgaaccaaagtgtcttggttgaagaacttttagtatttggatggttgaatgggtgtttaaggtttggtcttttggatctttgaaatgtttgatagatactgagtttgaatctaccaaaatcaattcataaaaagttcttgtcttcaggatggtggttggtttgtagtgaaatcctggtgggaaagccttggccgtcgccttgaagggatttttgtcccaaaattcaggttccatatgcaaaacagttaacaatttatttttataaatataattgttagtttgtttggtaggtggtgtttgagctttggctaaaggtagttttcctttagtattggtggttgttttggtcattgacgcattttggatcattgtttgtaaatttgattcagattcatcatcagattctgaggcaatgtctgcccaagattttttgattatttttggaaatttggtcagacccatgtcttgaagggcctgaagggtttcaattggccatgcatagtcggctgatgtttgtttggcggttgccggtttgggagattcctgagtggatggctcaggtttgattgaggcaatctgggttgatgacccttctaaattggttttctggg

SEQ ID NO: 9179 - DNA, 1183 bp, Glycine max
  Gm_smallRNAprecursor_2012
tacttgttctggatccgctttggatgagtcaaattgtgtccaccattttacaaatgcgtgtctttgtggtgatggatattggtttgtcttttcagtcttgctgtaacgatattgccatgagaatatccatgacagtgcaaagcttgaaaagtatttaagatctgctggaattcgtgattcctgcgaattgtactgtttcttaaattaggaaaatccttgttggaccgtttttgggaatatctctgggattggtccaaagaagtcccaccattgcaaaaaccaattgggaaaattgtaaattgtgttggtcttgaaatatatcagccatgaatgcttgaagcgggtattttggtgccaaaacaccttagtccaagcatcaacgtaatcccaataggtataacctaccggatcaaatggaactgaaaatctctttcctttgttcaagtccgaaccaaagtgtcttggttgaagaacttttagtatttggatggttgaatgggtgtttaaggtttggtcttttggatctttgaaatgtttgatagatactgagtttgaatctaccaaaatcaattcataaaaagttcttgtcttcaggatggtggttggtttgtagtgaaatcctggtgggaaagccttggccgtcgccttgaagggatttttgtcccaaaattcaggttccatatgcaaaacagttaacaatttatttttataaatataattgttagtttgtttggtaggtggtgtttgagctttggctaaaggtagttttcctttagtattggtggttgttttggtcattgacgcattttggatcattgtttgtaaatttgattcagattcatcatcagattctgaggcaatgtctgcccaagattttttgattatttttggaaatttggtcagacccatgtcttgaagggcctgaagggtttcaattggccatgcatagtcggctgatgtttgtttggcggttgccggtttgggagattcctgagtggatggctcaggtttgattgaggcaatctgggttgatgacccttctaaattggttttctgggtagatgacccagcctgggttggtgacccagaagaggtagatgatttcttgatggttagctctggaagagccagcctggctcctttgcctatactccttcctccccgtagggagattcccgatgcc

SEQ ID NO: 9180 - DNA, 1098 bp, Glycine max
  Gm_smallRNAprecursor_2013
gtgtctttgtggtgatggatattggtttgtcttttcagtcttgctgtaacgatattgccatgagaatatccatgacagtgcaaagcttgaaaagtatttaagatctgctggaattcgtgattcctgcgaattgtactgtttcttaaattaggaaaatccttgttggaccgtttttgggaatatctctgggattggtccaaagaagtcccaccattgcaaaaaccaattgggaaaattgtaaattgtgttggtcttgaaatatatcagccatgaatgcttgaagcgggtattttggtgccaaaacaccttagtccaagcatcaacgtaatcccaataggtataacctaccggatcaaatggaactgaaaatctctttcctttgttcaagtccgaaccaaagtgtcttggttgaagaacttttagtatttggatggttgaatgggtgtttaaggtttggtcttttggatctttgaaatgtttgatagatactgagtttgaatctaccaaaatcaattcataaaaagttcttgtcttcaggatggtggttggtttgtagtgaaatcctggtgggaaagccttggccgtcgccttgaagggatttttgtcccaaaattcaggttccatatgcaaaacagttaacaatttatttttataaatataattgttagtttgtttggtaggtggtgtttgagctttggctaaaggtagttttcctttagtattggtggttgttttggtcattgacgcattttggatcattgtttgtaaatttgattcagattcatcatcagattctgaggcaatgtctgcccaagattttttgattatttttggaaatttggtcagacccatgtcttgaagggcctgaagggtttcaattggccatgcatagtcggctgatgtttgtttggcggttgccggtttgggagattcctgagtggatggctcaggtttgattgaggcaatctgggttgatgacccttctaaattggttttctgggtagatgacccagcctgggttggtgacccagaagaggtagatgatttcttgatggttagctctggaagagccagcctggctcctttgcctatactcct

SEQ ID NO: 9181 - DNA, 1141 bp, Glycine max
  Gm_smallRNAprecursor_2014
ttgacgcattttggatcattgtttgtaaatttgattcagattcatcatcagattctgaggcaatgtctgcccaagattttttgattatttttggaaatttggtcagacccatgtcttgaagggcctgaagggtttcaattggccatgcatagtcggctgatgtttgtttggcggttgccggtttgggagattcctgagtggatggctcaggtttgattgaggcaatctgggttgatgacccttctaaattggttttctgggtagatgacccagcctgggttggtgacccagaagaggtagatgatttcttgatggttagctctggaagagccagcctggctcctttgcctatactccttcctccccgtagggagattcccgatgccttaggaggcattaccacttttctgtaagaattcacgggtaaggtagtcaggtagtgaatttgaggtgcccttgatgtattctatgtcaaaatcaaagacaattaaaattgcttgccatcgtgcaaaaatttgttttgaggcaaagtttttaacatctttttgtaaaatatctttggctgatttataatcaaccctgattaaaaatttttggtttaataaatccgattgaaatttggaaatgcacaaaacaattgctaaaacctcttttttaacagttgaatattttaattgtgcaggattccaatgttttgatgtatatgcaatgacatgatcttggccatggactctttgtttgaggatgccaccataacctatgtctgaagcatcagtttcgacaattttaaatgcctgtggaataggaagatacagacatttaatggattggactttgactttgatttctttaaccgtttgtgtatggaggtcagaccaaggaggcggatttttcttcagcctatcatgtaatggcttgacaatattatttaaataggggacaaattctcctacgtaatttagacaacctagaaatctttgtaactgggttttgtctaagatttggttggggaatttgctagcaaactctattgacctttcgattggaatgattgtaccttgatatatattgtgaccaaggaatcgaattcgagtttggaaaagattgatttttgatttggagactgccaaaccattttgtt

SEQ ID NO: 9182 - DNA, 1049 bp, Glycine max
  Gm_smallRNAprecursor_2015
ggaaatttggtcagacccatgtcttgaagggcctgaagggtttcaattggccatgcatagtcggctgatgtttgtttggcggttgccggtttgggagattcctgagtggatggctcaggtttgattgaggcaatctgggttgatgacccttctaaattggttttctgggtagatgacccagcctgggttggtgacccagaagaggtagatgatttcttgatggttagctctggaagagccagcctggctcctttgcctatactccttcctccccgtagggagattcccgatgccttaggaggcattaccacttttctgtaagaattcacgggtaaggtagtcaggtagtgaatttgaggtgcccttgatgtattctatgtcaaaatcaaagacaattaaaattgcttgccatcgtgcaaaaatttgttttgaggcaaagtttttaacatctttttgtaaaatatctttggctgatttataatcaaccctgattaaaaatttttggtttaataaatccgattgaaatttggaaatgcacaaaacaattgctaaaacctcttttttaacagttgaatattttaattgtgcaggattccaatgttttgatgtatatgcaatgacatgatcttggccatggactctttgtttgaggatgccaccataacctatgtctgaagcatcagtttcgacaattttaaatgcctgtggaataggaagatacagacatttaatggattggactttgactttgatttctttaaccgtttgtgtatggaggtcagaccaaggaggcggatttttcttcagcctatcatgtaatggcttgacaatattatttaaataggggacaaattctcctacgtaatttagacaacctagaaatctttgtaactgggttttgtctaagatttggttggggaatttgctagcaaactctattgacctttcgattggaatgattgtaccttgatatatattgtgaccaaggaatcgaattcgagtttggaaaagattgatttttgatttggagactgccaaaccattttgtt

SEQ ID NO: 9183 - DNA, 1113 bp, Glycine max
  Gm_smallRNAprecursor_2016
ggaaatttggtcagacccatgtcttgaagggcctgaagggtttcaattggccatgcatagtcggctgatgtttgtttggcggttgccggtttgggagattcctgagtggatggctcaggtttgattgaggcaatctgggttgatgacccttctaaattggttttctgggtagatgacccagcctgggttggtgacccagaagaggtagatgatttcttgatggttagctctggaagagccagcctggctcctttgcctatactccttcctccccgtagggagattcccgatgccttaggaggcattaccacttttctgtaagaattcacgggtaaggtagtcaggtagtgaatttgaggtgcccttgatgtattctatgtcaaaatcaaagacaattaaaattgcttgccatcgtgcaaaaatttgttttgaggcaaagtttttaacatctttttgtaaaatatctttggctgatttataatcaaccctgattaaaaatttttggtttaataaatccgattgaaatttggaaatgcacaaaacaattgctaaaacctcttttttaacagttgaatattttaattgtgcaggattccaatgttttgatgtatatgcaatgacatgatcttggccatggactctttgtttgaggatgccaccataacctatgtctgaagcatcagtttcgacaattttaaatgcctgtggaataggaagatacagacatttaatggattggactttgactttgatttctttaaccgtttgtgtatggaggtcagaccaaggaggcggatttttcttcagcctatcatgtaatggcttgacaatattatttaaataggggacaaattctcctacgtaatttagacaacctagaaatctttgtaactgggttttgtctaagatttggttggggaatttgctagcaaactctattgacctttcgattggaatgattgtaccttgatatatattgtgaccaaggaatcgaattcgagtttggaaaagattgatttttgatttggagactgccaaaccattttgtttgatgatatgtatgaaggtttggagatgtttgaaatgttggtcaatgttttgtgaaaagattaa

SEQ ID NO: 9184 - DNA, 1113 bp, Glycine max; identical to SEQ ID NO: 9183
  Gm_smallRNAprecursor_2017

SEQ ID NO: 9185 - DNA, 1114 bp, Glycine max
  Gm_smallRNAprecursor_2018
ggaaatttggtcagacccatgtcttgaagggcctgaagggtttcaattggccatgcatagtcggctgatgtttgtttggcggttgccggtttgggagattcctgagtggatggctcaggtttgattgaggcaatctgggttgatgacccttctaaattggttttctgggtagatgacccagcctgggttggtgacccagaagaggtagatgatttcttgatggttagctctggaagagccagcctggctcctttgcctatactccttcctccccgtagggagattcccgatgccttaggaggcattaccacttttctgtaagaattcacgggtaaggtagtcaggtagtgaatttgaggtgcccttgatgtattctatgtcaaaatcaaagacaattaaaattgcttgccatcgtgcaaaaatttgttttgaggcaaagtttttaacatctttttgtaaaatatctttggctgatttataatcaaccctgattaaaaatttttggtttaataaatccgattgaaatttggaaatgcacaaaacaattgctaaaacctcttttttaacagttgaatattttaattgtgcaggattccaatgttttgatgtatatgcaatgacatgatcttggccatggactctttgtttgaggatgccaccataacctatgtctgaagcatcagtttcgacaattttaaatgcctgtggaataggaagatacagacatttaatggattggactttgactttgatttctttaaccgtttgtgtatggaggtcagaccaaggaggcggatttttcttcagcctatcatgtaatggcttgacaatattatttaaataggggacaaattctcctacgtaatttagacaacctagaaatctttgtaactgggttttgtctaagatttggttggggaatttgctagcaaactctattgacctttcgattggaatgattgtaccttgatatatattgtgaccaaggaatcgaattcgagtttggaaaagattgatttttgatttggagactgccaaaccattttgtttgatgatatgtatgaaggtttggagatgtttgaaatgttggtcaatgttttgtgaaaagattaaa

SEQ ID NO: 9186 - DNA, 1207 bp, Glycine max
  Gm_smallRNAprecursor_2019
ggaaatttggtcagacccatgtcttgaagggcctgaagggtttcaattggccatgcatagtcggctgatgtttgtttggcggttgccggtttgggagattcctgagtggatggctcaggtttgattgaggcaatctgggttgatgacccttctaaattggttttctgggtagatgacccagcctgggttggtgacccagaagaggtagatgatttcttgatggttagctctggaagagccagcctggctcctttgcctatactccttcctccccgtagggagattcccgatgccttaggaggcattaccacttttctgtaagaattcacgggtaaggtagtcaggtagtgaatttgaggtgcccttgatgtattctatgtcaaaatcaaagacaattaaaattgcttgccatcgtgcaaaaatttgttttgaggcaaagtttttaacatctttttgtaaaatatctttggctgatttataatcaaccctgattaaaaatttttggtttaataaatccgattgaaatttggaaatgcacaaaacaattgctaaaacctcttttttaacagttgaatattttaattgtgcaggattccaatgttttgatgtatatgcaatgacatgatcttggccatggactctttgtttgaggatgccaccataacctatgtctgaagcatcagtttcgacaattttaaatgcctgtggaataggaagatacagacatttaatggattggactttgactttgatttctttaaccgtttgtgtatggaggtcagaccaaggaggcggatttttcttcagcctatcatgtaatggcttgacaatattatttaaataggggacaaattctcctacgtaatttagacaacctagaaatctttgtaactgggttttgtctaagatttggttggggaatttgctagcaaactctattgacctttcgattggaatgattgtaccttgatatatattgtgaccaaggaatcgaattcgagtttggaaaagattgatttttgatttggagactgccaaaccattttgtttgatgatatgtatgaaggtttggagatgtttgaaatgttggtcaatgttttgtgaaaagattaaaacatcatctatgtagacaatgacaaattttgaataaggattaaaaatatcgttcataattttttgaaattctgaaggggcattcttcagtccg

SEQ ID NO: 9187 - DNA, 1035 bp, Glycine max
  Gm_smallRNAprecursor_2020
gcggttgccggtttgggagattcctgagtggatggctcaggtttgattgaggcaatctgggttgatgacccttctaaattggttttctgggtagatgacccagcctgggttggtgacccagaagaggtagatgatttcttgatggttagctctggaagagccagcctggctcctttgcctatactccttcctccccgtagggagattcccgatgccttaggaggcattaccacttttctgtaagaattcacgggtaaggtagtcaggtagtgaatttgaggtgcccttgatgtattctatgtcaaaatcaaagacaattaaaattgcttgccatcgtgcaaaaatttgttttgaggcaaagtttttaacatctttttgtaaaatatctttggctgatttataatcaaccctgattaaaaatttttggtttaataaatccgattgaaatttggaaatgcacaaaacaattgctaaaacctcttttttaacagttgaatattttaattgtgcaggattccaatgttttgatgtatatgcaatgacatgatcttggccatggactctttgtttgaggatgccaccataacctatgtctgaagcatcagtttcgacaattttaaatgcctgtggaataggaagatacagacatttaatggattggactttgactttgatttctttaaccgtttgtgtatggaggtcagaccaaggaggcggatttttcttcagcctatcatgtaatggcttgacaatattatttaaataggggacaaattctcctacgtaatttagacaacctagaaatctttgtaactgggttttgtctaagatttggttggggaatttgctagcaaactctattgacctttcgattggaatgattgtaccttgatatatattgtgaccaaggaatcgaattcgagtttggaaaagattgatttttgatttggagactgccaaaccattttgtttgatgatatgtatgaaggtttggagatgtttgaaatgttggtcaatgttttgtgaaaagattaa

SEQ ID NO: 9188 - DNA, 1247 bp, Glycine max
  Gm_smallRNAprecursor_2021
agatgatttcttgatggttagctctggaagagccagcctggctcctttgcctatactccttcctccccgtagggagattcccgatgccttaggaggcattaccacttttctgtaagaattcacgggtaaggtagtcaggtagtgaatttgaggtgcccttgatgtattctatgtcaaaatcaaagacaattaaaattgcttgccatcgtgcaaaaatttgttttgaggcaaagtttttaacatctttttgtaaaatatctttggctgatttataatcaaccctgattaaaaatttttggtttaataaatccgattgaaatttggaaatgcacaaaacaattgctaaaacctcttttttaacagttgaatattttaattgtgcaggattccaatgttttgatgtatatgcaatgacatgatcttggccatggactctttgtttgaggatgccaccataacctatgtctgaagcatcagtttcgacaattttaaatgcctgtggaataggaagatacagacatttaatggattggactttgactttgatttctttaaccgtttgtgtatggaggtcagaccaaggaggcggatttttcttcagcctatcatgtaatggcttgacaatattatttaaataggggacaaattctcctacgtaatttagacaacctagaaatctttgtaactgggttttgtctaagatttggttggggaatttgctagcaaactctattgacctttcgattggaatgattgtaccttgatatatattgtgaccaaggaatcgaattcgagtttggaaaagattgatttttgatttggagactgccaaaccattttgtttgatgatatgtatgaaggtttggagatgtttgaaatgttggtcaatgttttgtgaaaagattaaaacatcatctatgtagacaatgacaaattttgaataaggattaaaaatatcgttcataattttttgaaattctgaaggggcattcttcagtccgaatggcatcacgttccattcatattgcccgaaaggtacagtaaacgctgttttgtacctatctgattcttggatttgccaaaatccagatttcatatcaaattttgaaaatatctttgcagaatttaatctgttaagcaaatcttttttgttcggaataggatatttaatccattgtaatgcttgatttaatggtttgtaatttatgactaagcggggtgttccacgctcaatctcagattgtttg

SEQ ID NO: 9189 - DNA, 1246 bp, Glycine max
  Gm_smallRNAprecursor_2022
gatgatttcttgatggttagctctggaagagccagcctggctcctttgcctatactccttcctccccgtagggagattcccgatgccttaggaggcattaccacttttctgtaagaattcacgggtaaggtagtcaggtagtgaatttgaggtgcccttgatgtattctatgtcaaaatcaaagacaattaaaattgcttgccatcgtgcaaaaatttgttttgaggcaaagtttttaacatctttttgtaaaatatctttggctgatttataatcaaccctgattaaaaatttttggtttaataaatccgattgaaatttggaaatgcacaaaacaattgctaaaacctcttttttaacagttgaatattttaattgtgcaggattccaatgttttgatgtatatgcaatgacatgatcttggccatggactctttgtttgaggatgccaccataacctatgtctgaagcatcagtttcgacaattttaaatgcctgtggaataggaagatacagacatttaatggattggactttgactttgatttctttaaccgtttgtgtatggaggtcagaccaaggaggcggatttttcttcagcctatcatgtaatggcttgacaatattatttaaataggggacaaattctcctacgtaatttagacaacctagaaatctttgtaactgggttttgtctaagatttggttggggaatttgctagcaaactctattgacctttcgattggaatgattgtaccttgatatatattgtgaccaaggaatcgaattcgagtttggaaaagattgatttttgatttggagactgccaaaccattttgtttgatgatatgtatgaaggtttggagatgtttgaaatgttggtcaatgttttgtgaaaagattaaaacatcatctatgtagacaatgacaaattttgaataaggattaaaaatatcgttcataattttttgaaattctgaaggggcattcttcagtccgaatggcatcacgttccattcatattgcccgaaaggtacagtaaacgctgttttgtacctatctgattcttggatttgccaaaatccagatttcatatcaaattttgaaaatatctttgcagaatttaatctgttaagcaaatcttttttgttcggaataggatatttaatccattgtaatgcttgatttaatggtttgtaatttatgactaagcggggtgttccacgctcaatctcagattgtttg

SEQ ID NO: 9190 - DNA, 1031 bp, Glycine max
  Gm_smallRNAprecursor_2023
ctttttgtaaaatatctttggctgatttataatcaaccctgattaaaaatttttggtttaataaatccgattgaaatttggaaatgcacaaaacaattgctaaaacctcttttttaacagttgaatattttaattgtgcaggattccaatgttttgatgtatatgcaatgacatgatcttggccatggactctttgtttgaggatgccaccataacctatgtctgaagcatcagtttcgacaattttaaatgcctgtggaataggaagatacagacatttaatggattggactttgactttgatttctttaaccgtttgtgtatggaggtcagaccaaggaggcggatttttcttcagcctatcatgtaatggcttgacaatattatttaaataggggacaaattctcctacgtaatttagacaacctagaaatctttgtaactgggttttgtctaagatttggttggggaatttgctagcaaactctattgacctttcgattggaatgattgtaccttgatatatattgtgaccaaggaatcgaattcgagtttggaaaagattgatttttgatttggagactgccaaaccattttgtttgatgatatgtatgaaggtttggagatgtttgaaatgttggtcaatgttttgtgaaaagattaaaacatcatctatgtagacaatgacaaattttgaataaggattaaaaatatcgttcataattttttgaaattctgaaggggcattcttcagtccgaatggcatcacgttccattcatattgcccgaaaggtacagtaaacgctgttttgtacctatctgattcttggatttgccaaaatccagatttcatatcaaattttgaaaatatctttgcagaatttaatctgttaagcaaatcttttttgttcggaataggatatttaatccattgtaatgcttgatttaatggtttgtaatttatgactaagcggggtgttccacgctcaatctcagattgtttgttaacataaaaagccgcacaagaccat

SEQ ID NO: 9191 - DNA, 1234 bp, Glycine max
  Gm_smallRNAprecursor_2024
aatcaaccctgattaaaaatttttggtttaataaatccgattgaaatttggaaatgcacaaaacaattgctaaaacctcttttttaacagttgaatattttaattgtgcaggattccaatgttttgatgtatatgcaatgacatgatcttggccatggactctttgtttgaggatgccaccataacctatgtctgaagcatcagtttcgacaattttaaatgcctgtggaataggaagatacagacatttaatggattggactttgactttgatttctttaaccgtttgtgtatggaggtcagaccaaggaggcggatttttcttcagcctatcatgtaatggcttgacaatattatttaaataggggacaaattctcctacgtaatttagacaacctagaaatctttgtaactgggttttgtctaagatttggttggggaatttgctagcaaactctattgacctttcgattggaatgattgtaccttgatatatattgtgaccaaggaatcgaattcgagtttggaaaagattgatttttgatttggagactgccaaaccattttgtttgatgatatgtatgaaggtttggagatgtttgaaatgttggtcaatgttttgtgaaaagattaaaacatcatctatgtagacaatgacaaattttgaataaggattaaaaatatcgttcataattttttgaaattctgaaggggcattcttcagtccgaatggcatcacgttccattcatattgcccgaaaggtacagtaaacgctgttttgtacctatctgattcttggatttgccaaaatccagatttcatatcaaattttgaaaatatctttgcagaatttaatctgttaagcaaatcttttttgttcggaataggatatttaatccattgtaatgcttgatttaatggtttgtaatttatgactaagcggggtgttccacgctcaatctcagattgtttgttaacataaaaagccgcacaagaccatgggcttttgcttttccggattaggcctttatcaagcaaatccttgatttccttttgacagtattgaagaagttcttcattcatttggattggtctggcttttgtgggaatttgtttttccctaaagtctttctcataagggagatcgacaatatgtttctttctgtcccaaaatgcatgtggcaattcagaacaaacggtcgattcaatatgatttaataaagattgaattct

SEQ ID NO: 9192 - DNA, 1061 bp, Glycine max
  Gm_smallRNAprecursor_2025
caatattatttaaataggggacaaattctcctacgtaatttagacaacctagaaatctttgtaactgggttttgtctaagatttggttggggaatttgctagcaaactctattgacctttcgattggaatgattgtaccttgatatatattgtgaccaaggaatcgaattcgagtttggaaaagattgatttttgatttggagactgccaaaccattttgtttgatgatatgtatgaaggtttggagatgtttgaaatgttggtcaatgttttgtgaaaagattaaaacatcatctatgtagacaatgacaaattttgaataaggattaaaaatatcgttcataattttttgaaattctgaaggggcattcttcagtccgaatggcatcacgttccattcatattgcccgaaaggtacagtaaacgctgttttgtacctatctgattcttggatttgccaaaatccagatttcatatcaaattttgaaaatatctttgcagaatttaatctgttaagcaaatcttttttgttcggaataggatatttaatccattgtaatgcttgatttaatggtttgtaatttatgactaagcggggtgttccacgctcaatctcagattgtttgttaacataaaaagccgcacaagaccatgggcttttgcttttccggattaggcctttatcaagcaaatccttgatttccttttgacagtattgaagaagttcttcattcatttggattggtctggcttttgtgggaatttgtttttccctaaagtctttctcataagggagatcgacaatatgtttctttctgtcccaaaatgcatgtggcaattcagaacaaacggtcgattcaatatgatttaataaagattgaattctttcttttacttggggttttcctagttgtatctgaatattattaaaagatacttcttcttttaagttaattcgattaatcttattttctataagatttatatttctggaaattggtttagtagaaaaattaaatataatttttcttcctaaataatttgtggttattccttcatta

SEQ ID NO: 9193 - DNA, 1159 bp, Glycine max
  Gm_smallRNAprecursor_2026
acccatctttcgggaagagttacttcatcccattttatttttcttgggagagacacgttagcctttgtcatattagtgataaacaaggttgtttctcctttttgaggttttaacaggactctagatgcacaagtattcatgaccttgtactggatcctataaattaaggctgctgggattgatccttctttcatgtcaaggccatgaaagtggatgtttaagaacagagagtcaagaatgtttctgtccatcagactcactgtcttgtttggataacaattaaaatatattggaccttgtcctaggctggtttcgactgttccaattagggagtcttcaaattgattatgcctaatatctcttagacacattaaaactgctgcatctatgcccatatcaattaagggcttgatggctacttgtacacaaccgatgtgtagatatttatacttacgtatatgttcataaattgaattttttgaaagtagatgaaattcttcccctatatcttgtcctagaggaatattgttttctactgttttgattatgtaatcaaagttgtgtttgtctttaattgtttcaggaacgtatagttgatcctgagggatttctggaatgttccagtcatccatgttttgattaatatcttcgaatcggacttcctcatcgaagagattgtgttttggggcgacctcttgggtctggttatcttgatcatttaagagattggtgtttcttgaagaagatgaagaggaggaattcgagcgaaaagaaatacgggaaaacgatcgcaataatctagacatgattaaaacattctctaatatctttgccttcatttggttccataggaatcttcccataaggctatatgttacggaacttcttggatctggataaatgaaaaagaagattttttttttttttttttttacagacaatgtagtttgaacattactcctatagccaccagtatataatgtctcaataatttatttgaataatacaccttagccttactgccctttctcatccacgggacttactgctacagtatcattcaactaaaatatcagactgctgtgcttccagaaaatactgttcaaacacatactgtttaaattaaaattactgtacatgcttcagatccataagttca

SEQ ID NO: 9194 - DNA, 1141 bp, Glycine max
  Gm_smallRNAprecursor_2027
acggacactattcctacttccccatcaggctctgataccagaggtcagcggagtaggatcacacggacaaataggaagtaagaatgcagtatgattgatgaaatgaaaatataaacttgaaaacagatatcacagaggtcagcggagtaggatcacacggacaaataggaagtaagaatgcagtatgattgatgaaatgaaaatataaacttgaaaacagatatcaagggcacaccggagaccggcttacaaatcccaggttttcataaacaaagaaaccgaagcggcggcagagccgcacaggatcggtgaagggagaagagagaaagatgaaaaatagaaatttattgaatctagaaagaagcgcttacaaaaatcttgtttcagagcacctctcttccgaaacctgaaaaatggctaaaatgaaagggtgcctcacaacatgcttgaggactccttatatagccaaaaatctaagaccggtagttgccggtagttttgaccgggactatttgactgtttgttacaagacaagtagttttgaccgggactttaatggctacaggacaggtagtattgtccagcattaattacacattaattacaaacagacggttttgtgaccgaaattaaatttaatctaaacagataccaaaacaatcatcttcgttttggtaaaagggatcttcttcgtcttcttcagcagaacttgtttcttccttctttgaggatgaagcttcttcttcctgttgtaacacttgtagaacttccttcagatttttagctaagacctcctttgatgtcgatcctgctaaaaatgctgccagatgagacttttggttcaagaacacagaagtctctggatcagctgctttgaggaattctggatgggattggaaccatagttttacttgttctggatccgctttggatgagtcaaattgtgtccaccattttacaaatgcgtgtctttgtagtgatggatattggtttgtcttttcagtcttgctgtaacgatattgccatgagaatatccatgacagtgcaaagcttgaaaagtatttaagatctgctggaattcgtgattcctgcgaattgtattgtttcttaaattgggaaaatccttgttggaccatttctg

SEQ ID NO: 9195 - DNA, 1154 bp, Glycine max
  Gm_smallRNAprecursor_2028
acggacactattcctacttccccatcaggctctgataccagaggtcagcggagtaggatcacacggacaaataggaagtaagaatgcagtatgattgatgaaatgaaaatataaacttgaaaacagatatcacagaggtcagcggagtaggatcacacggacaaataggaagtaagaatgcagtatgattgatgaaatgaaaatataaacttgaaaacagatatcaagggcacaccggagaccggcttacaaatcccaggttttcataaacaaagaaaccgaagcggcggcagagccgcacaggatcggtgaagggagaagagagaaagatgaaaaatagaaatttattgaatctagaaagaagcgcttacaaaaatcttgtttcagagcacctctcttccgaaacctgaaaaatggctaaaatgaaagggtgcctcacaacatgcttgaggactccttatatagccaaaaatctaagaccggtagttgccggtagttttgaccgggactatttgactgtttgttacaagacaagtagttttgaccgggactttaatggctacaggacaggtagtattgtccagcattaattacacattaattacaaacagacggttttgtgaccgaaattaaatttaatctaaacagataccaaaacaatcatcttcgttttggtaaaagggatcttcttcgtcttcttcagcagaacttgtttcttccttctttgaggatgaagcttcttcttcctgttgtaacacttgtagaacttccttcagatttttagctaagacctcctttgatgtcgatcctgctaaaaatgctgccagatgagacttttggttcaagaacacagaagtctctggatcagctgctttgaggaattctggatgggattggaaccatagttttacttgttctggatccgctttggatgagtcaaattgtgtccaccattttacaaatgcgtgtctttgtagtgatggatattggtttgtcttttcagtcttgctgtaacgatattgccatgagaatatccatgacagtgcaaagcttgaaaagtatttaagatctgctggaattcgtgattcctgcgaattgtattgtttcttaaattgggaaaatccttgttggaccatttctgggaatatctctgg

SEQ ID NO: 9196 - DNA, 1061 bp, Glycine max
  Gm_smallRNAprecursor_2029
agcggagtaggatcacacggacaaataggaagtaagaatgcagtatgattgatgaaatgaaaatataaacttgaaaacagatatcaagggcacaccggagaccggcttacaaatcccaggttttcataaacaaagaaaccgaagcggcggcagagccgcacaggatcggtgaagggagaagagagaaagatgaaaaatagaaatttattgaatctagaaagaagcgcttacaaaaatcttgtttcagagcacctctcttccgaaacctgaaaaatggctaaaatgaaagggtgcctcacaacatgcttgaggactccttatatagccaaaaatctaagaccggtagttgccggtagttttgaccgggactatttgactgtttgttacaagacaagtagttttgaccgggactttaatggctacaggacaggtagtattgtccagcattaattacacattaattacaaacagacggttttgtgaccgaaattaaatttaatctaaacagataccaaaacaatcatcttcgttttggtaaaagggatcttcttcgtcttcttcagcagaacttgtttcttccttctttgaggatgaagcttcttcttcctgttgtaacacttgtagaacttccttcagatttttagctaagacctcctttgatgtcgatcctgctaaaaatgctgccagatgagacttttggttcaagaacacagaagtctctggatcagctgctttgaggaattctggatgggattggaaccatagttttacttgttctggatccgctttggatgagtcaaattgtgtccaccattttacaaatgcgtgtctttgtagtgatggatattggtttgtcttttcagtcttgctgtaacgatattgccatgagaatatccatgacagtgcaaagcttgaaaagtatttaagatctgctggaattcgtgattcctgcgaattgtattgtttcttaaattgggaaaatccttgttggaccatttctgggaatatctctgggattggtccaaagaagtcccaccattgcaaaaaccaattgggaaaat

SEQ ID NO: 9197 - DNA, 1063 bp, Glycine max
  Gm_smallRNAprecursor_2030
agcggagtaggatcacacggacaaataggaagtaagaatgcagtatgattgatgaaatgaaaatataaacttgaaaacagatatcaagggcacaccggagaccggcttacaaatcccaggttttcataaacaaagaaaccgaagcggcggcagagccgcacaggatcggtgaagggagaagagagaaagatgaaaaatagaaatttattgaatctagaaagaagcgcttacaaaaatcttgtttcagagcacctctcttccgaaacctgaaaaatggctaaaatgaaagggtgcctcacaacatgcttgaggactccttatatagccaaaaatctaagaccggtagttgccggtagttttgaccgggactatttgactgtttgttacaagacaagtagttttgaccgggactttaatggctacaggacaggtagtattgtccagcattaattacacattaattacaaacagacggttttgtgaccgaaattaaatttaatctaaacagataccaaaacaatcatcttcgttttggtaaaagggatcttcttcgtcttcttcagcagaacttgtttcttccttctttgaggatgaagcttcttcttcctgttgtaacacttgtagaacttccttcagatttttagctaagacctcctttgatgtcgatcctgctaaaaatgctgccagatgagacttttggttcaagaacacagaagtctctggatcagctgctttgaggaattctggatgggattggaaccatagttttacttgttctggatccgctttggatgagtcaaattgtgtccaccattttacaaatgcgtgtctttgtagtgatggatattggtttgtcttttcagtcttgctgtaacgatattgccatgagaatatccatgacagtgcaaagcttgaaaagtatttaagatctgctggaattcgtgattcctgcgaattgtattgtttcttaaattgggaaaatccttgttggaccatttctgggaatatctctgggattggtccaaagaagtcccaccattgcaaaaaccaattgggaaaattg

SEQ ID NO: 9198 - DNA, 1063 bp, Glycine max; identical to SEQ ID NO: 9197
  Gm_smallRNAprecursor_2031

SEQ ID NO: 9199 - DNA, 1064 bp, Glycine max
  Gm_smallRNAprecursor_2032
agcggagtaggatcacacggacaaataggaagtaagaatgcagtatgattgatgaaatgaaaatataaacttgaaaacagatatcaagggcacaccggagaccggcttacaaatcccaggttttcataaacaaagaaaccgaagcggcggcagagccgcacaggatcggtgaagggagaagagagaaagatgaaaaatagaaatttattgaatctagaaagaagcgcttacaaaaatcttgtttcagagcacctctcttccgaaacctgaaaaatggctaaaatgaaagggtgcctcacaacatgcttgaggactccttatatagccaaaaatctaagaccggtagttgccggtagttttgaccgggactatttgactgtttgttacaagacaagtagttttgaccgggactttaatggctacaggacaggtagtattgtccagcattaattacacattaattacaaacagacggttttgtgaccgaaattaaatttaatctaaacagataccaaaacaatcatcttcgttttggtaaaagggatcttcttcgtcttcttcagcagaacttgtttcttccttctttgaggatgaagcttcttcttcctgttgtaacacttgtagaacttccttcagatttttagctaagacctcctttgatgtcgatcctgctaaaaatgctgccagatgagacttttggttcaagaacacagaagtctctggatcagctgctttgaggaattctggatgggattggaaccatagttttacttgttctggatccgctttggatgagtcaaattgtgtccaccattttacaaatgcgtgtctttgtagtgatggatattggtttgtcttttcagtcttgctgtaacgatattgccatgagaatatccatgacagtgcaaagcttgaaaagtatttaagatctgctggaattcgtgattcctgcgaattgtattgtttcttaaattgggaaaatccttgttggaccatttctgggaatatctctgggattggtccaaagaagtcccaccattgcaaaaaccaattgggaaaattga

SEQ ID NO: 9200 - DNA, 1209 bp, Glycine max
  Gm_smallRNAprecursor_2033
agcggagtaggatcacacggacaaataggaagtaagaatgcagtatgattgatgaaatgaaaatataaacttgaaaacagatatcaagggcacaccggagaccggcttacaaatcccaggttttcataaacaaagaaaccgaagcggcggcagagccgcacaggatcggtgaagggagaagagagaaagatgaaaaatagaaatttattgaatctagaaagaagcgcttacaaaaatcttgtttcagagcacctctcttccgaaacctgaaaaatggctaaaatgaaagggtgcctcacaacatgcttgaggactccttatatagccaaaaatctaagaccggtagttgccggtagttttgaccgggactatttgactgtttgttacaagacaagtagttttgaccgggactttaatggctacaggacaggtagtattgtccagcattaattacacattaattacaaacagacggttttgtgaccgaaattaaatttaatctaaacagataccaaaacaatcatcttcgttttggtaaaagggatcttcttcgtcttcttcagcagaacttgtttcttccttctttgaggatgaagcttcttcttcctgttgtaacacttgtagaacttccttcagatttttagctaagacctcctttgatgtcgatcctgctaaaaatgctgccagatgagacttttggttcaagaacacagaagtctctggatcagctgctttgaggaattctggatgggattggaaccatagttttacttgttctggatccgctttggatgagtcaaattgtgtccaccattttacaaatgcgtgtctttgtagtgatggatattggtttgtcttttcagtcttgctgtaacgatattgccatgagaatatccatgacagtgcaaagcttgaaaagtatttaagatctgctggaattcgtgattcctgcgaattgtattgtttcttaaattgggaaaatccttgttggaccatttctgggaatatctctgggattggtccaaagaagtcccaccattgcaaaaaccaattgggaaaattgaaaattgtgttggtcttgaaatatatcagccatgagtgtttgaagcgggtattttggtgccaaaacaccttagtccaagcatcaacgtaatcccaataggtataacctaccggatcaaatggaactgaaaatctctttcctttgtt

SEQ ID NO: 9201 - DNA, 1057 bp, Glycine max
  Gm_smallRNAprecursor_2034
ggagtaggatcacacggacaaataggaagtaagaatgcagtatgattgatgaaatgaaaatataaacttgaaaacagatatcaagggcacaccggagaccggcttacaaatcccaggttttcataaacaaagaaaccgaagcggcggcagagccgcacaggatcggtgaagggagaagagagaaagatgaaaaatagaaatttattgaatctagaaagaagcgcttacaaaaatcttgtttcagagcacctctcttccgaaacctgaaaaatggctaaaatgaaagggtgcctcacaacatgcttgaggactccttatatagccaaaaatctaagaccggtagttgccggtagttttgaccgggactatttgactgtttgttacaagacaagtagttttgaccgggactttaatggctacaggacaggtagtattgtccagcattaattacacattaattacaaacagacggttttgtgaccgaaattaaatttaatctaaacagataccaaaacaatcatcttcgttttggtaaaagggatcttcttcgtcttcttcagcagaacttgtttcttccttctttgaggatgaagcttcttcttcctgttgtaacacttgtagaacttccttcagatttttagctaagacctcctttgatgtcgatcctgctaaaaatgctgccagatgagacttttggttcaagaacacagaagtctctggatcagctgctttgaggaattctggatgggattggaaccatagttttacttgttctggatccgctttggatgagtcaaattgtgtccaccattttacaaatgcgtgtctttgtagtgatggatattggtttgtcttttcagtcttgctgtaacgatattgccatgagaatatccatgacagtgcaaagcttgaaaagtatttaagatctgctggaattcgtgattcctgcgaattgtattgtttcttaaattgggaaaatccttgttggaccatttctgggaatatctctgggattggtccaaagaagtcccaccattgcaaaaaccaattgggaaaa

SEQ ID NO: 9202 - DNA, 1058 bp, Glycine max
  Gm_smallRNAprecursor_2035
ggagtaggatcacacggacaaataggaagtaagaatgcagtatgattgatgaaatgaaaatataaacttgaaaacagatatcaagggcacaccggagaccggcttacaaatcccaggttttcataaacaaagaaaccgaagcggcggcagagccgcacaggatcggtgaagggagaagagagaaagatgaaaaatagaaatttattgaatctagaaagaagcgcttacaaaaatcttgtttcagagcacctctcttccgaaacctgaaaaatggctaaaatgaaagggtgcctcacaacatgcttgaggactccttatatagccaaaaatctaagaccggtagttgccggtagttttgaccgggactatttgactgtttgttacaagacaagtagttttgaccgggactttaatggctacaggacaggtagtattgtccagcattaattacacattaattacaaacagacggttttgtgaccgaaattaaatttaatctaaacagataccaaaacaatcatcttcgttttggtaaaagggatcttcttcgtcttcttcagcagaacttgtttcttccttctttgaggatgaagcttcttcttcctgttgtaacacttgtagaacttccttcagatttttagctaagacctcctttgatgtcgatcctgctaaaaatgctgccagatgagacttttggttcaagaacacagaagtctctggatcagctgctttgaggaattctggatgggattggaaccatagttttacttgttctggatccgctttggatgagtcaaattgtgtccaccattttacaaatgcgtgtctttgtagtgatggatattggtttgtcttttcagtcttgctgtaacgatattgccatgagaatatccatgacagtgcaaagcttgaaaagtatttaagatctgctggaattcgtgattcctgcgaattgtattgtttcttaaattgggaaaatccttgttggaccatttctgggaatatctctgggattggtccaaagaagtcccaccattgcaaaaaccaattgggaaaat

SEQ ID NO: 9203 - DNA, 1083 bp, Glycine max
  Gm_smallRNAprecursor_2036
ggagtaggatcacacggacaaataggaagtaagaatgcagtatgattgatgaaatgaaaatataaacttgaaaacagatatcaagggcacaccggagaccggcttacaaatcccaggttttcataaacaaagaaaccgaagcggcggcagagccgcacaggatcggtgaagggagaagagagaaagatgaaaaatagaaatttattgaatctagaaagaagcgcttacaaaaatcttgtttcagagcacctctcttccgaaacctgaaaaatggctaaaatgaaagggtgcctcacaacatgcttgaggactccttatatagccaaaaatctaagaccggtagttgccggtagttttgaccgggactatttgactgtttgttacaagacaagtagttttgaccgggactttaatggctacaggacaggtagtattgtccagcattaattacacattaattacaaacagacggttttgtgaccgaaattaaatttaatctaaacagataccaaaacaatcatcttcgttttggtaaaagggatcttcttcgtcttcttcagcagaacttgtttcttccttctttgaggatgaagcttcttcttcctgttgtaacacttgtagaacttccttcagatttttagctaagacctcctttgatgtcgatcctgctaaaaatgctgccagatgagacttttggttcaagaacacagaagtctctggatcagctgctttgaggaattctggatgggattggaaccatagttttacttgttctggatccgctttggatgagtcaaattgtgtccaccattttacaaatgcgtgtctttgtagtgatggatattggtttgtcttttcagtcttgctgtaacgatattgccatgagaatatccatgacagtgcaaagcttgaaaagtatttaagatctgctggaattcgtgattcctgcgaattgtattgtttcttaaattgggaaaatccttgttggaccatttctgggaatatctctgggattggtccaaagaagtcccaccattgcaaaaaccaattgggaaaattgaaaattgtgttggtcttgaaata

SEQ ID NO: 9204 - DNA, 1056 bp, Glycine max
  Gm_smallRNAprecursor_2037
gagtaggatcacacggacaaataggaagtaagaatgcagtatgattgatgaaatgaaaatataaacttgaaaacagatatcaagggcacaccggagaccggcttacaaatcccaggttttcataaacaaagaaaccgaagcggcggcagagccgcacaggatcggtgaagggagaagagagaaagatgaaaaatagaaatttattgaatctagaaagaagcgcttacaaaaatcttgtttcagagcacctctcttccgaaacctgaaaaatggctaaaatgaaagggtgcctcacaacatgcttgaggactccttatatagccaaaaatctaagaccggtagttgccggtagttttgaccgggactatttgactgtttgttacaagacaagtagttttgaccgggactttaatggctacaggacaggtagtattgtccagcattaattacacattaattacaaacagacggttttgtgaccgaaattaaatttaatctaaacagataccaaaacaatcatcttcgttttggtaaaagggatcttcttcgtcttcttcagcagaacttgtttcttccttctttgaggatgaagcttcttcttcctgttgtaacacttgtagaacttccttcagatttttagctaagacctcctttgatgtcgatcctgctaaaaatgctgccagatgagacttttggttcaagaacacagaagtctctggatcagctgctttgaggaattctggatgggattggaaccatagttttacttgttctggatccgctttggatgagtcaaattgtgtccaccattttacaaatgcgtgtctttgtagtgatggatattggtttgtcttttcagtcttgctgtaacgatattgccatgagaatatccatgacagtgcaaagcttgaaaagtatttaagatctgctggaattcgtgattcctgcgaattgtattgtttcttaaattgggaaaatccttgttggaccatttctgggaatatctctgggattggtccaaagaagtcccaccattgcaaaaaccaattgggaaaa

SEQ ID NO: 9205 - DNA, 1056 bp, Glycine max; identical to SEQ ID NO: 9204
  Gm_smallRNAprecursor_2038

SEQ ID NO: 9206 - DNA, 1057 bp, Glycine max
  Gm_smallRNAprecursor_2039
gagtaggatcacacggacaaataggaagtaagaatgcagtatgattgatgaaatgaaaatataaacttgaaaacagatatcaagggcacaccggagaccggcttacaaatcccaggttttcataaacaaagaaaccgaagcggcggcagagccgcacaggatcggtgaagggagaagagagaaagatgaaaaatagaaatttattgaatctagaaagaagcgcttacaaaaatcttgtttcagagcacctctcttccgaaacctgaaaaatggctaaaatgaaagggtgcctcacaacatgcttgaggactccttatatagccaaaaatctaagaccggtagttgccggtagttttgaccgggactatttgactgtttgttacaagacaagtagttttgaccgggactttaatggctacaggacaggtagtattgtccagcattaattacacattaattacaaacagacggttttgtgaccgaaattaaatttaatctaaacagataccaaaacaatcatcttcgttttggtaaaagggatcttcttcgtcttcttcagcagaacttgtttcttccttctttgaggatgaagcttcttcttcctgttgtaacacttgtagaacttccttcagatttttagctaagacctcctttgatgtcgatcctgctaaaaatgctgccagatgagacttttggttcaagaacacagaagtctctggatcagctgctttgaggaattctggatgggattggaaccatagttttacttgttctggatccgctttggatgagtcaaattgtgtccaccattttacaaatgcgtgtctttgtagtgatggatattggtttgtcttttcagtcttgctgtaacgatattgccatgagaatatccatgacagtgcaaagcttgaaaagtatttaagatctgctggaattcgtgattcctgcgaattgtattgtttcttaaattgggaaaatccttgttggaccatttctgggaatatctctgggattggtccaaagaagtcccaccattgcaaaaaccaattgggaaaat

SEQ ID NO: 9207 - DNA, 1059 bp, Glycine max
  Gm_smallRNAprecursor_2040
gagtaggatcacacggacaaataggaagtaagaatgcagtatgattgatgaaatgaaaatataaacttgaaaacagatatcaagggcacaccggagaccggcttacaaatcccaggttttcataaacaaagaaaccgaagcggcggcagagccgcacaggatcggtgaagggagaagagagaaagatgaaaaatagaaatttattgaatctagaaagaagcgcttacaaaaatcttgtttcagagcacctctcttccgaaacctgaaaaatggctaaaatgaaagggtgcctcacaacatgcttgaggactccttatatagccaaaaatctaagaccggtagttgccggtagttttgaccgggactatttgactgtttgttacaagacaagtagttttgaccgggactttaatggctacaggacaggtagtattgtccagcattaattacacattaattacaaacagacggttttgtgaccgaaattaaatttaatctaaacagataccaaaacaatcatcttcgttttggtaaaagggatcttcttcgtcttcttcagcagaacttgtttcttccttctttgaggatgaagcttcttcttcctgttgtaacacttgtagaacttccttcagatttttagctaagacctcctttgatgtcgatcctgctaaaaatgctgccagatgagacttttggttcaagaacacagaagtctctggatcagctgctttgaggaattctggatgggattggaaccatagttttacttgttctggatccgctttggatgagtcaaattgtgtccaccattttacaaatgcgtgtctttgtagtgatggatattggtttgtcttttcagtcttgctgtaacgatattgccatgagaatatccatgacagtgcaaagcttgaaaagtatttaagatctgctggaattcgtgattcctgcgaattgtattgtttcttaaattgggaaaatccttgttggaccatttctgggaatatctctgggattggtccaaagaagtcccaccattgcaaaaaccaattgggaaaattg

SEQ ID NO: 9208 - DNA, 1059 bp, Glycine max; identical to SEQ ID NO: 9207
  Gm_smallRNAprecursor_2041

SEQ ID NO: 9209 - DNA, 1082 bp, Glycine max
  Gm_smallRNAprecursor_2042
gagtaggatcacacggacaaataggaagtaagaatgcagtatgattgatgaaatgaaaatataaacttgaaaacagatatcaagggcacaccggagaccggcttacaaatcccaggttttcataaacaaagaaaccgaagcggcggcagagccgcacaggatcggtgaagggagaagagagaaagatgaaaaatagaaatttattgaatctagaaagaagcgcttacaaaaatcttgtttcagagcacctctcttccgaaacctgaaaaatggctaaaatgaaagggtgcctcacaacatgcttgaggactccttatatagccaaaaatctaagaccggtagttgccggtagttttgaccgggactatttgactgtttgttacaagacaagtagttttgaccgggactttaatggctacaggacaggtagtattgtccagcattaattacacattaattacaaacagacggttttgtgaccgaaattaaatttaatctaaacagataccaaaacaatcatcttcgttttggtaaaagggatcttcttcgtcttcttcagcagaacttgtttcttccttctttgaggatgaagcttcttcttcctgttgtaacacttgtagaacttccttcagatttttagctaagacctcctttgatgtcgatcctgctaaaaatgctgccagatgagacttttggttcaagaacacagaagtctctggatcagctgctttgaggaattctggatgggattggaaccatagttttacttgttctggatccgctttggatgagtcaaattgtgtccaccattttacaaatgcgtgtctttgtagtgatggatattggtttgtcttttcagtcttgctgtaacgatattgccatgagaatatccatgacagtgcaaagcttgaaaagtatttaagatctgctggaattcgtgattcctgcgaattgtattgtttcttaaattgggaaaatccttgttggaccatttctgggaatatctctgggattggtccaaagaagtcccaccattgcaaaaaccaattgggaaaattgaaaattgtgttggtcttgaaata

SEQ ID NO: 9210 - DNA, 1055 bp, Glycine max
  Gm_smallRNAprecursor_2043
agtaggatcacacggacaaataggaagtaagaatgcagtatgattgatgaaatgaaaatataaacttgaaaacagatatcaagggcacaccggagaccggcttacaaatcccaggttttcataaacaaagaaaccgaagcggcggcagagccgcacaggatcggtgaagggagaagagagaaagatgaaaaatagaaatttattgaatctagaaagaagcgcttacaaaaatcttgtttcagagcacctctcttccgaaacctgaaaaatggctaaaatgaaagggtgcctcacaacatgcttgaggactccttatatagccaaaaatctaagaccggtagttgccggtagttttgaccgggactatttgactgtttgttacaagacaagtagttttgaccgggactttaatggctacaggacaggtagtattgtccagcattaattacacattaattacaaacagacggttttgtgaccgaaattaaatttaatctaaacagataccaaaacaatcatcttcgttttggtaaaagggatcttcttcgtcttcttcagcagaacttgtttcttccttctttgaggatgaagcttcttcttcctgttgtaacacttgtagaacttccttcagatttttagctaagacctcctttgatgtcgatcctgctaaaaatgctgccagatgagacttttggttcaagaacacagaagtctctggatcagctgctttgaggaattctggatgggattggaaccatagttttacttgttctggatccgctttggatgagtcaaattgtgtccaccattttacaaatgcgtgtctttgtagtgatggatattggtttgtcttttcagtcttgctgtaacgatattgccatgagaatatccatgacagtgcaaagcttgaaaagtatttaagatctgctggaattcgtgattcctgcgaattgtattgtttcttaaattgggaaaatccttgttggaccatttctgggaatatctctgggattggtccaaagaagtcccaccattgcaaaaaccaattgggaaaa

SEQ ID NO: 9211 - DNA, 1058 bp, Glycine max
  Gm_smallRNAprecursor_2044
agtaggatcacacggacaaataggaagtaagaatgcagtatgattgatgaaatgaaaatataaacttgaaaacagatatcaagggcacaccggagaccggcttacaaatcccaggttttcataaacaaagaaaccgaagcggcggcagagccgcacaggatcggtgaagggagaagagagaaagatgaaaaatagaaatttattgaatctagaaagaagcgcttacaaaaatcttgtttcagagcacctctcttccgaaacctgaaaaatggctaaaatgaaagggtgcctcacaacatgcttgaggactccttatatagccaaaaatctaagaccggtagttgccggtagttttgaccgggactatttgactgtttgttacaagacaagtagttttgaccgggactttaatggctacaggacaggtagtattgtccagcattaattacacattaattacaaacagacggttttgtgaccgaaattaaatttaatctaaacagataccaaaacaatcatcttcgttttggtaaaagggatcttcttcgtcttcttcagcagaacttgtttcttccttctttgaggatgaagcttcttcttcctgttgtaacacttgtagaacttccttcagatttttagctaagacctcctttgatgtcgatcctgctaaaaatgctgccagatgagacttttggttcaagaacacagaagtctctggatcagctgctttgaggaattctggatgggattggaaccatagttttacttgttctggatccgctttggatgagtcaaattgtgtccaccattttacaaatgcgtgtctttgtagtgatggatattggtttgtcttttcagtcttgctgtaacgatattgccatgagaatatccatgacagtgcaaagcttgaaaagtatttaagatctgctggaattcgtgattcctgcgaattgtattgtttcttaaattgggaaaatccttgttggaccatttctgggaatatctctgggattggtccaaagaagtcccaccattgcaaaaaccaattgggaaaattg

SEQ ID NO: 9212 - DNA, 1058 bp, Glycine max; identical to SEQ ID NO: 9211
  Gm_smallRNAprecursor_2045

SEQ ID NO: 9213 - DNA, 1081 bp, Glycine max
  Gm_smallRNAprecursor_2046
agtaggatcacacggacaaataggaagtaagaatgcagtatgattgatgaaatgaaaatataaacttgaaaacagatatcaagggcacaccggagaccggcttacaaatcccaggttttcataaacaaagaaaccgaagcggcggcagagccgcacaggatcggtgaagggagaagagagaaagatgaaaaatagaaatttattgaatctagaaagaagcgcttacaaaaatcttgtttcagagcacctctcttccgaaacctgaaaaatggctaaaatgaaagggtgcctcacaacatgcttgaggactccttatatagccaaaaatctaagaccggtagttgccggtagttttgaccgggactatttgactgtttgttacaagacaagtagttttgaccgggactttaatggctacaggacaggtagtattgtccagcattaattacacattaattacaaacagacggttttgtgaccgaaattaaatttaatctaaacagataccaaaacaatcatcttcgttttggtaaaagggatcttcttcgtcttcttcagcagaacttgtttcttccttctttgaggatgaagcttcttcttcctgttgtaacacttgtagaacttccttcagatttttagctaagacctcctttgatgtcgatcctgctaaaaatgctgccagatgagacttttggttcaagaacacagaagtctctggatcagctgctttgaggaattctggatgggattggaaccatagttttacttgttctggatccgctttggatgagtcaaattgtgtccaccattttacaaatgcgtgtctttgtagtgatggatattggtttgtcttttcagtcttgctgtaacgatattgccatgagaatatccatgacagtgcaaagcttgaaaagtatttaagatctgctggaattcgtgattcctgcgaattgtattgtttcttaaattgggaaaatccttgttggaccatttctgggaatatctctgggattggtccaaagaagtcccaccattgcaaaaaccaattgggaaaattgaaaattgtgttggtcttgaaata

SEQ ID NO: 9214 - DNA, 1054 bp, Glycine max
  Gm_smallRNAprecursor_2047
atcggtgaagggagaagagagaaagatgaaaaatagaaatttattgaatctagaaagaagcgcttacaaaaatcttgtttcagagcacctctcttccgaaacctgaaaaatggctaaaatgaaagggtgcctcacaacatgcttgaggactccttatatagccaaaaatctaagaccggtagttgccggtagttttgaccgggactatttgactgtttgttacaagacaagtagttttgaccgggactttaatggctacaggacaggtagtattgtccagcattaattacacattaattacaaacagacggttttgtgaccgaaattaaatttaatctaaacagataccaaaacaatcatcttcgttttggtaaaagggatcttcttcgtcttcttcagcagaacttgtttcttccttctttgaggatgaagcttcttcttcctgttgtaacacttgtagaacttccttcagatttttagctaagacctcctttgatgtcgatcctgctaaaaatgctgccagatgagacttttggttcaagaacacagaagtctctggatcagctgctttgaggaattctggatgggattggaaccatagttttacttgttctggatccgctttggatgagtcaaattgtgtccaccattttacaaatgcgtgtctttgtagtgatggatattggtttgtcttttcagtcttgctgtaacgatattgccatgagaatatccatgacagtgcaaagcttgaaaagtatttaagatctgctggaattcgtgattcctgcgaattgtattgtttcttaaattgggaaaatccttgttggaccatttctgggaatatctctgggattggtccaaagaagtcccaccattgcaaaaaccaattgggaaaattgaaaattgtgttggtcttgaaatatatcagccatgagtgtttgaagcgggtattttggtgccaaaacaccttagtccaagcatcaacgtaatcccaataggtataacctaccggatcaaatggaactgaaaatctctttcctttgttcaagtccga

SEQ ID NO: 9215 - DNA, 1055 bp, Glycine max
  Gm_smallRNAprecursor_2048
atcggtgaagggagaagagagaaagatgaaaaatagaaatttattgaatctagaaagaagcgcttacaaaaatcttgtttcagagcacctctcttccgaaacctgaaaaatggctaaaatgaaagggtgcctcacaacatgcttgaggactccttatatagccaaaaatctaagaccggtagttgccggtagttttgaccgggactatttgactgtttgttacaagacaagtagttttgaccgggactttaatggctacaggacaggtagtattgtccagcattaattacacattaattacaaacagacggttttgtgaccgaaattaaatttaatctaaacagataccaaaacaatcatcttcgttttggtaaaagggatcttcttcgtcttcttcagcagaacttgtttcttccttctttgaggatgaagcttcttcttcctgttgtaacacttgtagaacttccttcagatttttagctaagacctcctttgatgtcgatcctgctaaaaatgctgccagatgagacttttggttcaagaacacagaagtctctggatcagctgctttgaggaattctggatgggattggaaccatagttttacttgttctggatccgctttggatgagtcaaattgtgtccaccattttacaaatgcgtgtctttgtagtgatggatattggtttgtcttttcagtcttgctgtaacgatattgccatgagaatatccatgacagtgcaaagcttgaaaagtatttaagatctgctggaattcgtgattcctgcgaattgtattgtttcttaaattgggaaaatccttgttggaccatttctgggaatatctctgggattggtccaaagaagtcccaccattgcaaaaaccaattgggaaaattgaaaattgtgttggtcttgaaatatatcagccatgagtgtttgaagcgggtattttggtgccaaaacaccttagtccaagcatcaacgtaatcccaataggtataacctaccggatcaaatggaactgaaaatctctttcctttgttcaagtccgaa

SEQ ID NO: 9216 - DNA, 1053 bp, Glycine max
  Gm_smallRNAprecursor_2049
tcggtgaagggagaagagagaaagatgaaaaatagaaatttattgaatctagaaagaagcgcttacaaaaatcttgtttcagagcacctctcttccgaaacctgaaaaatggctaaaatgaaagggtgcctcacaacatgcttgaggactccttatatagccaaaaatctaagaccggtagttgccggtagttttgaccgggactatttgactgtttgttacaagacaagtagttttgaccgggactttaatggctacaggacaggtagtattgtccagcattaattacacattaattacaaacagacggttttgtgaccgaaattaaatttaatctaaacagataccaaaacaatcatcttcgttttggtaaaagggatcttcttcgtcttcttcagcagaacttgtttcttccttctttgaggatgaagcttcttcttcctgttgtaacacttgtagaacttccttcagatttttagctaagacctcctttgatgtcgatcctgctaaaaatgctgccagatgagacttttggttcaagaacacagaagtctctggatcagctgctttgaggaattctggatgggattggaaccatagttttacttgttctggatccgctttggatgagtcaaattgtgtccaccattttacaaatgcgtgtctttgtagtgatggatattggtttgtcttttcagtcttgctgtaacgatattgccatgagaatatccatgacagtgcaaagcttgaaaagtatttaagatctgctggaattcgtgattcctgcgaattgtattgtttcttaaattgggaaaatccttgttggaccatttctgggaatatctctgggattggtccaaagaagtcccaccattgcaaaaaccaattgggaaaattgaaaattgtgttggtcttgaaatatatcagccatgagtgtttgaagcgggtattttggtgccaaaacaccttagtccaagcatcaacgtaatcccaataggtataacctaccggatcaaatggaactgaaaatctctttcctttgttcaagtccga

SEQ ID NO: 9217 - DNA, 1042 bp, Glycine max
  Gm_smallRNAprecursor_2050
agggagaagagagaaagatgaaaaatagaaatttattgaatctagaaagaagcgcttacaaaaatcttgtttcagagcacctctcttccgaaacctgaaaaatggctaaaatgaaagggtgcctcacaacatgcttgaggactccttatatagccaaaaatctaagaccggtagttgccggtagttttgaccgggactatttgactgtttgttacaagacaagtagttttgaccgggactttaatggctacaggacaggtagtattgtccagcattaattacacattaattacaaacagacggttttgtgaccgaaattaaatttaatctaaacagataccaaaacaatcatcttcgttttggtaaaagggatcttcttcgtcttcttcagcagaacttgtttcttccttctttgaggatgaagcttcttcttcctgttgtaacacttgtagaacttccttcagatttttagctaagacctcctttgatgtcgatcctgctaaaaatgctgccagatgagacttttggttcaagaacacagaagtctctggatcagctgctttgaggaattctggatgggattggaaccatagttttacttgttctggatccgctttggatgagtcaaattgtgtccaccattttacaaatgcgtgtctttgtagtgatggatattggtttgtcttttcagtcttgctgtaacgatattgccatgagaatatccatgacagtgcaaagcttgaaaagtatttaagatctgctggaattcgtgattcctgcgaattgtattgtttcttaaattgggaaaatccttgttggaccatttctgggaatatctctgggattggtccaaagaagtcccaccattgcaaaaaccaattgggaaaattgaaaattgtgttggtcttgaaatatatcagccatgagtgtttgaagcgggtattttggtgccaaaacaccttagtccaagcatcaacgtaatcccaataggtataacctaccggatcaaatggaactgaaaatctctttcctttgttcaagt

SEQ ID NO: 9218 - DNA, 1032 bp, Glycine max
  Gm_smallRNAprecursor_2051
gaagagagaaagatgaaaaatagaaatttattgaatctagaaagaagcgcttacaaaaatcttgtttcagagcacctctcttccgaaacctgaaaaatggctaaaatgaaagggtgcctcacaacatgcttgaggactccttatatagccaaaaatctaagaccggtagttgccggtagttttgaccgggactatttgactgtttgttacaagacaagtagttttgaccgggactttaatggctacaggacaggtagtattgtccagcattaattacacattaattacaaacagacggttttgtgaccgaaattaaatttaatctaaacagataccaaaacaatcatcttcgttttggtaaaagggatcttcttcgtcttcttcagcagaacttgtttcttccttctttgaggatgaagcttcttcttcctgttgtaacacttgtagaacttccttcagatttttagctaagacctcctttgatgtcgatcctgctaaaaatgctgccagatgagacttttggttcaagaacacagaagtctctggatcagctgctttgaggaattctggatgggattggaaccatagttttacttgttctggatccgctttggatgagtcaaattgtgtccaccattttacaaatgcgtgtctttgtagtgatggatattggtttgtcttttcagtcttgctgtaacgatattgccatgagaatatccatgacagtgcaaagcttgaaaagtatttaagatctgctggaattcgtgattcctgcgaattgtattgtttcttaaattgggaaaatccttgttggaccatttctgggaatatctctgggattggtccaaagaagtcccaccattgcaaaaaccaattgggaaaattgaaaattgtgttggtcttgaaatatatcagccatgagtgtttgaagcgggtattttggtgccaaaacaccttagtccaagcatcaacgtaatcccaataggtataacctaccggatcaaatggaactgaaaatctctttcctttgtt

SEQ ID NO: 9219 - DNA, 1173 bp, Glycine max
  Gm_smallRNAprecursor_2052
aagaagcgcttacaaaaatcttgtttcagagcacctctcttccgaaacctgaaaaatggctaaaatgaaagggtgcctcacaacatgcttgaggactccttatatagccaaaaatctaagaccggtagttgccggtagttttgaccgggactatttgactgtttgttacaagacaagtagttttgaccgggactttaatggctacaggacaggtagtattgtccagcattaattacacattaattacaaacagacggttttgtgaccgaaattaaatttaatctaaacagataccaaaacaatcatcttcgttttggtaaaagggatcttcttcgtcttcttcagcagaacttgtttcttccttctttgaggatgaagcttcttcttcctgttgtaacacttgtagaacttccttcagatttttagctaagacctcctttgatgtcgatcctgctaaaaatgctgccagatgagacttttggttcaagaacacagaagtctctggatcagctgctttgaggaattctggatgggattggaaccatagttttacttgttctggatccgctttggatgagtcaaattgtgtccaccattttacaaatgcgtgtctttgtagtgatggatattggtttgtcttttcagtcttgctgtaacgatattgccatgagaatatccatgacagtgcaaagcttgaaaagtatttaagatctgctggaattcgtgattcctgcgaattgtattgtttcttaaattgggaaaatccttgttggaccatttctgggaatatctctgggattggtccaaagaagtcccaccattgcaaaaaccaattgggaaaattgaaaattgtgttggtcttgaaatatatcagccatgagtgtttgaagcgggtattttggtgccaaaacaccttagtccaagcatcaacgtaatcccaataggtataacctaccggatcaaatggaactgaaaatctctttcctttgttcaagtccgaaccaaagtgtcttggttgaagaacttttagtatttggatggttgagtgggtgtttaaggtttggtcttttggatctttgaaatgtttgatagatactgagtttgaatctaccaaaatcaattcataaaaagttcttgtcttcaggatggtggttggtttgtagtgaaatcctg

SEQ ID NO: 9220 - DNA, 1078 bp, Glycine max
  Gm_smallRNAprecursor_2053
ttacaaaaatcttgtttcagagcacctctcttccgaaacctgaaaaatggctaaaatgaaagggtgcctcacaacatgcttgaggactccttatatagccaaaaatctaagaccggtagttgccggtagttttgaccgggactatttgactgtttgttacaagacaagtagttttgaccgggactttaatggctacaggacaggtagtattgtccagcattaattacacattaattacaaacagacggttttgtgaccgaaattaaatttaatctaaacagataccaaaacaatcatcttcgttttggtaaaagggatcttcttcgtcttcttcagcagaacttgtttcttccttctttgaggatgaagcttcttcttcctgttgtaacacttgtagaacttccttcagatttttagctaagacctcctttgatgtcgatcctgctaaaaatgctgccagatgagacttttggttcaagaacacagaagtctctggatcagctgctttgaggaattctggatgggattggaaccatagttttacttgttctggatccgctttggatgagtcaaattgtgtccaccattttacaaatgcgtgtctttgtagtgatggatattggtttgtcttttcagtcttgctgtaacgatattgccatgagaatatccatgacagtgcaaagcttgaaaagtatttaagatctgctggaattcgtgattcctgcgaattgtattgtttcttaaattgggaaaatccttgttggaccatttctgggaatatctctgggattggtccaaagaagtcccaccattgcaaaaaccaattgggaaaattgaaaattgtgttggtcttgaaatatatcagccatgagtgtttgaagcgggtattttggtgccaaaacaccttagtccaagcatcaacgtaatcccaataggtataacctaccggatcaaatggaactgaaaatctctttcctttgttcaagtccgaaccaaagtgtcttggttgaagaacttttagtatttggatggttgagtgggtgtttaaggtttggtcttttggatctttgaaatgttt

SEQ ID NO: 9221 - DNA, 1164 bp, Glycine max
  Gm_smallRNAprecursor_2054
ttacaaaaatcttgtttcagagcacctctcttccgaaacctgaaaaatggctaaaatgaaagggtgcctcacaacatgcttgaggactccttatatagccaaaaatctaagaccggtagttgccggtagttttgaccgggactatttgactgtttgttacaagacaagtagttttgaccgggactttaatggctacaggacaggtagtattgtccagcattaattacacattaattacaaacagacggttttgtgaccgaaattaaatttaatctaaacagataccaaaacaatcatcttcgttttggtaaaagggatcttcttcgtcttcttcagcagaacttgtttcttccttctttgaggatgaagcttcttcttcctgttgtaacacttgtagaacttccttcagatttttagctaagacctcctttgatgtcgatcctgctaaaaatgctgccagatgagacttttggttcaagaacacagaagtctctggatcagctgctttgaggaattctggatgggattggaaccatagttttacttgttctggatccgctttggatgagtcaaattgtgtccaccattttacaaatgcgtgtctttgtagtgatggatattggtttgtcttttcagtcttgctgtaacgatattgccatgagaatatccatgacagtgcaaagcttgaaaagtatttaagatctgctggaattcgtgattcctgcgaattgtattgtttcttaaattgggaaaatccttgttggaccatttctgggaatatctctgggattggtccaaagaagtcccaccattgcaaaaaccaattgggaaaattgaaaattgtgttggtcttgaaatatatcagccatgagtgtttgaagcgggtattttggtgccaaaacaccttagtccaagcatcaacgtaatcccaataggtataacctaccggatcaaatggaactgaaaatctctttcctttgttcaagtccgaaccaaagtgtcttggttgaagaacttttagtatttggatggttgagtgggtgtttaaggtttggtcttttggatctttgaaatgtttgatagatactgagtttgaatctaccaaaatcaattcataaaaagttcttgtcttcaggatggtggttggtttgtagtgaaatcctg

SEQ ID NO: 9222 - DNA, 1077 bp, Glycine max
  Gm_smallRNAprecursor_2055
tacaaaaatcttgtttcagagcacctctcttccgaaacctgaaaaatggctaaaatgaaagggtgcctcacaacatgcttgaggactccttatatagccaaaaatctaagaccggtagttgccggtagttttgaccgggactatttgactgtttgttacaagacaagtagttttgaccgggactttaatggctacaggacaggtagtattgtccagcattaattacacattaattacaaacagacggttttgtgaccgaaattaaatttaatctaaacagataccaaaacaatcatcttcgttttggtaaaagggatcttcttcgtcttcttcagcagaacttgtttcttccttctttgaggatgaagcttcttcttcctgttgtaacacttgtagaacttccttcagatttttagctaagacctcctttgatgtcgatcctgctaaaaatgctgccagatgagacttttggttcaagaacacagaagtctctggatcagctgctttgaggaattctggatgggattggaaccatagttttacttgttctggatccgctttggatgagtcaaattgtgtccaccattttacaaatgcgtgtctttgtagtgatggatattggtttgtcttttcagtcttgctgtaacgatattgccatgagaatatccatgacagtgcaaagcttgaaaagtatttaagatctgctggaattcgtgattcctgcgaattgtattgtttcttaaattgggaaaatccttgttggaccatttctgggaatatctctgggattggtccaaagaagtcccaccattgcaaaaaccaattgggaaaattgaaaattgtgttggtcttgaaatatatcagccatgagtgtttgaagcgggtattttggtgccaaaacaccttagtccaagcatcaacgtaatcccaataggtataacctaccggatcaaatggaactgaaaatctctttcctttgttcaagtccgaaccaaagtgtcttggttgaagaacttttagtatttggatggttgagtgggtgtttaaggtttggtcttttggatctttgaaatgttt

SEQ ID NO: 9223 - DNA, 1163 bp, Glycine max
  Gm_smallRNAprecursor_2056
tacaaaaatcttgtttcagagcacctctcttccgaaacctgaaaaatggctaaaatgaaagggtgcctcacaacatgcttgaggactccttatatagccaaaaatctaagaccggtagttgccggtagttttgaccgggactatttgactgtttgttacaagacaagtagttttgaccgggactttaatggctacaggacaggtagtattgtccagcattaattacacattaattacaaacagacggttttgtgaccgaaattaaatttaatctaaacagataccaaaacaatcatcttcgttttggtaaaagggatcttcttcgtcttcttcagcagaacttgtttcttccttctttgaggatgaagcttcttcttcctgttgtaacacttgtagaacttccttcagatttttagctaagacctcctttgatgtcgatcctgctaaaaatgctgccagatgagacttttggttcaagaacacagaagtctctggatcagctgctttgaggaattctggatgggattggaaccatagttttacttgttctggatccgctttggatgagtcaaattgtgtccaccattttacaaatgcgtgtctttgtagtgatggatattggtttgtcttttcagtcttgctgtaacgatattgccatgagaatatccatgacagtgcaaagcttgaaaagtatttaagatctgctggaattcgtgattcctgcgaattgtattgtttcttaaattgggaaaatccttgttggaccatttctgggaatatctctgggattggtccaaagaagtcccaccattgcaaaaaccaattgggaaaattgaaaattgtgttggtcttgaaatatatcagccatgagtgtttgaagcgggtattttggtgccaaaacaccttagtccaagcatcaacgtaatcccaataggtataacctaccggatcaaatggaactgaaaatctctttcctttgttcaagtccgaaccaaagtgtcttggttgaagaacttttagtatttggatggttgagtgggtgtttaaggtttggtcttttggatctttgaaatgtttgatagatactgagtttgaatctaccaaaatcaattcataaaaagttcttgtcttcaggatggtggttggtttgtagtgaaatcctg

SEQ ID NO: 9224 - DNA, 1131 bp, Glycine max
  Gm_smallRNAprecursor_2057
acaagtagttttgaccgggactttaatggctacaggacaggtagtattgtccagcattaattacacattaattacaaacagacggttttgtgaccgaaattaaatttaatctaaacagataccaaaacaatcatcttcgttttggtaaaagggatcttcttcgtcttcttcagcagaacttgtttcttccttctttgaggatgaagcttcttcttcctgttgtaacacttgtagaacttccttcagatttttagctaagacctcctttgatgtcgatcctgctaaaaatgctgccagatgagacttttggttcaagaacacagaagtctctggatcagctgctttgaggaattctggatgggattggaaccatagttttacttgttctggatccgctttggatgagtcaaattgtgtccaccattttacaaatgcgtgtctttgtagtgatggatattggtttgtcttttcagtcttgctgtaacgatattgccatgagaatatccatgacagtgcaaagcttgaaaagtatttaagatctgctggaattcgtgattcctgcgaattgtattgtttcttaaattgggaaaatccttgttggaccatttctgggaatatctctgggattggtccaaagaagtcccaccattgcaaaaaccaattgggaaaattgaaaattgtgttggtcttgaaatatatcagccatgagtgtttgaagcgggtattttggtgccaaaacaccttagtccaagcatcaacgtaatcccaataggtataacctaccggatcaaatggaactgaaaatctctttcctttgttcaagtccgaaccaaagtgtcttggttgaagaacttttagtatttggatggttgagtgggtgtttaaggtttggtcttttggatctttgaaatgtttgatagatactgagtttgaatctaccaaaatcaattcataaaaagttcttgtcttcaggatggtggttggtttgtagtgaaatcctggtgggaaagccttggctgtcgccttgaagggatttttgtcccaaaattcaggttccatctgcaaaacagttaacaatttatttttataaatataattgttagtttgtttggtaggtggtgtttgagcttt

SEQ ID NO: 9225 - DNA, 1107 bp, Glycine max
  Gm_smallRNAprecursor_2058
gtagaacttccttcagatttttagctaagacctcctttgatgtcgatcctgctaaaaatgctgccagatgagacttttggttcaagaacacagaagtctctggatcagctgctttgaggaattctggatgggattggaaccatagttttacttgttctggatccgctttggatgagtcaaattgtgtccaccattttacaaatgcgtgtctttgtagtgatggatattggtttgtcttttcagtcttgctgtaacgatattgccatgagaatatccatgacagtgcaaagcttgaaaagtatttaagatctgctggaattcgtgattcctgcgaattgtattgtttcttaaattgggaaaatccttgttggaccatttctgggaatatctctgggattggtccaaagaagtcccaccattgcaaaaaccaattgggaaaattgaaaattgtgttggtcttgaaatatatcagccatgagtgtttgaagcgggtattttggtgccaaaacaccttagtccaagcatcaacgtaatcccaataggtataacctaccggatcaaatggaactgaaaatctctttcctttgttcaagtccgaaccaaagtgtcttggttgaagaacttttagtatttggatggttgagtgggtgtttaaggtttggtcttttggatctttgaaatgtttgatagatactgagtttgaatctaccaaaatcaattcataaaaagttcttgtcttcaggatggtggttggtttgtagtgaaatcctggtgggaaagccttggctgtcgccttgaagggatttttgtcccaaaattcaggttccatctgcaaaacagttaacaatttatttttataaatataattgttagtttgtttggtaggtggtgtttgagctttggctaaaggtagttttcctttagtattggtggctgttttggtcattgacgcattttggatcattgtttgtaaatttgattcagattcatcatcagattctgaggcaatgtctgcccaagattttttgattatttttggaaatttggtcagacccatgtcttgaagggcctgaagggtttcaattggccatgcatagtcggccgatg

SEQ ID NO: 9226 - DNA, 1107 bp, Glycine max; identical to SEQ ID NO: 9225
  Gm_smallRNAprecursor_2059

SEQ ID NO: 9227 - DNA, 1108 bp, Glycine max
  Gm_smallRNAprecursor_2060
gtagaacttccttcagatttttagctaagacctcctttgatgtcgatcctgctaaaaatgctgccagatgagacttttggttcaagaacacagaagtctctggatcagctgctttgaggaattctggatgggattggaaccatagttttacttgttctggatccgctttggatgagtcaaattgtgtccaccattttacaaatgcgtgtctttgtagtgatggatattggtttgtcttttcagtcttgctgtaacgatattgccatgagaatatccatgacagtgcaaagcttgaaaagtatttaagatctgctggaattcgtgattcctgcgaattgtattgtttcttaaattgggaaaatccttgttggaccatttctgggaatatctctgggattggtccaaagaagtcccaccattgcaaaaaccaattgggaaaattgaaaattgtgttggtcttgaaatatatcagccatgagtgtttgaagcgggtattttggtgccaaaacaccttagtccaagcatcaacgtaatcccaataggtataacctaccggatcaaatggaactgaaaatctctttcctttgttcaagtccgaaccaaagtgtcttggttgaagaacttttagtatttggatggttgagtgggtgtttaaggtttggtcttttggatctttgaaatgtttgatagatactgagtttgaatctaccaaaatcaattcataaaaagttcttgtcttcaggatggtggttggtttgtagtgaaatcctggtgggaaagccttggctgtcgccttgaagggatttttgtcccaaaattcaggttccatctgcaaaacagttaacaatttatttttataaatataattgttagtttgtttggtaggtggtgtttgagctttggctaaaggtagttttcctttagtattggtggctgttttggtcattgacgcattttggatcattgtttgtaaatttgattcagattcatcatcagattctgaggcaatgtctgcccaagattttttgattatttttggaaatttggtcagacccatgtcttgaagggcctgaagggtttcaattggccatgcatagtcggccgatgt

SEQ ID NO: 9228 - DNA, 1101 bp, Glycine max
  Gm_smallRNAprecursor_2061
gaacttccttcagatttttagctaagacctcctttgatgtcgatcctgctaaaaatgctgccagatgagacttttggttcaagaacacagaagtctctggatcagctgctttgaggaattctggatgggattggaaccatagttttacttgttctggatccgctttggatgagtcaaattgtgtccaccattttacaaatgcgtgtctttgtagtgatggatattggtttgtcttttcagtcttgctgtaacgatattgccatgagaatatccatgacagtgcaaagcttgaaaagtatttaagatctgctggaattcgtgattcctgcgaattgtattgtttcttaaattgggaaaatccttgttggaccatttctgggaatatctctgggattggtccaaagaagtcccaccattgcaaaaaccaattgggaaaattgaaaattgtgttggtcttgaaatatatcagccatgagtgtttgaagcgggtattttggtgccaaaacaccttagtccaagcatcaacgtaatcccaataggtataacctaccggatcaaatggaactgaaaatctctttcctttgttcaagtccgaaccaaagtgtcttggttgaagaacttttagtatttggatggttgagtgggtgtttaaggtttggtcttttggatctttgaaatgtttgatagatactgagtttgaatctaccaaaatcaattcataaaaagttcttgtcttcaggatggtggttggtttgtagtgaaatcctggtgggaaagccttggctgtcgccttgaagggatttttgtcccaaaattcaggttccatctgcaaaacagttaacaatttatttttataaatataattgttagtttgtttggtaggtggtgtttgagctttggctaaaggtagttttcctttagtattggtggctgttttggtcattgacgcattttggatcattgtttgtaaatttgattcagattcatcatcagattctgaggcaatgtctgcccaagattttttgattatttttggaaatttggtcagacccatgtcttgaagggcctgaagggtttcaattggccatgcatagtcggccg

SEQ ID NO: 9229 - DNA, 1134 bp, Glycine max
  Gm_smallRNAprecursor_2062
acttccttcagatttttagctaagacctcctttgatgtcgatcctgctaaaaatgctgccagatgagacttttggttcaagaacacagaagtctctggatcagctgctttgaggaattctggatgggattggaaccatagttttacttgttctggatccgctttggatgagtcaaattgtgtccaccattttacaaatgcgtgtctttgtagtgatggatattggtttgtcttttcagtcttgctgtaacgatattgccatgagaatatccatgacagtgcaaagcttgaaaagtatttaagatctgctggaattcgtgattcctgcgaattgtattgtttcttaaattgggaaaatccttgttggaccatttctgggaatatctctgggattggtccaaagaagtcccaccattgcaaaaaccaattgggaaaattgaaaattgtgttggtcttgaaatatatcagccatgagtgtttgaagcgggtattttggtgccaaaacaccttagtccaagcatcaacgtaatcccaataggtataacctaccggatcaaatggaactgaaaatctctttcctttgttcaagtccgaaccaaagtgtcttggttgaagaacttttagtatttggatggttgagtgggtgtttaaggtttggtcttttggatctttgaaatgtttgatagatactgagtttgaatctaccaaaatcaattcataaaaagttcttgtcttcaggatggtggttggtttgtagtgaaatcctggtgggaaagccttggctgtcgccttgaagggatttttgtcccaaaattcaggttccatctgcaaaacagttaacaatttatttttataaatataattgttagtttgtttggtaggtggtgtttgagctttggctaaaggtagttttcctttagtattggtggctgttttggtcattgacgcattttggatcattgtttgtaaatttgattcagattcatcatcagattctgaggcaatgtctgcccaagattttttgattatttttggaaatttggtcagacccatgtcttgaagggcctgaagggtttcaattggccatgcatagtcggccgatgtttgtttggcggttgccggtttgggagattcc

SEQ ID NO: 9230 - DNA, 1140 bp, Glycine max
  Gm_smallRNAprecursor_2063
tttttagctaagacctcctttgatgtcgatcctgctaaaaatgctgccagatgagacttttggttcaagaacacagaagtctctggatcagctgctttgaggaattctggatgggattggaaccatagttttacttgttctggatccgctttggatgagtcaaattgtgtccaccattttacaaatgcgtgtctttgtagtgatggatattggtttgtcttttcagtcttgctgtaacgatattgccatgagaatatccatgacagtgcaaagcttgaaaagtatttaagatctgctggaattcgtgattcctgcgaattgtattgtttcttaaattgggaaaatccttgttggaccatttctgggaatatctctgggattggtccaaagaagtcccaccattgcaaaaaccaattgggaaaattgaaaattgtgttggtcttgaaatatatcagccatgagtgtttgaagcgggtattttggtgccaaaacaccttagtccaagcatcaacgtaatcccaataggtataacctaccggatcaaatggaactgaaaatctctttcctttgttcaagtccgaaccaaagtgtcttggttgaagaacttttagtatttggatggttgagtgggtgtttaaggtttggtcttttggatctttgaaatgtttgatagatactgagtttgaatctaccaaaatcaattcataaaaagttcttgtcttcaggatggtggttggtttgtagtgaaatcctggtgggaaagccttggctgtcgccttgaagggatttttgtcccaaaattcaggttccatctgcaaaacagttaacaatttatttttataaatataattgttagtttgtttggtaggtggtgtttgagctttggctaaaggtagttttcctttagtattggtggctgttttggtcattgacgcattttggatcattgtttgtaaatttgattcagattcatcatcagattctgaggcaatgtctgcccaagattttttgattatttttggaaatttggtcagacccatgtcttgaagggcctgaagggtttcaattggccatgcatagtcggccgatgtttgtttggcggttgccggtttgggagattcctgagtggatggctcaggt

SEQ ID NO: 9231 - DNA, 1090 bp, Glycine max
  Gm_smallRNAprecursor_2064
gtcgatcctgctaaaaatgctgccagatgagacttttggttcaagaacacagaagtctctggatcagctgctttgaggaattctggatgggattggaaccatagttttacttgttctggatccgctttggatgagtcaaattgtgtccaccattttacaaatgcgtgtctttgtagtgatggatattggtttgtcttttcagtcttgctgtaacgatattgccatgagaatatccatgacagtgcaaagcttgaaaagtatttaagatctgctggaattcgtgattcctgcgaattgtattgtttcttaaattgggaaaatccttgttggaccatttctgggaatatctctgggattggtccaaagaagtcccaccattgcaaaaaccaattgggaaaattgaaaattgtgttggtcttgaaatatatcagccatgagtgtttgaagcgggtattttggtgccaaaacaccttagtccaagcatcaacgtaatcccaataggtataacctaccggatcaaatggaactgaaaatctctttcctttgttcaagtccgaaccaaagtgtcttggttgaagaacttttagtatttggatggttgagtgggtgtttaaggtttggtcttttggatctttgaaatgtttgatagatactgagtttgaatctaccaaaatcaattcataaaaagttcttgtcttcaggatggtggttggtttgtagtgaaatcctggtgggaaagccttggctgtcgccttgaagggatttttgtcccaaaattcaggttccatctgcaaaacagttaacaatttatttttataaatataattgttagtttgtttggtaggtggtgtttgagctttggctaaaggtagttttcctttagtattggtggctgttttggtcattgacgcattttggatcattgtttgtaaatttgattcagattcatcatcagattctgaggcaatgtctgcccaagattttttgattatttttggaaatttggtcagacccatgtcttgaagggcctgaagggtttcaattggccatgcatagtcggccgatgtttgtttggcggttgccggtttgg

SEQ ID NO: 9232 - DNA, 1087 bp, Glycine max
  Gm_smallRNAprecursor_2065
gatcctgctaaaaatgctgccagatgagacttttggttcaagaacacagaagtctctggatcagctgctttgaggaattctggatgggattggaaccatagttttacttgttctggatccgctttggatgagtcaaattgtgtccaccattttacaaatgcgtgtctttgtagtgatggatattggtttgtcttttcagtcttgctgtaacgatattgccatgagaatatccatgacagtgcaaagcttgaaaagtatttaagatctgctggaattcgtgattcctgcgaattgtattgtttcttaaattgggaaaatccttgttggaccatttctgggaatatctctgggattggtccaaagaagtcccaccattgcaaaaaccaattgggaaaattgaaaattgtgttggtcttgaaatatatcagccatgagtgtttgaagcgggtattttggtgccaaaacaccttagtccaagcatcaacgtaatcccaataggtataacctaccggatcaaatggaactgaaaatctctttcctttgttcaagtccgaaccaaagtgtcttggttgaagaacttttagtatttggatggttgagtgggtgtttaaggtttggtcttttggatctttgaaatgtttgatagatactgagtttgaatctaccaaaatcaattcataaaaagttcttgtcttcaggatggtggttggtttgtagtgaaatcctggtgggaaagccttggctgtcgccttgaagggatttttgtcccaaaattcaggttccatctgcaaaacagttaacaatttatttttataaatataattgttagtttgtttggtaggtggtgtttgagctttggctaaaggtagttttcctttagtattggtggctgttttggtcattgacgcattttggatcattgtttgtaaatttgattcagattcatcatcagattctgaggcaatgtctgcccaagattttttgattatttttggaaatttggtcagacccatgtcttgaagggcctgaagggtttcaattggccatgcatagtcggccgatgtttgtttggcggttgccggtttgg

SEQ ID NO: 9233 - DNA, 1224 bp, Glycine max
  Gm_smallRNAprecursor_2066
tgctttgaggaattctggatgggattggaaccatagttttacttgttctggatccgctttggatgagtcaaattgtgtccaccattttacaaatgcgtgtctttgtagtgatggatattggtttgtcttttcagtcttgctgtaacgatattgccatgagaatatccatgacagtgcaaagcttgaaaagtatttaagatctgctggaattcgtgattcctgcgaattgtattgtttcttaaattgggaaaatccttgttggaccatttctgggaatatctctgggattggtccaaagaagtcccaccattgcaaaaaccaattgggaaaattgaaaattgtgttggtcttgaaatatatcagccatgagtgtttgaagcgggtattttggtgccaaaacaccttagtccaagcatcaacgtaatcccaataggtataacctaccggatcaaatggaactgaaaatctctttcctttgttcaagtccgaaccaaagtgtcttggttgaagaacttttagtatttggatggttgagtgggtgtttaaggtttggtcttttggatctttgaaatgtttgatagatactgagtttgaatctaccaaaatcaattcataaaaagttcttgtcttcaggatggtggttggtttgtagtgaaatcctggtgggaaagccttggctgtcgccttgaagggatttttgtcccaaaattcaggttccatctgcaaaacagttaacaatttatttttataaatataattgttagtttgtttggtaggtggtgtttgagctttggctaaaggtagttttcctttagtattggtggctgttttggtcattgacgcattttggatcattgtttgtaaatttgattcagattcatcatcagattctgaggcaatgtctgcccaagattttttgattatttttggaaatttggtcagacccatgtcttgaagggcctgaagggtttcaattggccatgcatagtcggccgatgtttgtttggcggttgccggtttgggagattcctgagtggatggctcaggtttgattgaggcaatctgggttgatgacccttctaaattggttttctgggtagatgacccagcctgggttggtgacccagaagaggtagatgatttcttgatggttggctctggaagagccagcctggctcctttgcctgtactccttcctccccgtagggagattcccgatgcctt

SEQ ID NO: 9234 - DNA, 1222 bp, Glycine max
  Gm_smallRNAprecursor_2067
ctttgaggaattctggatgggattggaaccatagttttacttgttctggatccgctttggatgagtcaaattgtgtccaccattttacaaatgcgtgtctttgtagtgatggatattggtttgtcttttcagtcttgctgtaacgatattgccatgagaatatccatgacagtgcaaagcttgaaaagtatttaagatctgctggaattcgtgattcctgcgaattgtattgtttcttaaattgggaaaatccttgttggaccatttctgggaatatctctgggattggtccaaagaagtcccaccattgcaaaaaccaattgggaaaattgaaaattgtgttggtcttgaaatatatcagccatgagtgtttgaagcgggtattttggtgccaaaacaccttagtccaagcatcaacgtaatcccaataggtataacctaccggatcaaatggaactgaaaatctctttcctttgttcaagtccgaaccaaagtgtcttggttgaagaacttttagtatttggatggttgagtgggtgtttaaggtttggtcttttggatctttgaaatgtttgatagatactgagtttgaatctaccaaaatcaattcataaaaagttcttgtcttcaggatggtggttggtttgtagtgaaatcctggtgggaaagccttggctgtcgccttgaagggatttttgtcccaaaattcaggttccatctgcaaaacagttaacaatttatttttataaatataattgttagtttgtttggtaggtggtgtttgagctttggctaaaggtagttttcctttagtattggtggctgttttggtcattgacgcattttggatcattgtttgtaaatttgattcagattcatcatcagattctgaggcaatgtctgcccaagattttttgattatttttggaaatttggtcagacccatgtcttgaagggcctgaagggtttcaattggccatgcatagtcggccgatgtttgtttggcggttgccggtttgggagattcctgagtggatggctcaggtttgattgaggcaatctgggttgatgacccttctaaattggttttctgggtagatgacccagcctgggttggtgacccagaagaggtagatgatttcttgatggttggctctggaagagccagcctggctcctttgcctgtactccttcctccccgtagggagattcccgatgcctt

SEQ ID NO: 9235 - DNA, 1193 bp, Glycine max
  Gm_smallRNAprecursor_2068
accatagttttacttgttctggatccgctttggatgagtcaaattgtgtccaccattttacaaatgcgtgtctttgtagtgatggatattggtttgtcttttcagtcttgctgtaacgatattgccatgagaatatccatgacagtgcaaagcttgaaaagtatttaagatctgctggaattcgtgattcctgcgaattgtattgtttcttaaattgggaaaatccttgttggaccatttctgggaatatctctgggattggtccaaagaagtcccaccattgcaaaaaccaattgggaaaattgaaaattgtgttggtcttgaaatatatcagccatgagtgtttgaagcgggtattttggtgccaaaacaccttagtccaagcatcaacgtaatcccaataggtataacctaccggatcaaatggaactgaaaatctctttcctttgttcaagtccgaaccaaagtgtcttggttgaagaacttttagtatttggatggttgagtgggtgtttaaggtttggtcttttggatctttgaaatgtttgatagatactgagtttgaatctaccaaaatcaattcataaaaagttcttgtcttcaggatggtggttggtttgtagtgaaatcctggtgggaaagccttggctgtcgccttgaagggatttttgtcccaaaattcaggttccatctgcaaaacagttaacaatttatttttataaatataattgttagtttgtttggtaggtggtgtttgagctttggctaaaggtagttttcctttagtattggtggctgttttggtcattgacgcattttggatcattgtttgtaaatttgattcagattcatcatcagattctgaggcaatgtctgcccaagattttttgattatttttggaaatttggtcagacccatgtcttgaagggcctgaagggtttcaattggccatgcatagtcggccgatgtttgtttggcggttgccggtttgggagattcctgagtggatggctcaggtttgattgaggcaatctgggttgatgacccttctaaattggttttctgggtagatgacccagcctgggttggtgacccagaagaggtagatgatttcttgatggttggctctggaagagccagcctggctcctttgcctgtactccttcctccccgtagggagattcccgatgcc

SEQ ID NO: 9236 - DNA, 1195 bp, Glycine max
  Gm_smallRNAprecursor_2069
accatagttttacttgttctggatccgctttggatgagtcaaattgtgtccaccattttacaaatgcgtgtctttgtagtgatggatattggtttgtcttttcagtcttgctgtaacgatattgccatgagaatatccatgacagtgcaaagcttgaaaagtatttaagatctgctggaattcgtgattcctgcgaattgtattgtttcttaaattgggaaaatccttgttggaccatttctgggaatatctctgggattggtccaaagaagtcccaccattgcaaaaaccaattgggaaaattgaaaattgtgttggtcttgaaatatatcagccatgagtgtttgaagcgggtattttggtgccaaaacaccttagtccaagcatcaacgtaatcccaataggtataacctaccggatcaaatggaactgaaaatctctttcctttgttcaagtccgaaccaaagtgtcttggttgaagaacttttagtatttggatggttgagtgggtgtttaaggtttggtcttttggatctttgaaatgtttgatagatactgagtttgaatctaccaaaatcaattcataaaaagttcttgtcttcaggatggtggttggtttgtagtgaaatcctggtgggaaagccttggctgtcgccttgaagggatttttgtcccaaaattcaggttccatctgcaaaacagttaacaatttatttttataaatataattgttagtttgtttggtaggtggtgtttgagctttggctaaaggtagttttcctttagtattggtggctgttttggtcattgacgcattttggatcattgtttgtaaatttgattcagattcatcatcagattctgaggcaatgtctgcccaagattttttgattatttttggaaatttggtcagacccatgtcttgaagggcctgaagggtttcaattggccatgcatagtcggccgatgtttgtttggcggttgccggtttgggagattcctgagtggatggctcaggtttgattgaggcaatctgggttgatgacccttctaaattggttttctgggtagatgacccagcctgggttggtgacccagaagaggtagatgatttcttgatggttggctctggaagagccagcctggctcctttgcctgtactccttcctccccgtagggagattcccgatgcctt

SEQ ID NO: 9237 - DNA, 1058 bp, Glycine max
  Gm_smallRNAprecursor_2070
tacttgttctggatccgctttggatgagtcaaattgtgtccaccattttacaaatgcgtgtctttgtagtgatggatattggtttgtcttttcagtcttgctgtaacgatattgccatgagaatatccatgacagtgcaaagcttgaaaagtatttaagatctgctggaattcgtgattcctgcgaattgtattgtttcttaaattgggaaaatccttgttggaccatttctgggaatatctctgggattggtccaaagaagtcccaccattgcaaaaaccaattgggaaaattgaaaattgtgttggtcttgaaatatatcagccatgagtgtttgaagcgggtattttggtgccaaaacaccttagtccaagcatcaacgtaatcccaataggtataacctaccggatcaaatggaactgaaaatctctttcctttgttcaagtccgaaccaaagtgtcttggttgaagaacttttagtatttggatggttgagtgggtgtttaaggtttggtcttttggatctttgaaatgtttgatagatactgagtttgaatctaccaaaatcaattcataaaaagttcttgtcttcaggatggtggttggtttgtagtgaaatcctggtgggaaagccttggctgtcgccttgaagggatttttgtcccaaaattcaggttccatctgcaaaacagttaacaatttatttttataaatataattgttagtttgtttggtaggtggtgtttgagctttggctaaaggtagttttcctttagtattggtggctgttttggtcattgacgcattttggatcattgtttgtaaatttgattcagattcatcatcagattctgaggcaatgtctgcccaagattttttgattatttttggaaatttggtcagacccatgtcttgaagggcctgaagggtttcaattggccatgcatagtcggccgatgtttgtttggcggttgccggtttgggagattcctgagtggatggctcaggtttgattgaggcaatctgggttgatgacccttctaaattggttttctggg

SEQ ID NO: 9238 - DNA, 1176 bp, Glycine max
  Gm_smallRNAprecursor_2071
tacttgttctggatccgctttggatgagtcaaattgtgtccaccattttacaaatgcgtgtctttgtagtgatggatattggtttgtcttttcagtcttgctgtaacgatattgccatgagaatatccatgacagtgcaaagcttgaaaagtatttaagatctgctggaattcgtgattcctgcgaattgtattgtttcttaaattgggaaaatccttgttggaccatttctgggaatatctctgggattggtccaaagaagtcccaccattgcaaaaaccaattgggaaaattgaaaattgtgttggtcttgaaatatatcagccatgagtgtttgaagcgggtattttggtgccaaaacaccttagtccaagcatcaacgtaatcccaataggtataacctaccggatcaaatggaactgaaaatctctttcctttgttcaagtccgaaccaaagtgtcttggttgaagaacttttagtatttggatggttgagtgggtgtttaaggtttggtcttttggatctttgaaatgtttgatagatactgagtttgaatctaccaaaatcaattcataaaaagttcttgtcttcaggatggtggttggtttgtagtgaaatcctggtgggaaagccttggctgtcgccttgaagggatttttgtcccaaaattcaggttccatctgcaaaacagttaacaatttatttttataaatataattgttagtttgtttggtaggtggtgtttgagctttggctaaaggtagttttcctttagtattggtggctgttttggtcattgacgcattttggatcattgtttgtaaatttgattcagattcatcatcagattctgaggcaatgtctgcccaagattttttgattatttttggaaatttggtcagacccatgtcttgaagggcctgaagggtttcaattggccatgcatagtcggccgatgtttgtttggcggttgccggtttgggagattcctgagtggatggctcaggtttgattgaggcaatctgggttgatgacccttctaaattggttttctgggtagatgacccagcctgggttggtgacccagaagaggtagatgatttcttgatggttggctctggaagagccagcctggctcctttgcctgtactccttcctccccgtagggagattcc

SEQ ID NO: 9239 - DNA, 1183 bp, Glycine max
  Gm_smallRNAprecursor_2072
tacttgttctggatccgctttggatgagtcaaattgtgtccaccattttacaaatgcgtgtctttgtagtgatggatattggtttgtcttttcagtcttgctgtaacgatattgccatgagaatatccatgacagtgcaaagcttgaaaagtatttaagatctgctggaattcgtgattcctgcgaattgtattgtttcttaaattgggaaaatccttgttggaccatttctgggaatatctctgggattggtccaaagaagtcccaccattgcaaaaaccaattgggaaaattgaaaattgtgttggtcttgaaatatatcagccatgagtgtttgaagcgggtattttggtgccaaaacaccttagtccaagcatcaacgtaatcccaataggtataacctaccggatcaaatggaactgaaaatctctttcctttgttcaagtccgaaccaaagtgtcttggttgaagaacttttagtatttggatggttgagtgggtgtttaaggtttggtcttttggatctttgaaatgtttgatagatactgagtttgaatctaccaaaatcaattcataaaaagttcttgtcttcaggatggtggttggtttgtagtgaaatcctggtgggaaagccttggctgtcgccttgaagggatttttgtcccaaaattcaggttccatctgcaaaacagttaacaatttatttttataaatataattgttagtttgtttggtaggtggtgtttgagctttggctaaaggtagttttcctttagtattggtggctgttttggtcattgacgcattttggatcattgtttgtaaatttgattcagattcatcatcagattctgaggcaatgtctgcccaagattttttgattatttttggaaatttggtcagacccatgtcttgaagggcctgaagggtttcaattggccatgcatagtcggccgatgtttgtttggcggttgccggtttgggagattcctgagtggatggctcaggtttgattgaggcaatctgggttgatgacccttctaaattggttttctgggtagatgacccagcctgggttggtgacccagaagaggtagatgatttcttgatggttggctctggaagagccagcctggctcctttgcctgtactccttcctccccgtagggagattcccgatgcc

SEQ ID NO: 9240 - DNA, 1159 bp, Glycine max
  Gm_smallRNAprecursor_2073
ctggatccgctttggatgagtcaaattgtgtccaccattttacaaatgcgtgtctttgtagtgatggatattggtttgtcttttcagtcttgctgtaacgatattgccatgagaatatccatgacagtgcaaagcttgaaaagtatttaagatctgctggaattcgtgattcctgcgaattgtattgtttcttaaattgggaaaatccttgttggaccatttctgggaatatctctgggattggtccaaagaagtcccaccattgcaaaaaccaattgggaaaattgaaaattgtgttggtcttgaaatatatcagccatgagtgtttgaagcgggtattttggtgccaaaacaccttagtccaagcatcaacgtaatcccaataggtataacctaccggatcaaatggaactgaaaatctctttcctttgttcaagtccgaaccaaagtgtcttggttgaagaacttttagtatttggatggttgagtgggtgtttaaggtttggtcttttggatctttgaaatgtttgatagatactgagtttgaatctaccaaaatcaattcataaaaagttcttgtcttcaggatggtggttggtttgtagtgaaatcctggtgggaaagccttggctgtcgccttgaagggatttttgtcccaaaattcaggttccatctgcaaaacagttaacaatttatttttataaatataattgttagtttgtttggtaggtggtgtttgagctttggctaaaggtagttttcctttagtattggtggctgttttggtcattgacgcattttggatcattgtttgtaaatttgattcagattcatcatcagattctgaggcaatgtctgcccaagattttttgattatttttggaaatttggtcagacccatgtcttgaagggcctgaagggtttcaattggccatgcatagtcggccgatgtttgtttggcggttgccggtttgggagattcctgagtggatggctcaggtttgattgaggcaatctgggttgatgacccttctaaattggttttctgggtagatgacccagcctgggttggtgacccagaagaggtagatgatttcttgatggttggctctggaagagccagcctggctcctttgcctgtactccttcctccccgtag

SEQ ID NO: 9241 - DNA, 1098 bp, Glycine max
  Gm_smallRNAprecursor_2074
gtgtctttgtagtgatggatattggtttgtcttttcagtcttgctgtaacgatattgccatgagaatatccatgacagtgcaaagcttgaaaagtatttaagatctgctggaattcgtgattcctgcgaattgtattgtttcttaaattgggaaaatccttgttggaccatttctgggaatatctctgggattggtccaaagaagtcccaccattgcaaaaaccaattgggaaaattgaaaattgtgttggtcttgaaatatatcagccatgagtgtttgaagcgggtattttggtgccaaaacaccttagtccaagcatcaacgtaatcccaataggtataacctaccggatcaaatggaactgaaaatctctttcctttgttcaagtccgaaccaaagtgtcttggttgaagaacttttagtatttggatggttgagtgggtgtttaaggtttggtcttttggatctttgaaatgtttgatagatactgagtttgaatctaccaaaatcaattcataaaaagttcttgtcttcaggatggtggttggtttgtagtgaaatcctggtgggaaagccttggctgtcgccttgaagggatttttgtcccaaaattcaggttccatctgcaaaacagttaacaatttatttttataaatataattgttagtttgtttggtaggtggtgtttgagctttggctaaaggtagttttcctttagtattggtggctgttttggtcattgacgcattttggatcattgtttgtaaatttgattcagattcatcatcagattctgaggcaatgtctgcccaagattttttgattatttttggaaatttggtcagacccatgtcttgaagggcctgaagggtttcaattggccatgcatagtcggccgatgtttgtttggcggttgccggtttgggagattcctgagtggatggctcaggtttgattgaggcaatctgggttgatgacccttctaaattggttttctgggtagatgacccagcctgggttggtgacccagaagaggtagatgatttcttgatggttggctctggaagagccagcctggctcctttgcctgtactcct

SEQ ID NO: 9242 - DNA, 1098 bp, Glycine max
  Gm_smallRNAprecursor_2075
ttggtttgtcttttcagtcttgctgtaacgatattgccatgagaatatccatgacagtgcaaagcttgaaaagtatttaagatctgctggaattcgtgattcctgcgaattgtattgtttcttaaattgggaaaatccttgttggaccatttctgggaatatctctgggattggtccaaagaagtcccaccattgcaaaaaccaattgggaaaattgaaaattgtgttggtcttgaaatatatcagccatgagtgtttgaagcgggtattttggtgccaaaacaccttagtccaagcatcaacgtaatcccaataggtataacctaccggatcaaatggaactgaaaatctctttcctttgttcaagtccgaaccaaagtgtcttggttgaagaacttttagtatttggatggttgagtgggtgtttaaggtttggtcttttggatctttgaaatgtttgatagatactgagtttgaatctaccaaaatcaattcataaaaagttcttgtcttcaggatggtggttggtttgtagtgaaatcctggtgggaaagccttggctgtcgccttgaagggatttttgtcccaaaattcaggttccatctgcaaaacagttaacaatttatttttataaatataattgttagtttgtttggtaggtggtgtttgagctttggctaaaggtagttttcctttagtattggtggctgttttggtcattgacgcattttggatcattgtttgtaaatttgattcagattcatcatcagattctgaggcaatgtctgcccaagattttttgattatttttggaaatttggtcagacccatgtcttgaagggcctgaagggtttcaattggccatgcatagtcggccgatgtttgtttggcggttgccggtttgggagattcctgagtggatggctcaggtttgattgaggcaatctgggttgatgacccttctaaattggttttctgggtagatgacccagcctgggttggtgacccagaagaggtagatgatttcttgatggttggctctggaagagccagcctggctcctttgcctgtactccttcctccccgtagggagattcc

SEQ ID NO: 9243 - DNA, 1090 bp, Glycine max
  Gm_smallRNAprecursor_2076
gcgaattgtattgtttcttaaattgggaaaatccttgttggaccatttctgggaatatctctgggattggtccaaagaagtcccaccattgcaaaaaccaattgggaaaattgaaaattgtgttggtcttgaaatatatcagccatgagtgtttgaagcgggtattttggtgccaaaacaccttagtccaagcatcaacgtaatcccaataggtataacctaccggatcaaatggaactgaaaatctctttcctttgttcaagtccgaaccaaagtgtcttggttgaagaacttttagtatttggatggttgagtgggtgtttaaggtttggtcttttggatctttgaaatgtttgatagatactgagtttgaatctaccaaaatcaattcataaaaagttcttgtcttcaggatggtggttggtttgtagtgaaatcctggtgggaaagccttggctgtcgccttgaagggatttttgtcccaaaattcaggttccatctgcaaaacagttaacaatttatttttataaatataattgttagtttgtttggtaggtggtgtttgagctttggctaaaggtagttttcctttagtattggtggctgttttggtcattgacgcattttggatcattgtttgtaaatttgattcagattcatcatcagattctgaggcaatgtctgcccaagattttttgattatttttggaaatttggtcagacccatgtcttgaagggcctgaagggtttcaattggccatgcatagtcggccgatgtttgtttggcggttgccggtttgggagattcctgagtggatggctcaggtttgattgaggcaatctgggttgatgacccttctaaattggttttctgggtagatgacccagcctgggttggtgacccagaagaggtagatgatttcttgatggttggctctggaagagccagcctggctcctttgcctgtactccttcctccccgtagggagattcccgatgccttaggaggcattaccacttttctgtaagaattcacgggtaaggtagtcaggtagtgaatttgaggtgcccttgatgtattctatgtcaa

SEQ ID NO: 9244 - DNA, 1141 bp, Glycine max
  Gm_smallRNAprecursor_2077
ttgacgcattttggatcattgtttgtaaatttgattcagattcatcatcagattctgaggcaatgtctgcccaagattttttgattatttttggaaatttggtcagacccatgtcttgaagggcctgaagggtttcaattggccatgcatagtcggccgatgtttgtttggcggttgccggtttgggagattcctgagtggatggctcaggtttgattgaggcaatctgggttgatgacccttctaaattggttttctgggtagatgacccagcctgggttggtgacccagaagaggtagatgatttcttgatggttggctctggaagagccagcctggctcctttgcctgtactccttcctccccgtagggagattcccgatgccttaggaggcattaccacttttctgtaagaattcacgggtaaggtagtcaggtagtgaatttgaggtgcccttgatgtattctatgtcaaaatcaaagacaattaaaattgcttgccatcgtgcaaaaatttgttttgaggcaaggtttttaacatctttttgtaaaatatctttggctgatttacaatcaaccctgattaaaaatttttggtttaataaatccgattgaaatttggaaatgcacaaaacaattgctaaaacctcttttttaacagttgaatattttaattgtgcaggattccaatgttttgatgtatatgcaatgacatgatcttggccatggactctttgtttgaggatgccaccataacctatgtctgaagcatcagtttcgacaattttaaatgcctgtggaataggaagatacagacatttaatggattggactttgactttgatttctttaaccgtttgtgtatggaggtcagaccaaggaggcggatttttcttcagcctatcatgtaatggcttgacaatattatttaaataggggacaaattctcctacgtaatttagacaacctagaaatctttgtaactgggttttgtctaagatttggttggggaatttgctagcaaactctattgacctttcgattggaatgattgtaccttgatatatattgtgaccaaggaatcgaattcgagtttggaaaagattgatttttgatttggagactgccaaaccattttgtt

SEQ ID NO: 9245 - DNA, 1049 bp, Glycine max
  Gm_smallRNAprecursor_2078
ggaaatttggtcagacccatgtcttgaagggcctgaagggtttcaattggccatgcatagtcggccgatgtttgtttggcggttgccggtttgggagattcctgagtggatggctcaggtttgattgaggcaatctgggttgatgacccttctaaattggttttctgggtagatgacccagcctgggttggtgacccagaagaggtagatgatttcttgatggttggctctggaagagccagcctggctcctttgcctgtactccttcctccccgtagggagattcccgatgccttaggaggcattaccacttttctgtaagaattcacgggtaaggtagtcaggtagtgaatttgaggtgcccttgatgtattctatgtcaaaatcaaagacaattaaaattgcttgccatcgtgcaaaaatttgttttgaggcaaggtttttaacatctttttgtaaaatatctttggctgatttacaatcaaccctgattaaaaatttttggtttaataaatccgattgaaatttggaaatgcacaaaacaattgctaaaacctcttttttaacagttgaatattttaattgtgcaggattccaatgttttgatgtatatgcaatgacatgatcttggccatggactctttgtttgaggatgccaccataacctatgtctgaagcatcagtttcgacaattttaaatgcctgtggaataggaagatacagacatttaatggattggactttgactttgatttctttaaccgtttgtgtatggaggtcagaccaaggaggcggatttttcttcagcctatcatgtaatggcttgacaatattatttaaataggggacaaattctcctacgtaatttagacaacctagaaatctttgtaactgggttttgtctaagatttggttggggaatttgctagcaaactctattgacctttcgattggaatgattgtaccttgatatatattgtgaccaaggaatcgaattcgagtttggaaaagattgatttttgatttggagactgccaaaccattttgtt

SEQ ID NO: 9246 - DNA, 1113 bp, Glycine max
  Gm_smallRNAprecursor_2079
ggaaatttggtcagacccatgtcttgaagggcctgaagggtttcaattggccatgcatagtcggccgatgtttgtttggcggttgccggtttgggagattcctgagtggatggctcaggtttgattgaggcaatctgggttgatgacccttctaaattggttttctgggtagatgacccagcctgggttggtgacccagaagaggtagatgatttcttgatggttggctctggaagagccagcctggctcctttgcctgtactccttcctccccgtagggagattcccgatgccttaggaggcattaccacttttctgtaagaattcacgggtaaggtagtcaggtagtgaatttgaggtgcccttgatgtattctatgtcaaaatcaaagacaattaaaattgcttgccatcgtgcaaaaatttgttttgaggcaaggtttttaacatctttttgtaaaatatctttggctgatttacaatcaaccctgattaaaaatttttggtttaataaatccgattgaaatttggaaatgcacaaaacaattgctaaaacctcttttttaacagttgaatattttaattgtgcaggattccaatgttttgatgtatatgcaatgacatgatcttggccatggactctttgtttgaggatgccaccataacctatgtctgaagcatcagtttcgacaattttaaatgcctgtggaataggaagatacagacatttaatggattggactttgactttgatttctttaaccgtttgtgtatggaggtcagaccaaggaggcggatttttcttcagcctatcatgtaatggcttgacaatattatttaaataggggacaaattctcctacgtaatttagacaacctagaaatctttgtaactgggttttgtctaagatttggttggggaatttgctagcaaactctattgacctttcgattggaatgattgtaccttgatatatattgtgaccaaggaatcgaattcgagtttggaaaagattgatttttgatttggagactgccaaaccattttgtttgatgatatgtatgaaggtttggagatgtttgaaatgttggtcaatgttttgtgaaaagattaa

SEQ ID NO: 9247 - DNA, 1113 bp, Glycine max; identical to SEQ ID NO: 9246
  Gm_smallRNAprecursor_2080

SEQ ID NO: 9248 - DNA, 1114 bp, Glycine max
  Gm_smallRNAprecursor_2081
ggaaatttggtcagacccatgtcttgaagggcctgaagggtttcaattggccatgcatagtcggccgatgtttgtttggcggttgccggtttgggagattcctgagtggatggctcaggtttgattgaggcaatctgggttgatgacccttctaaattggttttctgggtagatgacccagcctgggttggtgacccagaagaggtagatgatttcttgatggttggctctggaagagccagcctggctcctttgcctgtactccttcctccccgtagggagattcccgatgccttaggaggcattaccacttttctgtaagaattcacgggtaaggtagtcaggtagtgaatttgaggtgcccttgatgtattctatgtcaaaatcaaagacaattaaaattgcttgccatcgtgcaaaaatttgttttgaggcaaggtttttaacatctttttgtaaaatatctttggctgatttacaatcaaccctgattaaaaatttttggtttaataaatccgattgaaatttggaaatgcacaaaacaattgctaaaacctcttttttaacagttgaatattttaattgtgcaggattccaatgttttgatgtatatgcaatgacatgatcttggccatggactctttgtttgaggatgccaccataacctatgtctgaagcatcagtttcgacaattttaaatgcctgtggaataggaagatacagacatttaatggattggactttgactttgatttctttaaccgtttgtgtatggaggtcagaccaaggaggcggatttttcttcagcctatcatgtaatggcttgacaatattatttaaataggggacaaattctcctacgtaatttagacaacctagaaatctttgtaactgggttttgtctaagatttggttggggaatttgctagcaaactctattgacctttcgattggaatgattgtaccttgatatatattgtgaccaaggaatcgaattcgagtttggaaaagattgatttttgatttggagactgccaaaccattttgtttgatgatatgtatgaaggtttggagatgtttgaaatgttggtcaatgttttgtgaaaagattaaa

SEQ ID NO: 9249 - DNA, 1207 bp, Glycine max
  Gm_smallRNAprecursor_2082
ggaaatttggtcagacccatgtcttgaagggcctgaagggtttcaattggccatgcatagtcggccgatgtttgtttggcggttgccggtttgggagattcctgagtggatggctcaggtttgattgaggcaatctgggttgatgacccttctaaattggttttctgggtagatgacccagcctgggttggtgacccagaagaggtagatgatttcttgatggttggctctggaagagccagcctggctcctttgcctgtactccttcctccccgtagggagattcccgatgccttaggaggcattaccacttttctgtaagaattcacgggtaaggtagtcaggtagtgaatttgaggtgcccttgatgtattctatgtcaaaatcaaagacaattaaaattgcttgccatcgtgcaaaaatttgttttgaggcaaggtttttaacatctttttgtaaaatatctttggctgatttacaatcaaccctgattaaaaatttttggtttaataaatccgattgaaatttggaaatgcacaaaacaattgctaaaacctcttttttaacagttgaatattttaattgtgcaggattccaatgttttgatgtatatgcaatgacatgatcttggccatggactctttgtttgaggatgccaccataacctatgtctgaagcatcagtttcgacaattttaaatgcctgtggaataggaagatacagacatttaatggattggactttgactttgatttctttaaccgtttgtgtatggaggtcagaccaaggaggcggatttttcttcagcctatcatgtaatggcttgacaatattatttaaataggggacaaattctcctacgtaatttagacaacctagaaatctttgtaactgggttttgtctaagatttggttggggaatttgctagcaaactctattgacctttcgattggaatgattgtaccttgatatatattgtgaccaaggaatcgaattcgagtttggaaaagattgatttttgatttggagactgccaaaccattttgtttgatgatatgtatgaaggtttggagatgtttgaaatgttggtcaatgttttgtgaaaagattaaaacatcatctatgtagacaatgacaaattttgaataaggattaaaaatatcgttcataattttttgaaattctgaaggggcattcttcagtccg

SEQ ID NO: 9250 - DNA, 1035 bp, Glycine max
  Gm_smallRNAprecursor_2083
gcggttgccggtttgggagattcctgagtggatggctcaggtttgattgaggcaatctgggttgatgacccttctaaattggttttctgggtagatgacccagcctgggttggtgacccagaagaggtagatgatttcttgatggttggctctggaagagccagcctggctcctttgcctgtactccttcctccccgtagggagattcccgatgccttaggaggcattaccacttttctgtaagaattcacgggtaaggtagtcaggtagtgaatttgaggtgcccttgatgtattctatgtcaaaatcaaagacaattaaaattgcttgccatcgtgcaaaaatttgttttgaggcaaggtttttaacatctttttgtaaaatatctttggctgatttacaatcaaccctgattaaaaatttttggtttaataaatccgattgaaatttggaaatgcacaaaacaattgctaaaacctcttttttaacagttgaatattttaattgtgcaggattccaatgttttgatgtatatgcaatgacatgatcttggccatggactctttgtttgaggatgccaccataacctatgtctgaagcatcagtttcgacaattttaaatgcctgtggaataggaagatacagacatttaatggattggactttgactttgatttctttaaccgtttgtgtatggaggtcagaccaaggaggcggatttttcttcagcctatcatgtaatggcttgacaatattatttaaataggggacaaattctcctacgtaatttagacaacctagaaatctttgtaactgggttttgtctaagatttggttggggaatttgctagcaaactctattgacctttcgattggaatgattgtaccttgatatatattgtgaccaaggaatcgaattcgagtttggaaaagattgatttttgatttggagactgccaaaccattttgtttgatgatatgtatgaaggtttggagatgtttgaaatgttggtcaatgttttgtgaaaagattaa

SEQ ID NO: 9251 - DNA, 1247 bp, Glycine max
  Gm_smallRNAprecursor_2084
agatgatttcttgatggttggctctggaagagccagcctggctcctttgcctgtactccttcctccccgtagggagattcccgatgccttaggaggcattaccacttttctgtaagaattcacgggtaaggtagtcaggtagtgaatttgaggtgcccttgatgtattctatgtcaaaatcaaagacaattaaaattgcttgccatcgtgcaaaaatttgttttgaggcaaggtttttaacatctttttgtaaaatatctttggctgatttacaatcaaccctgattaaaaatttttggtttaataaatccgattgaaatttggaaatgcacaaaacaattgctaaaacctcttttttaacagttgaatattttaattgtgcaggattccaatgttttgatgtatatgcaatgacatgatcttggccatggactctttgtttgaggatgccaccataacctatgtctgaagcatcagtttcgacaattttaaatgcctgtggaataggaagatacagacatttaatggattggactttgactttgatttctttaaccgtttgtgtatggaggtcagaccaaggaggcggatttttcttcagcctatcatgtaatggcttgacaatattatttaaataggggacaaattctcctacgtaatttagacaacctagaaatctttgtaactgggttttgtctaagatttggttggggaatttgctagcaaactctattgacctttcgattggaatgattgtaccttgatatatattgtgaccaaggaatcgaattcgagtttggaaaagattgatttttgatttggagactgccaaaccattttgtttgatgatatgtatgaaggtttggagatgtttgaaatgttggtcaatgttttgtgaaaagattaaaacatcatctatgtagacaatgacaaattttgaataaggattaaaaatatcgttcataattttttgaaattctgaaggggcattcttcagtccgaatggcatcacgttccattcatattgcccgaaaggtacagtaaacgctgttttgtacctatctgattcttggatttggatttgccaaaatccagatttcatatcaaattttgaaaatatctttgcagaatttaatctgttaagcaaatcttttttctttggaataggatatctaatccattgtaatgcttgatttaatggtttgtaatttatgactaagcggggtgttccacgctcaatctcagat

SEQ ID NO: 9252 - DNA, 1246 bp, Glycine max
  Gm_smallRNAprecursor_2085
gatgatttcttgatggttggctctggaagagccagcctggctcctttgcctgtactccttcctccccgtagggagattcccgatgccttaggaggcattaccacttttctgtaagaattcacgggtaaggtagtcaggtagtgaatttgaggtgcccttgatgtattctatgtcaaaatcaaagacaattaaaattgcttgccatcgtgcaaaaatttgttttgaggcaaggtttttaacatctttttgtaaaatatctttggctgatttacaatcaaccctgattaaaaatttttggtttaataaatccgattgaaatttggaaatgcacaaaacaattgctaaaacctcttttttaacagttgaatattttaattgtgcaggattccaatgttttgatgtatatgcaatgacatgatcttggccatggactctttgtttgaggatgccaccataacctatgtctgaagcatcagtttcgacaattttaaatgcctgtggaataggaagatacagacatttaatggattggactttgactttgatttctttaaccgtttgtgtatggaggtcagaccaaggaggcggatttttcttcagcctatcatgtaatggcttgacaatattatttaaataggggacaaattctcctacgtaatttagacaacctagaaatctttgtaactgggttttgtctaagatttggttggggaatttgctagcaaactctattgacctttcgattggaatgattgtaccttgatatatattgtgaccaaggaatcgaattcgagtttggaaaagattgatttttgatttggagactgccaaaccattttgtttgatgatatgtatgaaggtttggagatgtttgaaatgttggtcaatgttttgtgaaaagattaaaacatcatctatgtagacaatgacaaattttgaataaggattaaaaatatcgttcataattttttgaaattctgaaggggcattcttcagtccgaatggcatcacgttccattcatattgcccgaaaggtacagtaaacgctgttttgtacctatctgattcttggatttggatttgccaaaatccagatttcatatcaaattttgaaaatatctttgcagaatttaatctgttaagcaaatcttttttctttggaataggatatctaatccattgtaatgcttgatttaatggtttgtaatttatgactaagcggggtgttccacgctcaatctcagat

SEQ ID NO: 9253 - DNA, 1031 bp, Glycine max
  Gm_smallRNAprecursor_2086
ctttttgtaaaatatctttggctgatttacaatcaaccctgattaaaaatttttggtttaataaatccgattgaaatttggaaatgcacaaaacaattgctaaaacctcttttttaacagttgaatattttaattgtgcaggattccaatgttttgatgtatatgcaatgacatgatcttggccatggactctttgtttgaggatgccaccataacctatgtctgaagcatcagtttcgacaattttaaatgcctgtggaataggaagatacagacatttaatggattggactttgactttgatttctttaaccgtttgtgtatggaggtcagaccaaggaggcggatttttcttcagcctatcatgtaatggcttgacaatattatttaaataggggacaaattctcctacgtaatttagacaacctagaaatctttgtaactgggttttgtctaagatttggttggggaatttgctagcaaactctattgacctttcgattggaatgattgtaccttgatatatattgtgaccaaggaatcgaattcgagtttggaaaagattgatttttgatttggagactgccaaaccattttgtttgatgatatgtatgaaggtttggagatgtttgaaatgttggtcaatgttttgtgaaaagattaaaacatcatctatgtagacaatgacaaattttgaataaggattaaaaatatcgttcataattttttgaaattctgaaggggcattcttcagtccgaatggcatcacgttccattcatattgcccgaaaggtacagtaaacgctgttttgtacctatctgattcttggatttggatttgccaaaatccagatttcatatcaaattttgaaaatatctttgcagaatttaatctgttaagcaaatcttttttctttggaataggatatctaatccattgtaatgcttgatttaatggtttgtaatttatgactaagcggggtgttccacgctcaatctcagattgtttgttaacataaaaagccgcacaa

SEQ ID NO: 9254 - DNA, 1234 bp, Glycine max
  Gm_smallRNAprecursor_2087
aatcaaccctgattaaaaatttttggtttaataaatccgattgaaatttggaaatgcacaaaacaattgctaaaacctcttttttaacagttgaatattttaattgtgcaggattccaatgttttgatgtatatgcaatgacatgatcttggccatggactctttgtttgaggatgccaccataacctatgtctgaagcatcagtttcgacaattttaaatgcctgtggaataggaagatacagacatttaatggattggactttgactttgatttctttaaccgtttgtgtatggaggtcagaccaaggaggcggatttttcttcagcctatcatgtaatggcttgacaatattatttaaataggggacaaattctcctacgtaatttagacaacctagaaatctttgtaactgggttttgtctaagatttggttggggaatttgctagcaaactctattgacctttcgattggaatgattgtaccttgatatatattgtgaccaaggaatcgaattcgagtttggaaaagattgatttttgatttggagactgccaaaccattttgtttgatgatatgtatgaaggtttggagatgtttgaaatgttggtcaatgttttgtgaaaagattaaaacatcatctatgtagacaatgacaaattttgaataaggattaaaaatatcgttcataattttttgaaattctgaaggggcattcttcagtccgaatggcatcacgttccattcatattgcccgaaaggtacagtaaacgctgttttgtacctatctgattcttggatttggatttgccaaaatccagatttcatatcaaattttgaaaatatctttgcagaatttaatctgttaagcaaatcttttttctttggaataggatatctaatccattgtaatgcttgatttaatggtttgtaatttatgactaagcggggtgttccacgctcaatctcagattgtttgttaacataaaaagccgcacaagaccatgggcttttgcttttccggattaggcctttatcaagcaaatccttgatttccttttgacaatattgaagaagttcttcattcatttggattggtctggcttttgtgggaatttgtttttccctaaagtctttctcataagggagatcgacaatatgtttctttctgtcccaaaatgcatgtggcaattcagaacaaacggtcgattcaatatgatttaataaagattg

SEQ ID NO: 9255 - DNA, 1061 bp, Glycine max
  Gm_smallRNAprecursor_2088
tatttaaataggggacaaattctcctacgtaatttagacaacctagaaatctttgtaactgggttttgtctaagatttggttggggaatttgctagcaaactctattgacctttcgattggaatgattgtaccttgatatatattgtgaccaaggaatcgaattcgagtttggaaaagattgatttttgatttggagactgccaaaccattttgtttgatgatatgtatgaaggtttggagatgtttgaaatgttggtcaatgttttgtgaaaagattaaaacatcatctatgtagacaatgacaaattttgaataaggattaaaaatatcgttcataattttttgaaattctgaaggggcattcttcagtccgaatggcatcacgttccattcatattgcccgaaaggtacagtaaacgctgttttgtacctatctgattcttggatttggatttgccaaaatccagatttcatatcaaattttgaaaatatctttgcagaatttaatctgttaagcaaatcttttttctttggaataggatatctaatccattgtaatgcttgatttaatggtttgtaatttatgactaagcggggtgttccacgctcaatctcagattgtttgttaacataaaaagccgcacaagaccatgggcttttgcttttccggattaggcctttatcaagcaaatccttgatttccttttgacaatattgaagaagttcttcattcatttggattggtctggcttttgtgggaatttgtttttccctaaagtctttctcataagggagatcgacaatatgtttctttctgtcccaaaatgcatgtggcaattcagaacaaacggtcgattcaatatgatttaataaagattgaattctttcttttacttggggttttcccagttgtatctgaatattattaaaagatacttcttcttttaagaagttaatttaattaatcttattttctataagatttatatttctggaaattggtttagtagaaaaattaaatataatttttcttcctaaataatttgtggttattccttca

SEQ ID NO: 9256 - DNA, 1080 bp, Glycine max
  Gm_smallRNAprecursor_2089
atgatttcgttttagaaacaatggccctatttgatacaggggctgattcaaactgcattttagaaggattaattcctacaaaattctttgagaaaacctcagaaaaattaagtacggcaaacggctcaaaattaaaaattaattttaagctatcaaatgcaataattgaaaaccaaggtcttaagatgaacacaaattttcttctggtaaaaaaccttaagaatgaagtaatcttaggaacgcccttcattagagccctgtttcccatccaaatatctaatgaaggaataactacaaattatttaggaagaaaaattatatttaatttttctactaaaccaatttccagaaatataaatcttatagaaaataagattaatcaaattaacttcttaaaagaagaagtatcttttaataatattcagatacaactgggaaaaccccaagtaaaagaaagaattcaatctttattaaatcatattgaatcgaccgtttgttctgaattgccacatgcattttgggacagaaagaaacatattgtcgatctcccttatgagaaagactttagggaaaaacaaattcccacaaaagccagaccaatccaaatgaatgaagaacttcttcaatactgtcaaaaggaaatcaaggatttgcttgataaaggcctaatccagaaaagcaaaagcccatggtcttgtgcggctttttatgttaacaaacaatctgagattgagcgtggaacaccccgcttagtcataaattacaaaccattaaatcaagcattacaatggattaaatatcctattccaaacaaaaaagatttgcttaacagattaaattctgcaaagatattttcaaaatttgatatgaaatctggattttggcaaatccaaatccaagaatcagataggtacaaaacagcgtttactgtacctttcgggcaatatgaatggaacgtgatgccattcggactgaagaatgccccttcagaatttcaaaaaattatgaacgatatttttaatccctattcaaaatttgtcattgtctacatagatgatgttttaatcttttcccaaaaca

SEQ ID NO: 9257 - DNA, 1198 bp, Glycine max
  Gm_smallRNAprecursor_2090
acagaaagaaacatattgtcgatctcccttatgagaaagactttagggaaaaacaaattcccacaaaagccagaccaatccaaatgaatgaagaacttcttcaatactgtcaaaaggaaatcaaggatttgcttgataaaggcctaatccagaaaagcaaaagcccatggtcttgtgcggctttttatgttaacaaacaatctgagattgagcgtggaacaccccgcttagtcataaattacaaaccattaaatcaagcattacaatggattaaatatcctattccaaacaaaaaagatttgcttaacagattaaattctgcaaagatattttcaaaatttgatatgaaatctggattttggcaaatccaaatccaagaatcagataggtacaaaacagcgtttactgtacctttcgggcaatatgaatggaacgtgatgccattcggactgaagaatgccccttcagaatttcaaaaaattatgaacgatatttttaatccctattcaaaatttgtcattgtctacatagatgatgttttaatcttttcccaaaacattgaccaacatttcaaacatctccaaaccttcatacatatcatcaaacaaaatggtttggcagtctccaaatcaaaaatcaatcttttccaaacttgaattcgattccttggtcacaatatatatcaaggtacaatcattccaatcgaaaggtcaatagagtttgctagcaaattccccaaccaaatcttagacaaaacccagttacaaagatttctaggttgtctaaattacgtaggagaatttgtcccctatttaaataatattgtcaagccattacatgataggctgaagaaaaatccgcctccttggtctgacctccatacacaaacggttaaagaaatcaaagtcaaagtccaatccattaaatgtctgtatcttcctattccacaggcatttaaaattgtcgaaactgatgcttcagacataggttatggtggcatcctcaaacaaagagtccatggccaagatcatgtcattgcatatacatcaaaacattggaatcctgcacaattaaaatattcaactgttaaaaaagaggttttagcaattgttttgtgcatttccaaatttcaatcggatttattaaaccaaaaatttttaatcagggttgattgtaaatcagccaaagatattttaca

SEQ ID NO: 9258 - DNA, 1234 bp, Glycine max
  Gm_smallRNAprecursor_2091
acagaaagaaacatattgtcgatctcccttatgagaaagactttagggaaaaacaaattcccacaaaagccagaccaatccaaatgaatgaagaacttcttcaatactgtcaaaaggaaatcaaggatttgcttgataaaggcctaatccagaaaagcaaaagcccatggtcttgtgcggctttttatgttaacaaacaatctgagattgagcgtggaacaccccgcttagtcataaattacaaaccattaaatcaagcattacaatggattaaatatcctattccaaacaaaaaagatttgcttaacagattaaattctgcaaagatattttcaaaatttgatatgaaatctggattttggcaaatccaaatccaagaatcagataggtacaaaacagcgtttactgtacctttcgggcaatatgaatggaacgtgatgccattcggactgaagaatgccccttcagaatttcaaaaaattatgaacgatatttttaatccctattcaaaatttgtcattgtctacatagatgatgttttaatcttttcccaaaacattgaccaacatttcaaacatctccaaaccttcatacatatcatcaaacaaaatggtttggcagtctccaaatcaaaaatcaatcttttccaaacttgaattcgattccttggtcacaatatatatcaaggtacaatcattccaatcgaaaggtcaatagagtttgctagcaaattccccaaccaaatcttagacaaaacccagttacaaagatttctaggttgtctaaattacgtaggagaatttgtcccctatttaaataatattgtcaagccattacatgataggctgaagaaaaatccgcctccttggtctgacctccatacacaaacggttaaagaaatcaaagtcaaagtccaatccattaaatgtctgtatcttcctattccacaggcatttaaaattgtcgaaactgatgcttcagacataggttatggtggcatcctcaaacaaagagtccatggccaagatcatgtcattgcatatacatcaaaacattggaatcctgcacaattaaaatattcaactgttaaaaaagaggttttagcaattgttttgtgcatttccaaatttcaatcggatttattaaaccaaaaatttttaatcagggttgattgtaaatcagccaaagatattttacaaaaagatgttaaaaaccttgcctcaaaacaaatttt

SEQ ID NO: 9259 - DNA, 1073 bp, Glycine max
  Gm_smallRNAprecursor_2092
tgtacctttcgggcaatatgaatggaacgtgatgccattcggactgaagaatgccccttcagaatttcaaaaaattatgaacgatatttttaatccctattcaaaatttgtcattgtctacatagatgatgttttaatcttttcccaaaacattgaccaacatttcaaacatctccaaaccttcatacatatcatcaaacaaaatggtttggcagtctccaaatcaaaaatcaatcttttccaaacttgaattcgattccttggtcacaatatatatcaaggtacaatcattccaatcgaaaggtcaatagagtttgctagcaaattccccaaccaaatcttagacaaaacccagttacaaagatttctaggttgtctaaattacgtaggagaatttgtcccctatttaaataatattgtcaagccattacatgataggctgaagaaaaatccgcctccttggtctgacctccatacacaaacggttaaagaaatcaaagtcaaagtccaatccattaaatgtctgtatcttcctattccacaggcatttaaaattgtcgaaactgatgcttcagacataggttatggtggcatcctcaaacaaagagtccatggccaagatcatgtcattgcatatacatcaaaacattggaatcctgcacaattaaaatattcaactgttaaaaaagaggttttagcaattgttttgtgcatttccaaatttcaatcggatttattaaaccaaaaatttttaatcagggttgattgtaaatcagccaaagatattttacaaaaagatgttaaaaaccttgcctcaaaacaaatttttgcacgatggcaagcaattttaagtgtctttgattttgacatagaatacatcaagggcacctcaaattcactacctgactaccttacccgtgaattcttacagaaaagtggtaatgcctcctaaggcatcgggaatctccctacggggaggaaggagtacaggcaaaggagccaggctggctcttccagagccaaccatcaagaaatcatctacctcttctgggtcaccaacccaggctgggtca

SEQ ID NO: 9260 - DNA, 1071 bp, Glycine max
  Gm_smallRNAprecursor_2093
tacctttcgggcaatatgaatggaacgtgatgccattcggactgaagaatgccccttcagaatttcaaaaaattatgaacgatatttttaatccctattcaaaatttgtcattgtctacatagatgatgttttaatcttttcccaaaacattgaccaacatttcaaacatctccaaaccttcatacatatcatcaaacaaaatggtttggcagtctccaaatcaaaaatcaatcttttccaaacttgaattcgattccttggtcacaatatatatcaaggtacaatcattccaatcgaaaggtcaatagagtttgctagcaaattccccaaccaaatcttagacaaaacccagttacaaagatttctaggttgtctaaattacgtaggagaatttgtcccctatttaaataatattgtcaagccattacatgataggctgaagaaaaatccgcctccttggtctgacctccatacacaaacggttaaagaaatcaaagtcaaagtccaatccattaaatgtctgtatcttcctattccacaggcatttaaaattgtcgaaactgatgcttcagacataggttatggtggcatcctcaaacaaagagtccatggccaagatcatgtcattgcatatacatcaaaacattggaatcctgcacaattaaaatattcaactgttaaaaaagaggttttagcaattgttttgtgcatttccaaatttcaatcggatttattaaaccaaaaatttttaatcagggttgattgtaaatcagccaaagatattttacaaaaagatgttaaaaaccttgcctcaaaacaaatttttgcacgatggcaagcaattttaagtgtctttgattttgacatagaatacatcaagggcacctcaaattcactacctgactaccttacccgtgaattcttacagaaaagtggtaatgcctcctaaggcatcgggaatctccctacggggaggaaggagtacaggcaaaggagccaggctggctcttccagagccaaccatcaagaaatcatctacctcttctgggtcaccaacccaggctgggtca

SEQ ID NO: 9261 - DNA, 1115 bp, Glycine max
  Gm_smallRNAprecursor_2094
tcaatagagtttgctagcaaattccccaaccaaatcttagacaaaacccagttacaaagatttctaggttgtctaaattacgtaggagaatttgtcccctatttaaataatattgtcaagccattacatgataggctgaagaaaaatccgcctccttggtctgacctccatacacaaacggttaaagaaatcaaagtcaaagtccaatccattaaatgtctgtatcttcctattccacaggcatttaaaattgtcgaaactgatgcttcagacataggttatggtggcatcctcaaacaaagagtccatggccaagatcatgtcattgcatatacatcaaaacattggaatcctgcacaattaaaatattcaactgttaaaaaagaggttttagcaattgttttgtgcatttccaaatttcaatcggatttattaaaccaaaaatttttaatcagggttgattgtaaatcagccaaagatattttacaaaaagatgttaaaaaccttgcctcaaaacaaatttttgcacgatggcaagcaattttaagtgtctttgattttgacatagaatacatcaagggcacctcaaattcactacctgactaccttacccgtgaattcttacagaaaagtggtaatgcctcctaaggcatcgggaatctccctacggggaggaaggagtacaggcaaaggagccaggctggctcttccagagccaaccatcaagaaatcatctacctcttctgggtcaccaacccaggctgggtcatctacccagaaaaccaatttagaagggtcatcaacccagattgcctcaatcaaacctgagccatccactcaggaatctcccaaaccggcaaccgccaaacaaacatcggctgactatgcatggccaattgaaacccttcaggcccttcaagacatgggtctgaccaaatttccaaaaataatcaaaaaatcttgggcagacattgcctcagaatctgatgatgaatctgaatcaaatttacaaactgatccaaaatgcgtcaatgaccaaaacagccaccaatactaaaggaaaactacctttagccaaagctcaaacaccacctaccaaacaaactaacaattat

SEQ ID NO: 9262 - DNA, 1174 bp, Glycine max
  Gm_smallRNAprecursor_2095
acaaagagtccatggccaagatcatgtcattgcatatacatcaaaacattggaatcctgcacaattaaaatattcaactgttaaaaaagaggttttagcaattgttttgtgcatttccaaatttcaatcggatttattaaaccaaaaatttttaatcagggttgattgtaaatcagccaaagatattttacaaaaagatgttaaaaaccttgcctcaaaacaaatttttgcacgatggcaagcaattttaagtgtctttgattttgacatagaatacatcaagggcacctcaaattcactacctgactaccttacccgtgaattcttacagaaaagtggtaatgcctcctaaggcatcgggaatctccctacggggaggaaggagtacaggcaaaggagccaggctggctcttccagagccaaccatcaagaaatcatctacctcttctgggtcaccaacccaggctgggtcatctacccagaaaaccaatttagaagggtcatcaacccagattgcctcaatcaaacctgagccatccactcaggaatctcccaaaccggcaaccgccaaacaaacatcggctgactatgcatggccaattgaaacccttcaggcccttcaagacatgggtctgaccaaatttccaaaaataatcaaaaaatcttgggcagacattgcctcagaatctgatgatgaatctgaatcaaatttacaaactgatccaaaatgcgtcaatgaccaaaacagccaccaatactaaaggaaaactacctttagccaaagctcaaacaccacctaccaaacaaactaacaattatatttataaaaataaattgttaactgttttgcagatggaacctgaattttgggacaaaaatcccttcaaggcgacggccaaggctttcccaccaggatttcactacaaaccaaccaccatcctgaagacaagaactttttatgaattgattttggtagattcaaactcagtatctatcaaacatttcaaagatccaaaagaccaaaccttaaacacccactcaaccatccaaatactaaaagttcttcaaccaagacactttggttcggacttgaacaaaggaaagagattttcagttccatttgatccggtaggttatacctattgggattacgttgatgcttggactaaggtgt

SEQ ID NO: 9263 - DNA, 1173 bp, Glycine max
  Gm_smallRNAprecursor_2096
caaagagtccatggccaagatcatgtcattgcatatacatcaaaacattggaatcctgcacaattaaaatattcaactgttaaaaaagaggttttagcaattgttttgtgcatttccaaatttcaatcggatttattaaaccaaaaatttttaatcagggttgattgtaaatcagccaaagatattttacaaaaagatgttaaaaaccttgcctcaaaacaaatttttgcacgatggcaagcaattttaagtgtctttgattttgacatagaatacatcaagggcacctcaaattcactacctgactaccttacccgtgaattcttacagaaaagtggtaatgcctcctaaggcatcgggaatctccctacggggaggaaggagtacaggcaaaggagccaggctggctcttccagagccaaccatcaagaaatcatctacctcttctgggtcaccaacccaggctgggtcatctacccagaaaaccaatttagaagggtcatcaacccagattgcctcaatcaaacctgagccatccactcaggaatctcccaaaccggcaaccgccaaacaaacatcggctgactatgcatggccaattgaaacccttcaggcccttcaagacatgggtctgaccaaatttccaaaaataatcaaaaaatcttgggcagacattgcctcagaatctgatgatgaatctgaatcaaatttacaaactgatccaaaatgcgtcaatgaccaaaacagccaccaatactaaaggaaaactacctttagccaaagctcaaacaccacctaccaaacaaactaacaattatatttataaaaataaattgttaactgttttgcagatggaacctgaattttgggacaaaaatcccttcaaggcgacggccaaggctttcccaccaggatttcactacaaaccaaccaccatcctgaagacaagaactttttatgaattgattttggtagattcaaactcagtatctatcaaacatttcaaagatccaaaagaccaaaccttaaacacccactcaaccatccaaatactaaaagttcttcaaccaagacactttggttcggacttgaacaaaggaaagagattttcagttccatttgatccggtaggttatacctattgggattacgttgatgcttggactaaggtgt

SEQ ID NO: 9264 - DNA, 1173 bp, Glycine max; identical to SEQ ID NO: 9263
  Gm_smallRNAprecursor_2097

SEQ ID NO: 9265 - DNA, 1130 bp, Glycine max
  Gm_smallRNAprecursor_2098
atcaaacctgagccatccactcaggaatctcccaaaccggcaaccgccaaacaaacatcggctgactatgcatggccaattgaaacccttcaggcccttcaagacatgggtctgaccaaatttccaaaaataatcaaaaaatcttgggcagacattgcctcagaatctgatgatgaatctgaatcaaatttacaaactgatccaaaatgcgtcaatgaccaaaacagccaccaatactaaaggaaaactacctttagccaaagctcaaacaccacctaccaaacaaactaacaattatatttataaaaataaattgttaactgttttgcagatggaacctgaattttgggacaaaaatcccttcaaggcgacggccaaggctttcccaccaggatttcactacaaaccaaccaccatcctgaagacaagaactttttatgaattgattttggtagattcaaactcagtatctatcaaacatttcaaagatccaaaagaccaaaccttaaacacccactcaaccatccaaatactaaaagttcttcaaccaagacactttggttcggacttgaacaaaggaaagagattttcagttccatttgatccggtaggttatacctattgggattacgttgatgcttggactaaggtgttttggcaccaaaatacccgcttcaagcattcatggctgatatatttcaagaccaaaacaatttacaattttcccaattggtttttgcaatggtgggacttctttggaccaatcccagagatattcccagaaacggtccaacaaggattttcccaatttaagaaacaatacaattcgcaggaatcacgaattccagcagatcttaaatacttttcaagctttgcactgtcatggatattctcatggcaatatcgttacagcaagactgaaaagacaaaccaatatccatcactacaaagacacgcatttgtaaaatggtggacacaatttgactcatccaaagcggatccagaacaagtaaaactatggttccaatcccatccagaattcctcaaaacagctgatccagagacttctgtgtttttgaaccaaaagtctcatctggcagcatttttagcaggatcgacatcaaaggagg

SEQ ID NO: 9266 - DNA, 1087 bp, Glycine max
  Gm_smallRNAprecursor_2099
cctgagccatccactcaggaatctcccaaaccggcaaccgccaaacaaacatcggctgactatgcatggccaattgaaacccttcaggcccttcaagacatgggtctgaccaaatttccaaaaataatcaaaaaatcttgggcagacattgcctcagaatctgatgatgaatctgaatcaaatttacaaactgatccaaaatgcgtcaatgaccaaaacagccaccaatactaaaggaaaactacctttagccaaagctcaaacaccacctaccaaacaaactaacaattatatttataaaaataaattgttaactgttttgcagatggaacctgaattttgggacaaaaatcccttcaaggcgacggccaaggctttcccaccaggatttcactacaaaccaaccaccatcctgaagacaagaactttttatgaattgattttggtagattcaaactcagtatctatcaaacatttcaaagatccaaaagaccaaaccttaaacacccactcaaccatccaaatactaaaagttcttcaaccaagacactttggttcggacttgaacaaaggaaagagattttcagttccatttgatccggtaggttatacctattgggattacgttgatgcttggactaaggtgttttggcaccaaaatacccgcttcaagcattcatggctgatatatttcaagaccaaaacaatttacaattttcccaattggtttttgcaatggtgggacttctttggaccaatcccagagatattcccagaaacggtccaacaaggattttcccaatttaagaaacaatacaattcgcaggaatcacgaattccagcagatcttaaatacttttcaagctttgcactgtcatggatattctcatggcaatatcgttacagcaagactgaaaagacaaaccaatatccatcactacaaagacacgcatttgtaaaatggtggacacaatttgactcatccaaagcggatccagaacaagtaaaactatggttccaatcccatccagaattcctcaaaacagctgatccagagacttctgtgtttttgaaccaaaagtctcat

SEQ ID NO: 9267 - DNA, 1124 bp, Glycine max
  Gm_smallRNAprecursor_2100
cctgagccatccactcaggaatctcccaaaccggcaaccgccaaacaaacatcggctgactatgcatggccaattgaaacccttcaggcccttcaagacatgggtctgaccaaatttccaaaaataatcaaaaaatcttgggcagacattgcctcagaatctgatgatgaatctgaatcaaatttacaaactgatccaaaatgcgtcaatgaccaaaacagccaccaatactaaaggaaaactacctttagccaaagctcaaacaccacctaccaaacaaactaacaattatatttataaaaataaattgttaactgttttgcagatggaacctgaattttgggacaaaaatcccttcaaggcgacggccaaggctttcccaccaggatttcactacaaaccaaccaccatcctgaagacaagaactttttatgaattgattttggtagattcaaactcagtatctatcaaacatttcaaagatccaaaagaccaaaccttaaacacccactcaaccatccaaatactaaaagttcttcaaccaagacactttggttcggacttgaacaaaggaaagagattttcagttccatttgatccggtaggttatacctattgggattacgttgatgcttggactaaggtgttttggcaccaaaatacccgcttcaagcattcatggctgatatatttcaagaccaaaacaatttacaattttcccaattggtttttgcaatggtgggacttctttggaccaatcccagagatattcccagaaacggtccaacaaggattttcccaatttaagaaacaatacaattcgcaggaatcacgaattccagcagatcttaaatacttttcaagctttgcactgtcatggatattctcatggcaatatcgttacagcaagactgaaaagacaaaccaatatccatcactacaaagacacgcatttgtaaaatggtggacacaatttgactcatccaaagcggatccagaacaagtaaaactatggttccaatcccatccagaattcctcaaaacagctgatccagagacttctgtgtttttgaaccaaaagtctcatctggcagcatttttagcaggatcgacatcaaaggagg

SEQ ID NO: 9268 - DNA, 1247 bp, Glycine max
  Gm_smallRNAprecursor_2101
ggcccttcaagacatgggtctgaccaaatttccaaaaataatcaaaaaatcttgggcagacattgcctcagaatctgatgatgaatctgaatcaaatttacaaactgatccaaaatgcgtcaatgaccaaaacagccaccaatactaaaggaaaactacctttagccaaagctcaaacaccacctaccaaacaaactaacaattatatttataaaaataaattgttaactgttttgcagatggaacctgaattttgggacaaaaatcccttcaaggcgacggccaaggctttcccaccaggatttcactacaaaccaaccaccatcctgaagacaagaactttttatgaattgattttggtagattcaaactcagtatctatcaaacatttcaaagatccaaaagaccaaaccttaaacacccactcaaccatccaaatactaaaagttcttcaaccaagacactttggttcggacttgaacaaaggaaagagattttcagttccatttgatccggtaggttatacctattgggattacgttgatgcttggactaaggtgttttggcaccaaaatacccgcttcaagcattcatggctgatatatttcaagaccaaaacaatttacaattttcccaattggtttttgcaatggtgggacttctttggaccaatcccagagatattcccagaaacggtccaacaaggattttcccaatttaagaaacaatacaattcgcaggaatcacgaattccagcagatcttaaatacttttcaagctttgcactgtcatggatattctcatggcaatatcgttacagcaagactgaaaagacaaaccaatatccatcactacaaagacacgcatttgtaaaatggtggacacaatttgactcatccaaagcggatccagaacaagtaaaactatggttccaatcccatccagaattcctcaaaacagctgatccagagacttctgtgtttttgaaccaaaagtctcatctggcagcatttttagcaggatcgacatcaaaggaggtcttagctaaaaatctgaaggaagttctacaaatgttacaacaggaagaagaagcttcatcctcaaagaaggaagaaacaagttctgctgaagacgaagaagatcccttttaccaaaacgaagatgattgttttggtatctgtttagattaaatttaatttcggtcacaaaactgtctgtttgtaatttatgtgtaattaatgctggac

SEQ ID NO: 9269 - DNA, 1248 bp, Glycine max
  Gm_smallRNAprecursor_2102
ggcccttcaagacatgggtctgaccaaatttccaaaaataatcaaaaaatcttgggcagacattgcctcagaatctgatgatgaatctgaatcaaatttacaaactgatccaaaatgcgtcaatgaccaaaacagccaccaatactaaaggaaaactacctttagccaaagctcaaacaccacctaccaaacaaactaacaattatatttataaaaataaattgttaactgttttgcagatggaacctgaattttgggacaaaaatcccttcaaggcgacggccaaggctttcccaccaggatttcactacaaaccaaccaccatcctgaagacaagaactttttatgaattgattttggtagattcaaactcagtatctatcaaacatttcaaagatccaaaagaccaaaccttaaacacccactcaaccatccaaatactaaaagttcttcaaccaagacactttggttcggacttgaacaaaggaaagagattttcagttccatttgatccggtaggttatacctattgggattacgttgatgcttggactaaggtgttttggcaccaaaatacccgcttcaagcattcatggctgatatatttcaagaccaaaacaatttacaattttcccaattggtttttgcaatggtgggacttctttggaccaatcccagagatattcccagaaacggtccaacaaggattttcccaatttaagaaacaatacaattcgcaggaatcacgaattccagcagatcttaaatacttttcaagctttgcactgtcatggatattctcatggcaatatcgttacagcaagactgaaaagacaaaccaatatccatcactacaaagacacgcatttgtaaaatggtggacacaatttgactcatccaaagcggatccagaacaagtaaaactatggttccaatcccatccagaattcctcaaaacagctgatccagagacttctgtgtttttgaaccaaaagtctcatctggcagcatttttagcaggatcgacatcaaaggaggtcttagctaaaaatctgaaggaagttctacaaatgttacaacaggaagaagaagcttcatcctcaaagaaggaagaaacaagttctgctgaagacgaagaagatcccttttaccaaaacgaagatgattgttttggtatctgtttagattaaatttaatttcggtcacaaaactgtctgtttgtaatttatgtgtaattaatgctggaca

SEQ ID NO: 9270 - DNA, 1043 bp, Glycine max
  Gm_smallRNAprecursor_2103
tcaagaccaaaacaatttacaattttcccaattggtttttgcaatggtgggacttctttggaccaatcccagagatattcccagaaacggtccaacaaggattttcccaatttaagaaacaatacaattcgcaggaatcacgaattccagcagatcttaaatacttttcaagctttgcactgtcatggatattctcatggcaatatcgttacagcaagactgaaaagacaaaccaatatccatcactacaaagacacgcatttgtaaaatggtggacacaatttgactcatccaaagcggatccagaacaagtaaaactatggttccaatcccatccagaattcctcaaaacagctgatccagagacttctgtgtttttgaaccaaaagtctcatctggcagcatttttagcaggatcgacatcaaaggaggtcttagctaaaaatctgaaggaagttctacaaatgttacaacaggaagaagaagcttcatcctcaaagaaggaagaaacaagttctgctgaagacgaagaagatcccttttaccaaaacgaagatgattgttttggtatctgtttagattaaatttaatttcggtcacaaaactgtctgtttgtaatttatgtgtaattaatgctggacaatactacctgtcctgtagccattaaagtcctggtcaaaactacttgtcttgtaacaaacagtcaaatagtctcggtcaaaactaccggcaactaccggtcttagatttttggctatataaggagtcctcaagtatgttgtgaggcaccctttcatttagccattttttcaggttttggaagagaggtgctctgaaacaagatttttgtaagcgcttctttctagattcaataaatttctatttttcatccttctctcttctcccttcaccgatcctgtgcggctctgccgccgcttcggtttctttgtttatgaaaacctggggtttgtaagccggtctccggtgtgcccttgatatctgttttcaagtttatattttcatttcaatcatactgcattctt

SEQ ID NO: 9271 - DNA, 1165 bp, Glycine max
  Gm_smallRNAprecursor_2104
accaaaacaatttacaattttcccaattggtttttgcaatggtgggacttctttggaccaatcccagagatattcccagaaacggtccaacaaggattttcccaatttaagaaacaatacaattcgcaggaatcacgaattccagcagatcttaaatacttttcaagctttgcactgtcatggatattctcatggcaatatcgttacagcaagactgaaaagacaaaccaatatccatcactacaaagacacgcatttgtaaaatggtggacacaatttgactcatccaaagcggatccagaacaagtaaaactatggttccaatcccatccagaattcctcaaaacagctgatccagagacttctgtgtttttgaaccaaaagtctcatctggcagcatttttagcaggatcgacatcaaaggaggtcttagctaaaaatctgaaggaagttctacaaatgttacaacaggaagaagaagcttcatcctcaaagaaggaagaaacaagttctgctgaagacgaagaagatcccttttaccaaaacgaagatgattgttttggtatctgtttagattaaatttaatttcggtcacaaaactgtctgtttgtaatttatgtgtaattaatgctggacaatactacctgtcctgtagccattaaagtcctggtcaaaactacttgtcttgtaacaaacagtcaaatagtctcggtcaaaactaccggcaactaccggtcttagatttttggctatataaggagtcctcaagtatgttgtgaggcaccctttcatttagccattttttcaggttttggaagagaggtgctctgaaacaagatttttgtaagcgcttctttctagattcaataaatttctatttttcatccttctctcttctcccttcaccgatcctgtgcggctctgccgccgcttcggtttctttgtttatgaaaacctggggtttgtaagccggtctccggtgtgcccttgatatctgttttcaagtttatattttcatttcaatcatactgcattcttacttcctatctgtccgtttgatcctactccgctgacctatatatatatatatatatatatatatatatatatatatatatatatatatatatatatatatatatatatatatatatatatatatata

SEQ ID NO: 9272 - DNA, 1040 bp, Glycine max
  Gm_smallRNAprecursor_2105
acaattcgcaggaatcacgaattccagcagatcttaaatacttttcaagctttgcactgtcatggatattctcatggcaatatcgttacagcaagactgaaaagacaaaccaatatccatcactacaaagacacgcatttgtaaaatggtggacacaatttgactcatccaaagcggatccagaacaagtaaaactatggttccaatcccatccagaattcctcaaaacagctgatccagagacttctgtgtttttgaaccaaaagtctcatctggcagcatttttagcaggatcgacatcaaaggaggtcttagctaaaaatctgaaggaagttctacaaatgttacaacaggaagaagaagcttcatcctcaaagaaggaagaaacaagttctgctgaagacgaagaagatcccttttaccaaaacgaagatgattgttttggtatctgtttagattaaatttaatttcggtcacaaaactgtctgtttgtaatttatgtgtaattaatgctggacaatactacctgtcctgtagccattaaagtcctggtcaaaactacttgtcttgtaacaaacagtcaaatagtctcggtcaaaactaccggcaactaccggtcttagatttttggctatataaggagtcctcaagtatgttgtgaggcaccctttcatttagccattttttcaggttttggaagagaggtgctctgaaacaagatttttgtaagcgcttctttctagattcaataaatttctatttttcatccttctctcttctcccttcaccgatcctgtgcggctctgccgccgcttcggtttctttgtttatgaaaacctggggtttgtaagccggtctccggtgtgcccttgatatctgttttcaagtttatattttcatttcaatcatactgcattcttacttcctatctgtccgtttgatcctactccgctgacctatatatatatatatatatatatatatatatatatatatatatatatatatatatatatatatatatatatatatatatatat

SEQ ID NO: 9273 - DNA, 1036 bp, Glycine max
  Gm_smallRNAprecursor_2106
tttggatattaattaaacgttaactacaattagtgtacacacacataaaatatatataagtagaacttttatttaaatcacgtaccttaacaacaatccacctagcagcagcgttggatttaggttgtggagtatcatcaagtcctttcaaagcattagtgttgaatatgaggaacattaaaatattgatgttgttgagttatgccaatgaaaatgtattgaaaacaatattgacctgttaattattcccttaaggtagttgtctggcctgttatgtaaagaacaaaaccagacaactaggttttccttaggcagaatgacgaccatttgtcagtgtctgctgcagtagagacgaatatgggttattgtagtagtatagattatttaaattcaatttttgtgcttgacttacccattcaagtaggctccaaggtaaacatctcgttttgaactctgtatccaactcttgatgtaactttcggattcaaattgtgattgcccagatctctgaatggactgtggctcgaggaatccatacacatcagaattccccgctcgcacacttgtctcagtcagatggctatgttgttaagccaaagttaattatgtatgaatttaaaacaattactttggtaattagcagtaatctaaaatgacttatagaatccacaattgtataacagatatgctgagacattgaccaccgtgtgcaatttcagagagatcttcgtgcattatatacaatgggaagttttgattaaacaccccgaatatggtagcatcccacataacctggagaggcttcaaaaacagttgtgggatgatcaatgtcaccaggtacaggggatcatcgacctcttcatccgggctttctggaggttttgctggagacacagctacctgttgatcaaacatagttaattagcaagttttgattacagtgaacaaattaattgaaaaaaataaacatataatcagagtaaaatacttgttctgataaacgcttcacaagatgtgttggccaagcaaggaaggt

SEQ ID NO: 9274 - DNA, 1045 bp, Glycine max
  Gm_smallRNAprecursor_2107
taacactattaagatacaaataataactgaatagttatcgttacaagtttataatactatgcgtaaattagcatataagaactgttttaaaataatcagtaatatttgaatgtgattctggaaaatgcttgcagttgaaacaactttgtggtatatggaactcatggtatgaaaattttctgaaatggaagtttttaaaatatcgacttatggtgctaatttggctattgtaaatttatgaggtaattagctcttctgaggatttttttctcaacatacgaaaaccgttctagaatgtgatgcagtgacatttttgtaattaagatcactatattttatttttatgacacacattctaagatggttataaaaaaccgcgagtgaatagacaatttagtccctgagattttacccattttgcatattagtccctaacttaatgttaaattcaaaatagtctctatctttacataagtgttgcaaaatagttcttccgttaaattttaaagtaacgccgttagtgaggtcaattttagtggcacatggactatccaacgtgacactaaaggatgacgtggcatgacacgtggacgtgcctcctaaaagatgccatgtcatttgatgataacaaaacagtaaatagacaatttagtccctaacttaatgaaaaattcaaaatagtccctatcttttgcctaagtgttgcaaaatagtccctaacttaaaagatgccaaaaatcgtgcttaaagtatccatgcattgcaaaggttgtgccttgcatgatttctggcgatgcagatttctccttggattccttgtcatctttttattcctctggtttttttctcttcttttttttcttcttcctctgcttttttctcctccactttgttttcctctggttttttctcttcctattcaaaacacaaaaaaaaaaatcagaacccggaatgatacattgatggtaattgaagaaaaaaaaaagaggaaaagagaatggttatgcagacctcgcccattggtgttgacggctacacagataag

SEQ ID NO: 9275 - DNA, 1044 bp, Glycine max
  Gm_smallRNAprecursor_2108
aacactattaagatacaaataataactgaatagttatcgttacaagtttataatactatgcgtaaattagcatataagaactgttttaaaataatcagtaatatttgaatgtgattctggaaaatgcttgcagttgaaacaactttgtggtatatggaactcatggtatgaaaattttctgaaatggaagtttttaaaatatcgacttatggtgctaatttggctattgtaaatttatgaggtaattagctcttctgaggatttttttctcaacatacgaaaaccgttctagaatgtgatgcagtgacatttttgtaattaagatcactatattttatttttatgacacacattctaagatggttataaaaaaccgcgagtgaatagacaatttagtccctgagattttacccattttgcatattagtccctaacttaatgttaaattcaaaatagtctctatctttacataagtgttgcaaaatagttcttccgttaaattttaaagtaacgccgttagtgaggtcaattttagtggcacatggactatccaacgtgacactaaaggatgacgtggcatgacacgtggacgtgcctcctaaaagatgccatgtcatttgatgataacaaaacagtaaatagacaatttagtccctaacttaatgaaaaattcaaaatagtccctatcttttgcctaagtgttgcaaaatagtccctaacttaaaagatgccaaaaatcgtgcttaaagtatccatgcattgcaaaggttgtgccttgcatgatttctggcgatgcagatttctccttggattccttgtcatctttttattcctctggtttttttctcttcttttttttcttcttcctctgcttttttctcctccactttgttttcctctggttttttctcttcctattcaaaacacaaaaaaaaaaatcagaacccggaatgatacattgatggtaattgaagaaaaaaaaaagaggaaaagagaatggttatgcagacctcgcccattggtgttgacggctacacagataag

SEQ ID NO: 9276 - DNA, 1044 bp, Glycine max; identical to SEQ ID NO: 9275
  Gm_smallRNAprecursor_2109

SEQ ID NO: 9277 - DNA, 1043 bp, Glycine max
  Gm_smallRNAprecursor_2110
acactattaagatacaaataataactgaatagttatcgttacaagtttataatactatgcgtaaattagcatataagaactgttttaaaataatcagtaatatttgaatgtgattctggaaaatgcttgcagttgaaacaactttgtggtatatggaactcatggtatgaaaattttctgaaatggaagtttttaaaatatcgacttatggtgctaatttggctattgtaaatttatgaggtaattagctcttctgaggatttttttctcaacatacgaaaaccgttctagaatgtgatgcagtgacatttttgtaattaagatcactatattttatttttatgacacacattctaagatggttataaaaaaccgcgagtgaatagacaatttagtccctgagattttacccattttgcatattagtccctaacttaatgttaaattcaaaatagtctctatctttacataagtgttgcaaaatagttcttccgttaaattttaaagtaacgccgttagtgaggtcaattttagtggcacatggactatccaacgtgacactaaaggatgacgtggcatgacacgtggacgtgcctcctaaaagatgccatgtcatttgatgataacaaaacagtaaatagacaatttagtccctaacttaatgaaaaattcaaaatagtccctatcttttgcctaagtgttgcaaaatagtccctaacttaaaagatgccaaaaatcgtgcttaaagtatccatgcattgcaaaggttgtgccttgcatgatttctggcgatgcagatttctccttggattccttgtcatctttttattcctctggtttttttctcttcttttttttcttcttcctctgcttttttctcctccactttgttttcctctggttttttctcttcctattcaaaacacaaaaaaaaaaatcagaacccggaatgatacattgatggtaattgaagaaaaaaaaaagaggaaaagagaatggttatgcagacctcgcccattggtgttgacggctacacagataag

SEQ ID NO: 9278 - DNA, 1078 bp, Glycine max
  Gm_smallRNAprecursor_2111
tcaagatgatgataatgatgctggaaatgatttggtatttgaagatgatgatgctctaaattgggcaactgtgtatcagacttcggaggttggagagtgtaggatgtatactaggcggaaaaagcaaaatacaagtgttgctgctgcccaaacttctaaaaaacaggcaatggttgttggatcttcatcaaggaagcaaaaagcagtccaagaaaatgatgaggatctagatgttgaggagaatattgatgttgaatctgaagaagaagaaaccatggtcaattttgaggcgtctgatggggaagagggagagggagatgctccattaccatatgataacaacgaagatgattatgttgggattggagaagatgattagagcctcaaccttcactttgcactttgcattatgtttttatcattttcttattttgaactctttaatgagtttatttggtgttagtacttgattattgtatgaactcatgaaacttttttagtttatttgaatgcaatcctttgtttttttcaatttcaatgagtttatatatatgttttttttttttttgtccgccatgacatccgccattttccgctacgccatccgccatatttttatggcagatttttgactttccgccatgaaccgccatccgccattaacaacattgtattgtagacagctgtatgtagacagctgtgtaggaaaaagtgttgagtgtatgtgtgaggttgagtgtatgttaagctttaggtcgagtgtgtgggaagtttgatcactctctcactctttctctgtactatatatatgtgttaatataaaggctttgagtggctgagaaaaaaaaactcagcacctttctaaaatccttcagcaatgtagtcctgaattttcaacaatcaatatcatttttatatgaactaaaaaaaatctaaagccattaaaacacacacaaacaaacaaaattacaatatcatattatttttaagaaattacttttctttctgacatgtttttgaggaaaaaaaaaactatgggtaaatccttccattggtgtaacatcgaattgaaataaaa

SEQ ID NO: 9279 - DNA, 1187 bp, Glycine max
  Gm_smallRNAprecursor_2112
agcttctctgtgcggaaaggatacaaacggacagataggaagtaagaataatgaaatatgacaaatgcaggaattaaaaacttgtaaaacagataccaagggcacaccggaattcggcttacaaatcccaggttttcgaaaacaaagaaaccgaagcggcgacagagccgcacaggatcggtgaagggagaagggagatgtgaaaaatagaactttgaatttatttcaatcgaaagaaaagcttacaaagagttttttcctaggcagagcttctctctctaaaacctggttatgagactatctgaaagggtgcctcacaaagggaacaaagactcttttaaatagacccacgatttcactgtatctacagtgtcggtaatgtttaccgaaactgttacaaattacattattaccgggtaccgagtaattagttacaataattcgtgattactacaactaactaatcatcgtctaacgatataccaaaacagtcatcctcattctggtagaatggatcatcttcttggtcatcattattttcggatgattcagcttccttcttggggggttcttctttttcttcctgttgaagcagttggagaacttccttaagattttgagcaagactctttttagattttcagcttgccaagcatgctacaagttgagacttctgattcagaaacaaagatgtctctggatcagcaggtttgagaaactcagggttcctctgaaaccagttcttgactttttctggagcagcctttgaggtatcaaattgtgaccaccattttacaaaggcatgtctctgtaatggtggatactacttgctattttcagttttcccatatctgtattgccatgaaaaaatccatgacaaggcaaaactggaaaagtactttaaatctgcaggaattcttgattccttgctattgaagagcttgttgaattgttggaatccctgttggacttcttccggaaatatctgtggaattggtccgaagtagttccaccattggaggaaccaatttggaaaattatacacggtgttatttttgaagtaaattagccatgaatgcttgaatttactattttgatgctagaacacattggtccaggcgtcaatgtagtcccaataattatatcctgcagggtcaaaaggtgcagaaatttttttgggttggttt

SEQ ID NO: 9280 - DNA, 1190 bp, Glycine max
  Gm_smallRNAprecursor_2113
gaagggagatgtgaaaaatagaactttgaatttatttcaatcgaaagaaaagcttacaaagagttttttcctaggcagagcttctctctctaaaacctggttatgagactatctgaaagggtgcctcacaaagggaacaaagactcttttaaatagacccacgatttcactgtatctacagtgtcggtaatgtttaccgaaactgttacaaattacattattaccgggtaccgagtaattagttacaataattcgtgattactacaactaactaatcatcgtctaacgatataccaaaacagtcatcctcattctggtagaatggatcatcttcttggtcatcattattttcggatgattcagcttccttcttggggggttcttctttttcttcctgttgaagcagttggagaacttccttaagattttgagcaagactctttttagattttcagcttgccaagcatgctacaagttgagacttctgattcagaaacaaagatgtctctggatcagcaggtttgagaaactcagggttcctctgaaaccagttcttgactttttctggagcagcctttgaggtatcaaattgtgaccaccattttacaaaggcatgtctctgtaatggtggatactacttgctattttcagttttcccatatctgtattgccatgaaaaaatccatgacaaggcaaaactggaaaagtactttaaatctgcaggaattcttgattccttgctattgaagagcttgttgaattgttggaatccctgttggacttcttccggaaatatctgtggaattggtccgaagtagttccaccattggaggaaccaatttggaaaattatacacggtgttatttttgaagtaaattagccatgaatgcttgaatttactattttgatgctagaacacattggtccaggcgtcaatgtagtcccaataattatatcctgcagggtcaaaaggtgcagaaatttttttgggttggtttaagtttgagccgtaatgtcgtggctgcattacttttaggatctggattgtggagtgggtgtttagatttggatctttggggtccttgaaatgtttaatagatacggagtttgtatctattagaatgaattcatagaattttctggttttgtttgtggctgttggcctataatgaaatctcggggggaatact

SEQ ID NO: 9281 - DNA, 1184 bp, Glycine max
  Gm_smallRNAprecursor_2114
caactaactaatcatcgtctaacgatataccaaaacagtcatcctcattctggtagaatggatcatcttcttggtcatcattattttcggatgattcagcttccttcttggggggttcttctttttcttcctgttgaagcagttggagaacttccttaagattttgagcaagactctttttagattttcagcttgccaagcatgctacaagttgagacttctgattcagaaacaaagatgtctctggatcagcaggtttgagaaactcagggttcctctgaaaccagttcttgactttttctggagcagcctttgaggtatcaaattgtgaccaccattttacaaaggcatgtctctgtaatggtggatactacttgctattttcagttttcccatatctgtattgccatgaaaaaatccatgacaaggcaaaactggaaaagtactttaaatctgcaggaattcttgattccttgctattgaagagcttgttgaattgttggaatccctgttggacttcttccggaaatatctgtggaattggtccgaagtagttccaccattggaggaaccaatttggaaaattatacacggtgttatttttgaagtaaattagccatgaatgcttgaatttactattttgatgctagaacacattggtccaggcgtcaatgtagtcccaataattatatcctgcagggtcaaaaggtgcagaaatttttttgggttggtttaagtttgagccgtaatgtcgtggctgcattacttttaggatctggattgtggagtgggtgtttagatttggatctttggggtccttgaaatgtttaatagatacggagtttgtatctattagaatgaattcatagaattttctggttttgtttgtggctgttggcctataatgaaatctcggggggaatactttggcggttgccttgaaaggattcttgtcccagtattctggctccatttgtaagacattgaagaatttttttttttgaaatatagctgttgctaggttgtggtgttgattcttgtggagtcaatggttggcttggtttttggttacagatagttttggtctgtttggctttttgaatttgtttttgcaggtctgtttcagaatcatcgtctgattctgaggccatttctgcccaggtttttttggccaattttggtac

SEQ ID NO: 9282 - DNA, 1054 bp, Glycine max
  Gm_smallRNAprecursor_2115
ttttttgaaagtaaatggaattcttcccctatgtcttgccctagaggaatattgttttctactgttttgattatgtaatcaaagttgtgtttatctttaattgttttaggaacgtatagttgatcctgagggatttctgggatgttccagtcatccatgttttgattgatttctttgaatcagacttcctcatcgaagagattgtgtttaggggtgaccttttgggtctggttatcttgttcacttaataagtttgaatttctggaagaagtcgatgaagaggaattagatcgaaaggaaatgcgcgagaaagaacgcaagagtctagacataattataaaatcctctaatatcttcgccctcatttggttccatagaaatatttccgtaagcaaatacgtaacaaaatttttcgaatttgaattatttttaagaaaaaactctttttttttttaaaatagtttgaacggcaatcctatagccaccagtatattatgtcttgatattttggttaaacagtacaccttagccttactgccctttgtccatcacgggtcttactgctacagtaccattcaactaaaatactagactgttgtactttcaggaagtactgttcaaacatctattgtacatattaaaataaaatattctccgtactatacagggtttcagatccataaaatttgttaacatatgtccttacggacagtattcctacttccccatcaagacgctctgataccagagatcagcggaaaggatacaaatggacagataggaagtaagaatatgacaacatatatccttgatcatgtaatagagtgggtggtttttgagagtggctgaaaaacagagaaggtgaaaaacagcagaaaaacagagagttcaatagagaaagagagctaggagattgagaaaggttttggaagagagaaaccaagaaagatcaaagctagctgctgcttgtattgaacttgtaatttcatgatcaatgtgatgatgaggagctgcactttcccgtggatgtaggcacattgccgaaccacgtaaa

SEQ ID NO: 9283 - DNA, 1130 bp, Glycine max
  Gm_smallRNAprecursor_2116
ttacaagattggtgctgaccactttggttctgactttgcaatggcttaaaggaaaacccattctcctagtaagaaacttttatcatactattttttttatgtattagttttataattcagaattctaagttatgctcttggttggtaattggtattgcagcatattggtggcgaatgtttgggtcacaaactccaaatttgcagaagctagctattaagattttgagtttgacttgcagtgcttcaggatgtgaaagaaattggagtgtgtttgagcaagtaattgtgacaaaactctaactatactttttaattttatttaattttgatgatcaagttttatttggagtatatttgagattgaaatcaacatttatttgttatgttgtagattcattccaaaaaaagaaataggcttgagcacaagaggttgcatgatttggtgtttgtcaaatacaaccaacaattgaagcaaagatatattgcaagagatgaaattgatccaatttctcttaatgatattgatgtatgcaatgaatggctcgtgggagagatggatcaagatgatgataatgatgctggaaatgatttggtatttgaagatgatgatgctctaaattgggcaactgtgtatcaggcttcgggggttggagagtgtaggatgtatactaggcggaaaaagcaaaaaacaagtgttgctgctgctcaaacttctaaaaaacaggcaataattgttggatcttcatcaaggaagcaaaaagcagtccaagaaaatgatgaggatctagatgttgaggagaatattgatgttgaatctgaagaagaagaaatcatggtcaattttgaggcgtctgatggggaagagggagatgctccattatcatatgataacaacgaagatgattatgttgggattggagaagatgattagagcctcaaccttcactttgcactttgcattatgtttttatcattttcttattttgaactctttaatgagtttatttggtgttcgtacttgattattgtatgaactcatgaaatttttttaatttatttgaatgcaatcctttgttttttttcaatttcaatgagtttatatatatgtttttttttgtccgccatgacat

SEQ ID NO: 9284 - DNA, 1074 bp, Glycine max
  Gm_smallRNAprecursor_2117
gatggatcaagatgatgataatgatgctggaaatgatttggtatttgaagatgatgatgctctaaattgggcaactgtgtatcaggcttcgggggttggagagtgtaggatgtatactaggcggaaaaagcaaaaaacaagtgttgctgctgctcaaacttctaaaaaacaggcaataattgttggatcttcatcaaggaagcaaaaagcagtccaagaaaatgatgaggatctagatgttgaggagaatattgatgttgaatctgaagaagaagaaatcatggtcaattttgaggcgtctgatggggaagagggagatgctccattatcatatgataacaacgaagatgattatgttgggattggagaagatgattagagcctcaaccttcactttgcactttgcattatgtttttatcattttcttattttgaactctttaatgagtttatttggtgttcgtacttgattattgtatgaactcatgaaatttttttaatttatttgaatgcaatcctttgttttttttcaatttcaatgagtttatatatatgtttttttttgtccgccatgacatccgccattttccgctacgtcatccgccatatttttatggcagatttttgactttccgccatgaaccgccatccgccattaacaacattgatatcaccacagaaatttatattattttcatatgatgtgatatattacaatgtgatacaaaacatgaagcactaacctttacttatactaatattaccaatactagatcataattctaggttatcaaggcaaaaaatcataaaaggtaagaaagtatggaaaccaaggaaaaagggaaactaatcctaggaaattatgtctaagatataaatatattattgaatattatatatgttaatgcaagaaaacattttactttgtattttaaattcaatcattttgcgcgcttgcatttttggtacaagggaagttttatctatagcagtggtgcttcttagccttcgccaagtatcatttggtactgtgaatccataggtaatttgaacaaaggtagaatatacagcata

SEQ ID NO: 9285 - DNA, 1130 bp, Glycine max
  Gm_smallRNAprecursor_2118
ttacaagattggtgctgaccactttggttccgactttgcaatggctcaaaggaaaacccattctcctagtaagaaacttttatcatactattttttttatgtattagttttataattcagaattctaagttatgctcttggttggtaattggtattgcagcatattggtggcgaatgtttgggtcacaaactccaaatttgcagaagctagctattaagattttgagtttgacttgcagtgcttcaggatgtgaaagaaattggagtgtgtttgagcaagtaattgtgacaaaactctaactatactttttaattttatttaattttgatgatcaagttttatttggagtatatttgagattgaaatcaacatttatttgttatgttgtagattcattccaaaaaaagaaataggcttgagcacaagaggttgcatgatttggtgtttgtcaaatacaaccaacaattgaagcaaagatataatgcaagagatgaaattgatccaatttctcttaatgatattgatgtatgcaatgaatggctcgtgggagagatggatcaagatgatgataatgatgctggaaatgatttggtatttgaagatgatgatgctctaaattgggcaactgtgtatcaggcttcgggggttggagagtgtaggatgtatactaggcgaaaaaagcaaaaaacaagtgttgctgctgcccaaacttctaaaaaacaggcaatgattgttggatcttcatcaaggaagcaaaaagcagtccaagaaaatgatgaggatctagatgttgaggagaatattgatgttgaatctgaaaaagaagaaatcatggtcaattttgaggcgtctgatggggaagagggagatgctccattaccatatgataacaacgaagatgattatgttgggattggagaagatgattagagcctcaaccttcactttgcactttgcattatgtttttatcattttcttattttgaactctttaatgagtttatttggtgttcgtacttgattattgtatgaactcatgaaacttttttagtttatttgaatgcaatcctttgtttttttcaatttcaatgagtttatatatatgttttttttttgtccgccatgacat

SEQ ID NO: 9286 - DNA, 1074 bp, Glycine max
  Gm_smallRNAprecursor_2119
gatggatcaagatgatgataatgatgctggaaatgatttggtatttgaagatgatgatgctctaaattgggcaactgtgtatcaggcttcgggggttggagagtgtaggatgtatactaggcgaaaaaagcaaaaaacaagtgttgctgctgcccaaacttctaaaaaacaggcaatgattgttggatcttcatcaaggaagcaaaaagcagtccaagaaaatgatgaggatctagatgttgaggagaatattgatgttgaatctgaaaaagaagaaatcatggtcaattttgaggcgtctgatggggaagagggagatgctccattaccatatgataacaacgaagatgattatgttgggattggagaagatgattagagcctcaaccttcactttgcactttgcattatgtttttatcattttcttattttgaactctttaatgagtttatttggtgttcgtacttgattattgtatgaactcatgaaacttttttagtttatttgaatgcaatcctttgtttttttcaatttcaatgagtttatatatatgttttttttttgtccgccatgacatccgccattttccgctacgccatccgctatatttttatggcggattttttactttccgccatgaaccgccatccgtcattaacaacattgcttggagcattgcagctctgaagaacagattgctgacataatgacaaaagcactttccaagggaaagtttgaaatgccaagattaagacttggagtgcacaagaaaactgtcgaagagtgttagaattgagacttttcttggtattttggtattaaatatgttgttgttatgtttctgatataagttagtattagtcaacatgtagtaggagaaattgaatgaaagaccttgttttaagggagtggttaggctaagtcagtatgggatgcgttgtgttgcttgtaactttgtattttcagcaactacaagtcacttatgtatgctggaaaaatcctaacgaaaatacaattctatcttccaccattttttgctggttgtgatatttcttttatgctttctattccca

SEQ ID NO: 9287 - DNA, 1041 bp, Glycine max
  Gm_smallRNAprecursor_2120
agacttagcaatctccacaaaaagtctattggactatggatgtttggaatcaatcttgattccttcattagatagatttgaaggatttaacccctcaattaatgaggccataaacctaatacaggcagaaatgatggattacattgccatcaaaagaataatttgcttgagcaatttctttgctcaaaattatccctaccatgttatgaaactcctactagaggatcatagagactttccctgcctgttcaatgatgaatacaagacttgggatgtacaaggtaacacacagtaccaatacaacctcatgaggccacaaatacaagggaaccaatggttcttctcagaatcagacaaacgagagtttgacctgataagagaaacctatgatacaaagttgttccaaccatcatacaatgggaagttcttcattcctttcccaattgaccacaacaacaaattggttcatttcttccaaaaagagaagaaagataaagagatttacgaagccagtggatgtcatggacaacaaactcctccttttccatccactgatctctcaatggaggactcatcagacatttctgctctggaaatatccaagacgaagaagaaagcgttactataacaaaatccacaaagagttgatcaaaagacaaaagcatcctgccaaaatacagatgtaaatttaagacgggaatctttactattgcaaagactctgacactgagtctatctataaaattttattgtaaaatgggccatgtgacaaagtaaatgaatagtaattttactgttattgactgcaatggttttgtgttactatataagatggaccagattgtttaagaaaagtctaaaagtaaataatatacggttgcgcgcctaaagagttttgcaatttaaattattaaggttaatatgaagctcaagtgggagattcttaggaattttataattcctacttaattaattagtgtgggctacaaattatatttatcatttatattagttatttacatttatgggctcaataaaagt

SEQ ID NO: 9288 - DNA, 1042 bp, Glycine max
  Gm_smallRNAprecursor_2121
ctggatacctagccaacaagaccattgtccaaatcagcagagaggaagtggtctctttccctgccaagtaaaacaactttcattcctcaattacttcttggttggtcattccaacagccctactatttccatgtccctggatttccttgtgatttgattccaaaagtatgcttaataaatcttcattggaggaccattctccatggttttctctcttttttttatgataccctcaattgaatctagtatctctttttcaattgcttccatcctcttgttggtagttgtaggtacatgcctagaaacatatgttaattatgaaggaatgaacttctttgaattgatttgggtccataatgataacctttggtgttctaccttcccaaaggaaggatttcttgcctgcacatcctttacttatcagcaacagctcaaaaaggcttcaacaactaagaagtatacttacgagtaaatagacattttggtccctaacttttggctccttttgcaaattagtccctatctttttaaaatataaaaaatagctcctatctttgcataagttttgcaaaatagtccttaccattaaatttaaaagtaacgccgttagtgaggtgcattattggtaattttagtgccacatagactatccaacgtgacaaattgtctcagattgtgacacatagactggactttgatgcgaaatttaaaaagttgtcaaatattttcttcttcacttcttcttcaacctggcgataccaggtttgtcttcttatagcttcatgtgtgtaaaatgactggaaagagatgatacaagtaaaattattgattaattaattgcttacatatggagtagatcataaaattaaaattaaagttgttgttgctgtgtatgatatgatgcagctcattgcgataagacggtggcaatgatgctagtggggaacaaatgtgacttggagaatataagggcggtgaacattgacgaagggaaaagccttgcggaagcggaaggcttgtttttcatggaaacgtctgtgtt

SEQ ID NO: 9289 - DNA, 1197 bp, Glycine max
  Gm_smallRNAprecursor_2122
tatttccttctcaatatcctccaactcatcaaaacttatttgcagtacatcatccataatgtttttactataatttctcttaacctaacagatgcacttctccactatgaaacatctcgatcaaacaaagatgagtgcaatacttcaattgctaaggaatgaccatgggcatgtgatagtacgtcataagccaacttctcataaccactcgtaacataattacttttgaaagcatttctacaaaacaactaaaccacatgttcgcggtccaatgctagacttggtaaacatcatccttcatataatttcctcttctctctgtgaaacatctcgtccaaacacggatgagcccaatacttcaattgctacggaatggccttgggcatgtgataatacatcacaagtcaaccttttataatcactcatagcataattacttttgaaagcatttttgcaaaacaattgaacaacatgttcttgatctaaagtctggacttggtaaacatcatctactccatgtctcctcaatataattatccctagaaattatgatgattatgctccctccacctaggcattcacgtaacaaagtacatctactacctgtaaacatctttagttgttcaacttgatcaacattattaagaactatccatgcccttgcatagattgcaaatctctaaacttttttcattcaaagattcacaaagtaattgtttttgtaagcccaatacaccaaaatcttgataaattttgcttacatcatcaataaaacaacaaaaatcatattgatgagagatttctacataaaaagcatgaccaattgttgtttttcctattccacccatcctactaattcccacaagttgaatgtcattaacagaccccaaacgtaaaagctttgctaattcttaacacgagattccatctcaactagatcatcatttggaagacaggaaaatttgtgacccaacatatttgttattatcttttcaacaatatcttcaagctctgcatattgtagcctgaatgaacatttaatgaaaatcaagaatgtcaaataatcaccaaaccctagagaaccaaaacagaatgtacatgcatagaagcaaataagaagcaagaacagagtatttcttcccttttaaatactatttgcattaaacatgtataaatttccaacccaatttccatcct

SEQ ID NO: 9290 - DNA, 1196 bp, Glycine max
  Gm_smallRNAprecursor_2123
atttccttctcaatatcctccaactcatcaaaacttatttgcagtacatcatccataatgtttttactataatttctcttaacctaacagatgcacttctccactatgaaacatctcgatcaaacaaagatgagtgcaatacttcaattgctaaggaatgaccatgggcatgtgatagtacgtcataagccaacttctcataaccactcgtaacataattacttttgaaagcatttctacaaaacaactaaaccacatgttcgcggtccaatgctagacttggtaaacatcatccttcatataatttcctcttctctctgtgaaacatctcgtccaaacacggatgagcccaatacttcaattgctacggaatggccttgggcatgtgataatacatcacaagtcaaccttttataatcactcatagcataattacttttgaaagcatttttgcaaaacaattgaacaacatgttcttgatctaaagtctggacttggtaaacatcatctactccatgtctcctcaatataattatccctagaaattatgatgattatgctccctccacctaggcattcacgtaacaaagtacatctactacctgtaaacatctttagttgttcaacttgatcaacattattaagaactatccatgcccttgcatagattgcaaatctctaaacttttttcattcaaagattcacaaagtaattgtttttgtaagcccaatacaccaaaatcttgataaattttgcttacatcatcaataaaacaacaaaaatcatattgatgagagatttctacataaaaagcatgaccaattgttgtttttcctattccacccatcctactaattcccacaagttgaatgtcattaacagaccccaaacgtaaaagctttgctaattcttaacacgagattccatctcaactagatcatcatttggaagacaggaaaatttgtgacccaacatatttgttattatcttttcaacaatatcttcaagctctgcatattgtagcctgaatgaacatttaatgaaaatcaagaatgtcaaataatcaccaaaccctagagaaccaaaacagaatgtacatgcatagaagcaaataagaagcaagaacagagtatttcttcccttttaaatactatttgcattaaacatgtataaatttccaacccaatttccatcct

SEQ ID NO: 9291 - DNA, 1187 bp, Glycine max
  Gm_smallRNAprecursor_2124
atcagcttcacgaacatcccgcagttcttcctccatgcctcttgaagacctagaacagttgacccaacaaatcagagaccaactggaggagtcaatcacagaaaaagtgactcgaaagatgatggaatgcttcagccagatgcagtcccagtttcagtctcagatgcaatcacagggaattgcactacctccagagccagaggttggtccctcagatcctcgtgtcagcacaaaggagagttgtgttgctccctcagggaacgatccagggacgggtgactcagacaaatgcggcctatatattgaagaaaatccttcccgcttggttgccctaggaagactttacgagggatccacaacagttcacaacttccctttgttgcatggccaagtcaaggttggtgttgaggaggttaaagatacagaggctctcattcctgtacccactgacgaggttaccttagtggggcaggcacttaacactttccttgcttggccaacacatcttgtgaagcgtttatcagaacaggtattttactttgattatatgtttattgttttcaattaatttgttcactgtaatcaaaacttgctaattaactatgttttatcaataggcagctgtgtctccagcaaaaccttcagaaagcccggatgaagaggtcgatgatcccctgtacctgatgacattgaccatcccacaactgtttttgaagccgctccaagttatgtgggatgctaccatattcggggtgtttaatcaaaacttcccattgtatataaagcacgaagatctctctgaaattgcacatggtggtcaatgtctcagcatatctgttatacaattgtggattctgtaagtcattttagattattattaattaccaaagtaattgttttaaattcatacataattaactttgacttaacaacacaaccatctgactgagacaagtgtgcgagcggggaattctgatgtgtatggattcctcgagccacagtccattcagagatctgggcaatcacaatttgaatccgaaagttacattaagagttggatacagagttcaaaacgagatgtttaccttggagcgtatctgaataggtaagtcaaacaaaataattgaatttaaataatctatactactacaataacccatattcgtctctactgcaatggacactgg

SEQ ID NO: 9292 - DNA, 1178 bp, Glycine max
  Gm_smallRNAprecursor_2125
acccattttttaggaagagttacctcatcccattttatcgttcttggaagagaaacattggcctttgtcaaatctgtaataaacaaagttgtttctcctctttgaggttttaataggactctagacacacgagtgttcatgaccttatactggatcctatagattagagctgttgggattgatccttccttcatgtcggggccatgaaagtggatgtttaagaacagagagtcaagaatgtttctatccatcagactcactgttttttttggataacaattgaagtatactggaccttgtcctaggcttgtttctactgttcatattaaggaatcttcaaatttgttatgcctaatgtctctaaggcacattaaaattgctgcatctatacccatatcaattaagggcttgatggctacatgtacacaatcgatgtgtaaataattgtatttttggctatgttcgtagattgagttctatgaaagtaaatgaaattcttcccctatatcttgtcctagaggaatattattttctatagtttttattatataatcaaagttgtgtttgtctttaattgtctcgtttgtctttaattgtctcaggaacatacaatgtgtcctgaggaatttctggaatgttccagtcatccatgttttgatttatatcttggaattggacttcctcatcgaagagattgtgttttggggtgacctcatgggtctagttttcatgctcattgagaaaattgttatttttgagtgaattcatagaagaagaggatgaagacgagttggatctaaatgaaatacgagaaaaggaatgtaaaaggcgagacatgataatttcatcctctagtatctttgtcatcatatggttccataaaaatgtttccataaggttatatgtcactgaatttcttggatctgaaaaactaaaaagttttttttatggtcaatatagtttgaacactactcctatagccaccaatatattatgtcttaatattttatctgaacaatacaccttagccttattgtcctttctcatccacgagacttactgctacagtatcattcaactaaaatatcagactgctgtgcttccagaaaatactgttcaaacatatattgcttaaattaaaagtatacattctaaaaaataattaatgtgcaaaagtt

SEQ ID NO: 9293 - DNA, 1073 bp, Glycine max
  Gm_smallRNAprecursor_2126
gaaattttggataagccaaatcatgtttataaattgaaaaaggctttatatggcttgaaacaagcccctagggcttggtacgagtgtctaagtaagttccttttagaaaaggacttttctagaggaaaagtggattctactctttttataaagagaaaatcacatgatattttactagttcaaatttatgttgatgacattatttttggatccactaacgaattattgtgcaaggaattctcccatgacatgcaaagtgagtttgaaatgtcaatggtggcagaacttaacttctttcttggattacaaattaaacaaactaaggatggtatctttgtcaatcaatccaagtattgcaaagaattaatccacaaattcgacatggaaaatgctaagcacatggctacaccaatgagcactgcttgctatctagataaagatgaaaccggtcagtcaatagatgttaagcaatatcgaggtatgatcggatcactttttttatttatctactagcaggcctgatataatgtttagtgtgtgtatgtgtgctagatttcaatcaaatcctaaacaatcacatcttagtgctgttaaaagaatcattagatatttggtaggcactacaaacataggtttatggtatcctagaaattccacatgcaccttaattggatattctgattcagacttagccggttctaaaacagatagaaagagcactagtggaacttgtcaattcattggatctgctctagtttctttttcttggcacagtaagaaacaaaatagtgttgctttatccattgcagaagcggaatatatttctgtcggcaattgttgtgctcaaatcttatggatgaagcaacaactttctgattatggaatccttcttgaccaaatacctattagatgtgataatacaagtgcaattaatctctccaagaatccagttcaacactctagaactaaacatatagaaattaggcaccattttcttagagatcatgtcctaaagggagattgtgtattagggtttgttgatactaagaatcaacttgctgatattttcacaa

SEQ ID NO: 9294 - DNA, 1036 bp, Glycine max; identical to SEQ ID NO: 7739
  Gm_smallRNAprecursor_2127

SEQ ID NO: 9295 - DNA, 1053 bp, Glycine max
  Gm_smallRNAprecursor_2128
ctgagggagcaacacaactctcctttgtactgacacgaggacctgagggaccaacctctggctctggaggtagtgcaattccctgtgattgcatccgagactgaaactgcgactgcatctggctgaaggattccatcatctttcgagtcactttttctgtgattgactcctccagttggtctctgatttgttgggtcagctgttctaggtcttcaagaggcatggaggaagaactgcgggatgttcgtgaagctgatccaaagtattgctttatggtgacaccggctccaacagcacgaacacggccagggtgctctggtcgcccaatggcagcagtcaggatatcctgacgtccatgggggacaaacgatccctgtgacgcctgctcgtccaaagaatcctgtaccgaacacatatttgtccaaggaattcacaaaatacacaaagataattacaattattaattaaaaatgacttacaatcctgtcagctatttcttttgctgcctcagacgtcatctgtccagttttcttcgtgcgggccatcttccatttcacgtggcgtctgatgggagatggagggtcaatgatgccctcagtgcttccagactgggcagcttcttccagtcttttctttgccttctcagccatgagcttttcttctaaatattcataacccccacgagacaatacgtggggggcagtgttttgcttctgggaggcctgtgccttttttcgtacatcctgcaaaagtttaacattaatgaaaatgattattacaataaattataagaaatgattttgttgtggaaaacaactaaaatgacaaagtacatacctcccatgaggggtctctacgggtctgacaaaactgagtccatttctccttgctaatgccatatttttcacagacaatgtcgtccgcaccgtccttgtcgactgcaagtgcccatttcctagtcaagtcagatttaaattgcctccagcgctcgccgacaatctgaagaattttcttctttgtcctattgtcagaagcttcagggatttgaaattc

SEQ ID NO: 9296 - DNA, 1053 bp, Glycine max
  Gm_smallRNAprecursor_2129
gagggatcaacacaactctcctttgtgctgacacgaggacctgagggaccaaccataggctctggaggtagtgcaactccctgagattgcatctgggattgaaactgggactgcatctggctaaaagatgccatcagctgtcgagtcactttttgtgtgatcgactcctctagctggtccttgatttgttgggtcagctgctgtaggtcttcaagaggcaaggaggaagagctgcgggacattcgtggatccaatccaaaatattgcttgatggtgacactagctccagcagcatggacacggccagggtgctctgctcacccaatggcgacagtcaggacatcctgacgtccatgagggacgaacgatccttgtgatgcctgctcctccaaagaatcctgtatagaacaaatatatttgtcttaggcattcatagaataaacaagcatagttagaattcttaattgaaaatgacttacgatcttctcagcgattttctttgctgcctcagacgtcatctgcctagttttcttggtgcaggccatcttccacttcacgtggcgtctgatgggagatggagggtcaatgacgtcgttagtggttccagactaagcagcttcctccagtttctttttggtcttcttagccattagcttttgttctaaatattcataacccccatgagacaactcgtgggggacagtcttttgcttctggatggcctgtgcctttttttgcacatcctgaaaaaatcaaacattaatggtacaaattactacaatgaattataacaactgaatcttttgtggaaaacaactaaaatgacaaagtacatacctcctaagaagggtctatgtgtctctgacaaaactgggcccatttctccttgctaatgtcgtacttttcacagacagtgtcgtccacaccgtcctggtcaactgcaagggcccatttcctagtcaagtccgatttaaactgccgccacctcttaccgacagtctaaagaattttcttctttgtcctactgccagaagcttcagggatttcaaattc

SEQ ID NO: 9297 - DNA, 1076 bp, Glycine max
  Gm_smallRNAprecursor_2130
tatcagcaacacaatgtacaactgccagtcggtatactcgaggttggcataaccttcgatgacaaagcacaatgtattcgagcaatcaaagaatataacatcagaaatcattttgattgcaaaacaatttactctgactaaagaaggctaaacttcgtctgcaagttacatgaaaatggttgtacatggagcttgggtgcatgcaattcaaagaggcataacaaatggattatcaagagtatcagaggtcatcacacttgtctcgtgccgatgctcagacaagatcatcaccaactcgacaaacatgtcataccacagatcatccaaccaattgtcaaaacaaacccaaccgtctccatcaagacgttgattgtagagatcaaaacgttcatgaaatataccccatcctacaagaagacatggttagcaaagcaaagagcgttggagatgattcatggaaactgggaagaatcatatgccaaactgccaaaacttttcagagctttgcaatcttgtgttctcgggactgtggtcactgctcaaacagaattcttgtgagaggggggagaaataataccgggcaaaagattgtttaaacgtgtcttttgatcatttggtctatgcattaatggtttagcatattgcaaacccatagtacaaatagatggtacataattttacgggaagtatattggcacactgttgatagctaccgcacaagatggagctaaccatatcttcctgattgcctacgccattgtagaaggggagacaacttcagcttggggttttttctaaagaatttgagaagacatgttactccgcaaattaacatttctctcatctcagactgacacccctcaattttaagtgcctacaacaacccaattaacttatgagtccaggacacatcccatttcttttgcctgcgccacattgcacaaaactttgttcgcagtaactcaaactgcaaacatttaaagaaaccattcatgttggctggtgagaatctattttatttattcgttaaaattttctttcaaccaaattttataacataatacatccattgaata

SEQ ID NO: 9298 - DNA, 1062 bp, Glycine max
  Gm_smallRNAprecursor_2131
tttaattttagtggattttatttgattattgacgtaattttgaatgaagtgaaaaataaaattaagggtttcctttggttcgatctcactataggcgatccacctcagcgggagagaagtcaaagaatcaagataaagaaagaactcaagaatattacaaaaggttagtgtgattttatttgcaatcaattcttttgctttagtgttttagtttttcatatggtttcgaaaggcaatttaattctatgtattcaagagatattttgttctttgagaaacacatctataattctttatacttccttcccaaattcaaccaaaaaactagtgaaggtgagaaatgaatattccataattttaggatagacatgaattcgatagtatgtgccatttgaaatgagttgcaacatgcaagccaaaatccctttttcactattagaaaatatactttttacattggttatttatgacttttaacatcggtttttgaaccgatgtttaaagtaccgacgttgatagtattatcattaacattggtttttaaaaaatcgatgttaacgataatactatcaacgtcggtactttcaacatcggttatataaataacctatgttgctaatatgaattacacccaaaaatgtatattaatgttgaaaattaacatcggttttctgtaaaaaaaaaccgatgttaacaaatgtgttaatgttgacagttaacatcggttttttcaaaaaaccaatgttaacattagttaacatcggttttatgtaaaaaaaactgatgttaacgaatgtgttaatgttgacagttaacatcggttttctgtaaaaaaccgatgttaacgaatgtgttaatgttgacagttaacatcggttttctgtaaagaactgatgctaacgaatgtgtaaatgttgacagttaacatcggttttttcaaaaaaccgatgttaacgtttgttaacatcgattttctgtaaaaaaaaatcgatgttaacgaatgtgttaatgttggcagttaacatcgatttttttgtaaaaaaaaaccgatgttaactgtca

SEQ ID NO: 9299 - DNA, 1062 bp, Glycine max; identical to SEQ ID NO: 9298
  Gm_smallRNAprecursor_2132

SEQ ID NO: 9300 - DNA, 1063 bp, Glycine max
  Gm_smallRNAprecursor_2133
tttaattttagtggattttatttgattattgacgtaattttgaatgaagtgaaaaataaaattaagggtttcctttggttcgatctcactataggcgatccacctcagcgggagagaagtcaaagaatcaagataaagaaagaactcaagaatattacaaaaggttagtgtgattttatttgcaatcaattcttttgctttagtgttttagtttttcatatggtttcgaaaggcaatttaattctatgtattcaagagatattttgttctttgagaaacacatctataattctttatacttccttcccaaattcaaccaaaaaactagtgaaggtgagaaatgaatattccataattttaggatagacatgaattcgatagtatgtgccatttgaaatgagttgcaacatgcaagccaaaatccctttttcactattagaaaatatactttttacattggttatttatgacttttaacatcggtttttgaaccgatgtttaaagtaccgacgttgatagtattatcattaacattggtttttaaaaaatcgatgttaacgataatactatcaacgtcggtactttcaacatcggttatataaataacctatgttgctaatatgaattacacccaaaaatgtatattaatgttgaaaattaacatcggttttctgtaaaaaaaaaccgatgttaacaaatgtgttaatgttgacagttaacatcggttttttcaaaaaaccaatgttaacattagttaacatcggttttatgtaaaaaaaactgatgttaacgaatgtgttaatgttgacagttaacatcggttttctgtaaaaaaccgatgttaacgaatgtgttaatgttgacagttaacatcggttttctgtaaagaactgatgctaacgaatgtgtaaatgttgacagttaacatcggttttttcaaaaaaccgatgttaacgtttgttaacatcgattttctgtaaaaaaaaatcgatgttaacgaatgtgttaatgttggcagttaacatcgatttttttgtaaaaaaaaaccgatgttaactgtcaa

SEQ ID NO: 9301 - DNA, 1059 bp, Glycine max
  Gm_smallRNAprecursor_2134
ttaattttagtggattttatttgattattgacgtaattttgaatgaagtgaaaaataaaattaagggtttcctttggttcgatctcactataggcgatccacctcagcgggagagaagtcaaagaatcaagataaagaaagaactcaagaatattacaaaaggttagtgtgattttatttgcaatcaattcttttgctttagtgttttagtttttcatatggtttcgaaaggcaatttaattctatgtattcaagagatattttgttctttgagaaacacatctataattctttatacttccttcccaaattcaaccaaaaaactagtgaaggtgagaaatgaatattccataattttaggatagacatgaattcgatagtatgtgccatttgaaatgagttgcaacatgcaagccaaaatccctttttcactattagaaaatatactttttacattggttatttatgacttttaacatcggtttttgaaccgatgtttaaagtaccgacgttgatagtattatcattaacattggtttttaaaaaatcgatgttaacgataatactatcaacgtcggtactttcaacatcggttatataaataacctatgttgctaatatgaattacacccaaaaatgtatattaatgttgaaaattaacatcggttttctgtaaaaaaaaaccgatgttaacaaatgtgttaatgttgacagttaacatcggttttttcaaaaaaccaatgttaacattagttaacatcggttttatgtaaaaaaaactgatgttaacgaatgtgttaatgttgacagttaacatcggttttctgtaaaaaaccgatgttaacgaatgtgttaatgttgacagttaacatcggttttctgtaaagaactgatgctaacgaatgtgtaaatgttgacagttaacatcggttttttcaaaaaaccgatgttaacgtttgttaacatcgattttctgtaaaaaaaaatcgatgttaacgaatgtgttaatgttggcagttaacatcgatttttttgtaaaaaaaaaccgatgttaactgt

SEQ ID NO: 9302 - DNA, 1058 bp, Glycine max
  Gm_smallRNAprecursor_2135
taattttagtggattttatttgattattgacgtaattttgaatgaagtgaaaaataaaattaagggtttcctttggttcgatctcactataggcgatccacctcagcgggagagaagtcaaagaatcaagataaagaaagaactcaagaatattacaaaaggttagtgtgattttatttgcaatcaattcttttgctttagtgttttagtttttcatatggtttcgaaaggcaatttaattctatgtattcaagagatattttgttctttgagaaacacatctataattctttatacttccttcccaaattcaaccaaaaaactagtgaaggtgagaaatgaatattccataattttaggatagacatgaattcgatagtatgtgccatttgaaatgagttgcaacatgcaagccaaaatccctttttcactattagaaaatatactttttacattggttatttatgacttttaacatcggtttttgaaccgatgtttaaagtaccgacgttgatagtattatcattaacattggtttttaaaaaatcgatgttaacgataatactatcaacgtcggtactttcaacatcggttatataaataacctatgttgctaatatgaattacacccaaaaatgtatattaatgttgaaaattaacatcggttttctgtaaaaaaaaaccgatgttaacaaatgtgttaatgttgacagttaacatcggttttttcaaaaaaccaatgttaacattagttaacatcggttttatgtaaaaaaaactgatgttaacgaatgtgttaatgttgacagttaacatcggttttctgtaaaaaaccgatgttaacgaatgtgttaatgttgacagttaacatcggttttctgtaaagaactgatgctaacgaatgtgtaaatgttgacagttaacatcggttttttcaaaaaaccgatgttaacgtttgttaacatcgattttctgtaaaaaaaaatcgatgttaacgaatgtgttaatgttggcagttaacatcgatttttttgtaaaaaaaaaccgatgttaactgt

SEQ ID NO: 9303 - DNA, 1232 bp, Glycine max
  Gm_smallRNAprecursor_2136
gttagcactcaattgatcacaaactcaaaacgattattaaaagaaatttaattattttcctaaaattagagagagagagagaatgaccagggatgattttgcgagagccgtcgatggcggaaccgacggcaaacttgaggaggtccaccagtatttggctaatcgtgtggcggcgggccatatctgtcacggcggcggccatgtcgtcgtcggcggtgtcttgcgattccgattagcttctttctgattaaccgaagtgtgtgtggttaactggttatgtattctgagggaggagctttcaattttatcatttcggttagatattattattagtagtagtagtatttattataatttattaattatctaattgagtgatttattaattattgcagggtgttgctaggtgcacccaccactattgctggtgcacctagcattttttcaaaataccagaactgcctctcatttatgttgggtgtgcgtgagagggcggttcgtaaaagacttacggatcaagttgatctatatgttgatattttaaacatacggatcaacttgatccataaaattcttacagatcaacttgattcgtaaaaggtttacggatcaagttgatccgtaaaagaattatggatcaacttgatccttaagccttttacgaatcaagttgatccatatgttgatattttaaacatatggatcaagttgattcgtaaaatccttacagatcaagttgatctgtaagccttttacggatcaaattgatccatatgttgatagcatacggatcaacttgatctgtaagccttttacgtaggagcattttttacttttaccataaagtgttgggtgcactagcaataatgttgggtgcacctagcaacatccttgagtgcccttgagtgcatgagatgagatcagatatgtgtacgctaaaagtcaaataaaaaatatgtttttttttttctagaatacaattaccctgtaggtaattgtgtaagattatttaataggaaagttttcctccaaatactatttagttaagctggaataattttaaatcaattaatcaacatgtttaatggtaatttatattagttattatttttttcttttaaacttgattttaaaagaaaaaaaatagacttgtaaaagaaaatgagatgaaaaaaaattatgtattaaaagtgtaaacatctaatcacaaaccaccttgtgataattttgtc

SEQ ID NO: 9304 - DNA, 1233 bp, Glycine max
  Gm_smallRNAprecursor_2137
gttagcactcaattgatcacaaactcaaaacgattattaaaagaaatttaattattttcctaaaattagagagagagagagaatgaccagggatgattttgcgagagccgtcgatggcggaaccgacggcaaacttgaggaggtccaccagtatttggctaatcgtgtggcggcgggccatatctgtcacggcggcggccatgtcgtcgtcggcggtgtcttgcgattccgattagcttctttctgattaaccgaagtgtgtgtggttaactggttatgtattctgagggaggagctttcaattttatcatttcggttagatattattattagtagtagtagtatttattataatttattaattatctaattgagtgatttattaattattgcagggtgttgctaggtgcacccaccactattgctggtgcacctagcattttttcaaaataccagaactgcctctcatttatgttgggtgtgcgtgagagggcggttcgtaaaagacttacggatcaagttgatctatatgttgatattttaaacatacggatcaacttgatccataaaattcttacagatcaacttgattcgtaaaaggtttacggatcaagttgatccgtaaaagaattatggatcaacttgatccttaagccttttacgaatcaagttgatccatatgttgatattttaaacatatggatcaagttgattcgtaaaatccttacagatcaagttgatctgtaagccttttacggatcaaattgatccatatgttgatagcatacggatcaacttgatctgtaagccttttacgtaggagcattttttacttttaccataaagtgttgggtgcactagcaataatgttgggtgcacctagcaacatccttgagtgcccttgagtgcatgagatgagatcagatatgtgtacgctaaaagtcaaataaaaaatatgtttttttttttctagaatacaattaccctgtaggtaattgtgtaagattatttaataggaaagttttcctccaaatactatttagttaagctggaataattttaaatcaattaatcaacatgtttaatggtaatttatattagttattatttttttcttttaaacttgattttaaaagaaaaaaaatagacttgtaaaagaaaatgagatgaaaaaaaattatgtattaaaagtgtaaacatctaatcacaaaccaccttgtgataattttgtca

SEQ ID NO: 9305 - DNA, 1229 bp, Glycine max
  Gm_smallRNAprecursor_2138
tagcactcaattgatcacaaactcaaaacgattattaaaagaaatttaattattttcctaaaattagagagagagagagaatgaccagggatgattttgcgagagccgtcgatggcggaaccgacggcaaacttgaggaggtccaccagtatttggctaatcgtgtggcggcgggccatatctgtcacggcggcggccatgtcgtcgtcggcggtgtcttgcgattccgattagcttctttctgattaaccgaagtgtgtgtggttaactggttatgtattctgagggaggagctttcaattttatcatttcggttagatattattattagtagtagtagtatttattataatttattaattatctaattgagtgatttattaattattgcagggtgttgctaggtgcacccaccactattgctggtgcacctagcattttttcaaaataccagaactgcctctcatttatgttgggtgtgcgtgagagggcggttcgtaaaagacttacggatcaagttgatctatatgttgatattttaaacatacggatcaacttgatccataaaattcttacagatcaacttgattcgtaaaaggtttacggatcaagttgatccgtaaaagaattatggatcaacttgatccttaagccttttacgaatcaagttgatccatatgttgatattttaaacatatggatcaagttgattcgtaaaatccttacagatcaagttgatctgtaagccttttacggatcaaattgatccatatgttgatagcatacggatcaacttgatctgtaagccttttacgtaggagcattttttacttttaccataaagtgttgggtgcactagcaataatgttgggtgcacctagcaacatccttgagtgcccttgagtgcatgagatgagatcagatatgtgtacgctaaaagtcaaataaaaaatatgtttttttttttctagaatacaattaccctgtaggtaattgtgtaagattatttaataggaaagttttcctccaaatactatttagttaagctggaataattttaaatcaattaatcaacatgtttaatggtaatttatattagttattatttttttcttttaaacttgattttaaaagaaaaaaaatagacttgtaaaagaaaatgagatgaaaaaaaattatgtattaaaagtgtaaacatctaatcacaaaccaccttgtgataattttgt

SEQ ID NO: 9306 - DNA, 1176 bp, Glycine max
  Gm_smallRNAprecursor_2139
tgccacaatttgacccttaacagatttcaaaggcttgtacgttaaagaatattctgttaatgccaaagcccattttccaattctactgtgtaaaataggttttgacaacatgtgcttaataatatcataatgagaatatacataaacatcaacaggctttatatattgcttaagttttgcacaagagaaatacaaacaaagacaaagtttttctatggcagtatatctagtttctgcatcatttagtacacgactaagataataaattgcatgctctacgccatcatcatcctcctgagccaacatgctaccaatggtcttgtaagacgcagcaatatacaacttcatagtcttgtttcgactaggaggcattaacacaggaggcttgatcagatattctttaatttcatcaaaagccttttgatgcacttcatcccatttgaatggttcatctttcttgagtcgaagtaatggcgaaaaagtttgagctttgccacttagattcgaaatgaatcgcctcaagaagttgatttttcctagcaaaggctgaagctgttttttggtcgaaggaggcttcgtctcaagaatagcctttgtcttgttttgatttatctcaatgccttttttatgcaccacaaaaccaaggaaatctcctgcacgcacacaaaaagcacactttaatggattcatttttaatccatgtttcctcattcgttcgaaagattgcctaaggtaatccaaatggctatcttctgaggaggatttgatgattatatcatcaatataaacttgcataaatgtgtcaataaaatcatgaaacatggaattcatggccctttgataagtagccccagcatttttcaacccaaagggcataactacccattcataagtgcctaaagcaccagggcatcgaaatgctgtttttgacacatcactttcagcaataaatatttggttataaccagaataaccatctaacatgcttaaaaattcgaagccagctgctgaatctaccaacatttctgctactggcatagcatattcatctttaggtgtagcattatttaaatccctaaaatctatgcatactctaagagttccattttttaatgacagggactatatttgctaaccattcgacatacctggcagatctgatgaatttacacctca

SEQ ID NO: 9307 - DNA, 1157 bp, Glycine max
  Gm_smallRNAprecursor_2140
caattctactgtgtaaaataggttttgacaacatgtgcttaataatatcataatgagaatatacataaacatcaacaggctttatatattgcttaagttttgcacaagagaaatacaaacaaagacaaagtttttctatggcagtatatctagtttctgcatcatttagtacacgactaagataataaattgcatgctctacgccatcatcatcctcctgagccaacatgctaccaatggtcttgtaagacgcagcaatatacaacttcatagtcttgtttcgactaggaggcattaacacaggaggcttgatcagatattctttaatttcatcaaaagccttttgatgcacttcatcccatttgaatggttcatctttcttgagtcgaagtaatggcgaaaaagtttgagctttgccacttagattcgaaatgaatcgcctcaagaagttgatttttcctagcaaaggctgaagctgttttttggtcgaaggaggcttcgtctcaagaatagcctttgtcttgttttgatttatctcaatgccttttttatgcaccacaaaaccaaggaaatctcctgcacgcacacaaaaagcacactttaatggattcatttttaatccatgtttcctcattcgttcgaaagattgcctaaggtaatccaaatggctatcttctgaggaggatttgatgattatatcatcaatataaacttgcataaatgtgtcaataaaatcatgaaacatggaattcatggccctttgataagtagccccagcatttttcaacccaaagggcataactacccattcataagtgcctaaagcaccagggcatcgaaatgctgtttttgacacatcactttcagcaataaatatttggttataaccagaataaccatctaacatgcttaaaaattcgaagccagctgctgaatctaccaacatttctgctactggcatagcatattcatctttaggtgtagcattatttaaatccctaaaatctatgcatactctaagagttccattttttaatgacagggactatatttgctaaccattcgacatacctggcagatctgatgaatttacacctcagcagcctttcgatttcttccttaatcttggacatgatttctggtgcgaatcttcttgg

SEQ ID NO: 9308 - DNA, 1084 bp, Glycine max
  Gm_smallRNAprecursor_2141
ggccaagttacaggtttcatatgtccaccaaagatcttactcgtcttggagtagactctggtgatgatagttcttgatcttgttgttgtggtggaggtgaaggtggttcacctgggtcttcttcctcagcttcttcttgagatagttgagcgggtataagaacgttcttctccaccttttcttcatcccaattccaagaagcgtactcatcaacttcaacatctcgactgatgacgagtttcttagtttgcaagttgtagacacggtagccgttagagatattgctatacccaaggaagatacctcgtatagtcttgtcttcaagcttgtgcctcttcacgtctgaatatgaatgtagcatatagatccaaaaacccttaggtgctttgctgatggcttcttcccgttccaagcttcaattggagtcttgtcttttacaaacttagttggacatctgttgagtatgtaaacagcagtgtagactgcttcagcccagaatgtgttaggtagtcccttctccttgagcatcgatttagccatctccataactgtgcgattctttctctcggacactccattttgttgaggagaatatgcgactgtaagttgtcactcaatgccttcatcctcacaaaatctttcaaactcgcgagaggtgtactctttgccgcgatcacttcttagtacttttatccgttttccactttgattttcaacaaggtccttgaactttttgaatactccaaagacttatgatttttcttttagaaaatatacccatgtcattctagagaagtcatcaatgaagagtatgaagtacttgttgttctcatgtgatggcgtcctcattggtccacaaacgtccgtatgtatcagctccaatagatctttcgctctccatgctccgcttgttgagaaaggaaatcggtgttgcttaccaaggagacatccttcacacacttcattgttctcctttatgcttagaagatctctcatcatgttcttctcatgtaacaacttcaaggcatgtgtgttgaagtggccaaatcttcgatgccatagccatgaatcatcaacttgtacc

SEQ ID NO: 9309 - DNA, 1146 bp, Glycine max
  Gm_smallRNAprecursor_2142
caaagcgatgaccaaagtgatgacgagggtgttggcgaaccaacgtcacctttgtcacctttgttgcaatatcaccaacctaggtgtccagtggagttgaaccttgaccacctaccacactacattgatcgataccatttcatttagcaataagataatgtataaccactaaccggtgcactcgaggttggcatgatatttgatgaaaaaagcacaatgtattcgaatagtcagagaatacaacatcagaaaatcatttttattacagaaaaatatatcctaaccagagaaggccaaacttcgtgtgtaaatcacatgaaaatggttgtacatggagcttaggcacatccaattcaaagagacataagaaatggattatcaagagtatcaatgtcatcacacttgtctcgcgccaatgctcacacaagatcatcgacaactcgacaaacacgtcagagcacagatcatccaaccaattgtcaaaataaacccaaccgtttccatcaagacgttgattgcagagatcaaaatattcatgaattatactccatcctataaaaagacattgttagcaaagcaaagagggtcagagattattcatgaaaattgggaagaatcatataccaaaccatcaaaacttttgggagctttgcaatcttgtgttctcgggactgtgtgattgttgctcaaacagaatccgtgtttgaggggagagaaatcgtacctgaaaaaatgcttaaatgtgtgttttggtcatttgatctatgcatattgcaaatccataatacaagtagatggtacatatctttactggaagtatactgtcacattattgataattatttattactcctcaaattaacatttttctcatctcaaatcgacacccctcgattataagtgcgtacaacaacccaactaacttatgatgggtttaggacacatctcatttcttttgcctgtgccacatagcacaaagtttccttcgcgataacttatactgtaaacatttgaagaaatcactcatgctggctggtgagaatctattttatttcttctttaaactttactttgaatcaaatttaataacataatagattgattgaatatttataggatacacatacacacggagaagatgcacta

SEQ ID NO: 9310 - DNA, 1098 bp, Glycine max
  Gm_smallRNAprecursor_2143
cttgcgggctcagactaggagactaggagtgcaaaattaacatgcatttttcttaagtggtatgcaatccccataaaataggaaacgggtttgaccattaaacaaggattcctaggttttctggtgatgttgaaaacacttgagcccaattacttattggaaatttgtgaaccactaatgtccaaaacttcaaagtatctatcaactacagaccttcaatctgcaactggtgatcagaagtcatatgaatggctgtgtttcagacataggatggcaagtaaagtataaaatttgtcacaaatgtaaatataaaaaaaggcaaaattacatttttggtccccctagttgttttcaatttcaattttggtccccctttaaaattattgacgaattttgtcctcttattttatccaatcttgatcccccattccaaaattggatgttgactgttacaaaggaatgttgactgtcacatgtcacattcttattggatgatgactgtcacgtgtcatgttctgattggatgtcaactccatggaagatgaaatgcattgttgttgtcattggtcgatcagaacatgacatgtgacaatcatcattcaataagaacgtgacacgtgacagtcaacattcctttgtaacagtgtccaattctggactagggaactaagattgcgtgattggataaaatagggggacaaaattcgtcaataattttaaaggaggaccaaaatcgaaattggagacaaattgggagaccaaatttacaattttgttaatataaaacaatattcaaaaggtagtgttaataagatatcaggatgttaatacaacttgtatgcagaaaaaacatgacaatatttttacctcaatgaaagatttcggatctgggcaattttgacgttttgataatctaagtgtgcactctgcagcagtgcggccatcttgaagtgctatagccttgaagaattcgactaaatattctcgttctctcttagaaagttcagtagtcatgcccacatcaaggaaaatgacatgaggccttgacttcaagagagttgatttgctttttcctactcggacaagaatatttccagg

SEQ ID NO: 9311 - DNA, 1159 bp, Glycine max
  Gm_smallRNAprecursor_2144
acccatttttcagggagagttacttcatcccattttattattctttttaaagaaacattggcttttgtcatatcagtgataaataaggttgtttctcccttttgtggttgtaataggactctagacgcacaagtattcatgaccttgtactggatcctataaattaaagctgctggaattgatgcttctttcatgtcaaggccatgaaagtggatatttaagaacagagagtcaagaatatttctgtccattaaactcactgttttgtttggataacaattaaattatactggacattatcctaaactggtttctactgtttcgattaaggagtcttcaaatttattatgcctaatatctcttagacacattaaaactactgcatctatgcccatgtcaattaagggcttgatggctacttgtacacaactgatgtgtaaatatttatacttacggctgtgttcataaattgaattttttgaaagtaaatgaaattcttcccctatatcttgtcctagaggaatattgttttctactgttttgattatgtaattaaagttgtgtatatctttaattgtttcaggaacatatagttgatcttgagggatttctggaatgttccagtcatccatgttttgattgatatcttcgaatcggacttcctcatcgaagagattgtgtttgggggtgacctcgtgggtctggttttcttgatcatttaatgaatttgtatttcttgaagaggatgatgagaaagaattggatcgaaaagagatacgggaaaaagggcataaaagtctagacatgattataacattctctaatatctttgccttcatctggttccatagaaatatttccgtaagtaaatatgtaacaaaatttcttggacctgaaaatttttaaagaaaagctctttttttttttatcgagagccttattagagaatgttatacttttaaaaaccttattagagaatgttatactttttgtccgtctcgcctattacgttctttctctcgcatttcatttagatctaactcatcctcatcctcttggttgtaaatcaaatgagagaaagaacgtaataggtgagacttgataaacttatcctccaatatcattgtcgtcatttggttctatagaaatattgtcgtaa

SEQ ID NO: 9312 - DNA, 1157 bp, Glycine max
  Gm_smallRNAprecursor_2145
catatgttaacaaattttatggatctgaaactgaagccttgtatagtacaagtactattttactttgatttgtacagtaaatgtttgaacaatacttcctggaagtacagcggtctaatattttagttgaatggtactgtagcagtaagacccgtgatagataaagggcggtaaggctaaggtgtaccgtttaaccaaaatatcaagacataatatactggtggctataggattgccattcaaactattttataaaaaaaaaagagtttttcttaaaaataattcagatccagaaaaattttgtgacatatttacttacagggatatttctatggaaccaagtgagggcaaagatattagagaatattataatcatgtctagactattacgatctttttcccgtatctcttttcactcaaactcctcctcatcatcttcttcaagaaactccaatttattaaatgatcaagataaccagacccaagaggtcgccccaaaacacaatctcttcgatgaggaagtccgattcgaagatatcaatcaaaacatggatgactggaacatttcagaaatccctcaggatcaactatatgttcctgaaacaataaaggacaaacacaactttgattacataatcaaaacagtagaaaacaatattcctctaggacaagatataggggaagaatttcatttactttcaaaaaattcaatttatgaacatagccgtaagtataaatatctacacatcggttgtgtataagtagccatcaagcccttaattgatatgggcataaatgcagcagttttaatgtgtctaagagacattaggcataatcaatttgaagactccctaattggaacagtcgaaaccagcctaggacaaggtccaatatattttaactgttatccaaacaaaacagtgagtctgatggacaggagcattcttgactctctgttcttaaacatccactttcatggccttgacatgaaagaaggatcaatcccaacagccttaatttataggatccagtacaaggtcatgaatacttgtgcatctagagtcctgttaaaacctcaaaaaggagaaacaaccttgtttatcactgatatgacaaaggctaacgtttctctcccgagaaaaataaaatgggatgaa

SEQ ID NO: 9313 - DNA, 1080 bp, Glycine max
  Gm_smallRNAprecursor_2146
tggccctatttgacacagaggctgattcaaactgcattttagaaggattaattcctacaaaattctttgagaaaacctcaaaaaaattaagtatggcaaacggctcaaaattaaaaattaattttaagctatcaaatgcaatcattgaaaaccaaggtcttaagattaacacaaactttcttctggtaaaaaaccttaagaatgaagtaatcttacttaagaatgaagtaatcttaggaacgcccttcattagagccatgtttcccatccaaatatctaatgaaggaataaccacaaattatttaggaagaaaaattatatttaatttttctactaaaccaatttccagaaatataaatcttatagaaaataagattaatcaaattaacttcttaaaagaagaagtatcttttaataatattcagatacaactgggaaaaccccaggtaaaagaaaaaattcaatctttattaaatcatattgaatcgaccgtctgttatgaattgccacatgcattttgggacagaaagaaacatattgttgatctcccttatgagaaagactttagggaaaaacaaattcccaccaaagccagaccaatccaaatgaatgaagaacttcttcaatacagtcaaaaagaaatcaaggatttgcttgataaaggcctaatccggaaaagcaaaagcccatggtcttgtgcggctttttatgtcaacaaacaatctgagattgagcgtggatcaccccgcttagtcataaattacaaaccactaaatcaagcattacaatggattagatatcctattccaaacaaaaaagatttgcttaacagattaaattctgcaaagatattttcaaaatttgatatgaaatctggattttggcaaatccaaatccaagaatcagataggtacaaaacaacgtttattgtacctttcgggcaatatgaatggaatgtgatgccattcggactgaataatgccccttcagaatttcaaaaaattatggatgatatttttaatccctattcaaaaatttgtcattgtctacatagatgatgttttaatcttttcccaaaac

SEQ ID NO: 9314 - DNA, 1108 bp, Glycine max
  Gm_smallRNAprecursor_2147
aagtgtctttgattttaatatagaatatatcaagggctcttccaactctctacctgactacctcacccgtgaatttttacagaaaattcccgatgcctcctaaggtgtctagttcctccggcagaggagggaaatccagtacaaaaggaaaagaggttctattggctctaccagagccaataaccaaaaaagcaactacatcatcttctgggtcacctacccagactgggtcatcaacccagaaaggaaagcttgaagggtcattgacccagataactaccgtcaaacctgagtcatcaactcaagaatccccaaaaccaacaacaaccaaacagaccgtggctgactatgcctggtcaatacaaactctcttggccttagaagatataggcctcaccaaagtaccaaaattggccaaaaagacctgggcagaaatggcctcagaataagatgatgattctaaaacagatctgcaaaaacaaatccaaaaggccaaacagaccaaaactgtctgtaaccaaacaccaagccaatcgttgactcaacaagaatcaacgccacaacccagcaacagttatatttccaaaaacaaatttttcaatgttttacaaatggaaccagaatactgggacaagaatcctttcaaagcaaccgccaaagtattccccccgggattccattacaggccaacagccacaaacaaaacccgcaaattctacgaattcattctaatagatacaaactcagtatctattaaacagttcaaagaccccaaagatctaaatctaaatacccattccagaatccaaatcttaaaggttatgcagccacgacattgtggctcaaaattaaaccaacccaaaaaattttctgcaccatttgaccctgcaagatataattattgggattacattgacgcctggaccaatatgttctggcatcaaaatagtaaattcaagcattcatggctaatttacttcaaaaataacactgtgtataattttccaaattggttcctccaatggtggaactacttcagaccaattccacagatattcccagaagaagtccaacagggattccaacaattcaacaagctctataatag

SEQ ID NO: 9315 - DNA, 1092 bp, Glycine max
  Gm_smallRNAprecursor_2148
tgcctcctaaggtgtctagttcctccggcagaggagggaaatccagtacaaaaggaaaagaggttctattggctctaccagagccaataaccaaaaaagcaactacatcatcttctgggtcacctacccagactgggtcatcaacccagaaaggaaagcttgaagggtcattgacccagataactaccgtcaaacctgagtcatcaactcaagaatccccaaaaccaacaacaaccaaacagaccgtggctgactatgcctggtcaatacaaactctcttggccttagaagatataggcctcaccaaagtaccaaaattggccaaaaagacctgggcagaaatggcctcagaataagatgatgattctaaaacagatctgcaaaaacaaatccaaaaggccaaacagaccaaaactgtctgtaaccaaacaccaagccaatcgttgactcaacaagaatcaacgccacaacccagcaacagttatatttccaaaaacaaatttttcaatgttttacaaatggaaccagaatactgggacaagaatcctttcaaagcaaccgccaaagtattccccccgggattccattacaggccaacagccacaaacaaaacccgcaaattctacgaattcattctaatagatacaaactcagtatctattaaacagttcaaagaccccaaagatctaaatctaaatacccattccagaatccaaatcttaaaggttatgcagccacgacattgtggctcaaaattaaaccaacccaaaaaattttctgcaccatttgaccctgcaagatataattattgggattacattgacgcctggaccaatatgttctggcatcaaaatagtaaattcaagcattcatggctaatttacttcaaaaataacactgtgtataattttccaaattggttcctccaatggtggaactacttcagaccaattccacagatattcccagaagaagtccaacagggattccaacaattcaacaagctctataatagcaaggaatcacgtattccggcagatttaaagtacttttccagttttgccttgtcatggattttttcaaggcaataca

SEQ ID NO: 9316 - DNA, 1194 bp, Glycine max
  Gm_smallRNAprecursor_2149
ctcaagaatccccaaaaccaacaacaaccaaacagaccgtggctgactatgcctggtcaatacaaactctcttggccttagaagatataggcctcaccaaagtaccaaaattggccaaaaagacctgggcagaaatggcctcagaataagatgatgattctaaaacagatctgcaaaaacaaatccaaaaggccaaacagaccaaaactgtctgtaaccaaacaccaagccaatcgttgactcaacaagaatcaacgccacaacccagcaacagttatatttccaaaaacaaatttttcaatgttttacaaatggaaccagaatactgggacaagaatcctttcaaagcaaccgccaaagtattccccccgggattccattacaggccaacagccacaaacaaaacccgcaaattctacgaattcattctaatagatacaaactcagtatctattaaacagttcaaagaccccaaagatctaaatctaaatacccattccagaatccaaatcttaaaggttatgcagccacgacattgtggctcaaaattaaaccaacccaaaaaattttctgcaccatttgaccctgcaagatataattattgggattacattgacgcctggaccaatatgttctggcatcaaaatagtaaattcaagcattcatggctaatttacttcaaaaataacactgtgtataattttccaaattggttcctccaatggtggaactacttcagaccaattccacagatattcccagaagaagtccaacagggattccaacaattcaacaagctctataatagcaaggaatcacgtattccggcagatttaaagtacttttccagttttgccttgtcatggattttttcaaggcaatacagatacggaaaaaccgaaaacagcaaacagtatccaccgttgcagagacacgcctttgtaaaatggtggtcacaattcgatacttcaaaggctgctccagaacaagtcaagaacagattccagagcaatcctgagttcctcaaacctgctaatccggagacatctttgtttttgaatcagaagtcgcaactggcagcattcttagcaagctcaaaatctaaagagagtcttgctcagaatctcaaagaagttctccaactacttcaacaggaagtggaagaagaaccccccaagaaggaagccgaatcat

SEQ ID NO: 9317 - DNA, 1071 bp, Glycine max
  Gm_smallRNAprecursor_2150
caaacagaccaaaactgtctgtaaccaaacaccaagccaatcgttgactcaacaagaatcaacgccacaacccagcaacagttatatttccaaaaacaaatttttcaatgttttacaaatggaaccagaatactgggacaagaatcctttcaaagcaaccgccaaagtattccccccgggattccattacaggccaacagccacaaacaaaacccgcaaattctacgaattcattctaatagatacaaactcagtatctattaaacagttcaaagaccccaaagatctaaatctaaatacccattccagaatccaaatcttaaaggttatgcagccacgacattgtggctcaaaattaaaccaacccaaaaaattttctgcaccatttgaccctgcaagatataattattgggattacattgacgcctggaccaatatgttctggcatcaaaatagtaaattcaagcattcatggctaatttacttcaaaaataacactgtgtataattttccaaattggttcctccaatggtggaactacttcagaccaattccacagatattcccagaagaagtccaacagggattccaacaattcaacaagctctataatagcaaggaatcacgtattccggcagatttaaagtacttttccagttttgccttgtcatggattttttcaaggcaatacagatacggaaaaaccgaaaacagcaaacagtatccaccgttgcagagacacgcctttgtaaaatggtggtcacaattcgatacttcaaaggctgctccagaacaagtcaagaacagattccagagcaatcctgagttcctcaaacctgctaatccggagacatctttgtttttgaatcagaagtcgcaactggcagcattcttagcaagctcaaaatctaaagagagtcttgctcagaatctcaaagaagttctccaactacttcaacaggaagtggaagaagaaccccccaagaaggaagccgaatcatccgagactaatgatgaccaagaagatgatccattctaccagaatgaagatgactgttttggtatatcgtt

SEQ ID NO: 9318 - DNA, 1191 bp, Glycine max
  Gm_smallRNAprecursor_2151
gttatatttccaaaaacaaatttttcaatgttttacaaatggaaccagaatactgggacaagaatcctttcaaagcaaccgccaaagtattccccccgggattccattacaggccaacagccacaaacaaaacccgcaaattctacgaattcattctaatagatacaaactcagtatctattaaacagttcaaagaccccaaagatctaaatctaaatacccattccagaatccaaatcttaaaggttatgcagccacgacattgtggctcaaaattaaaccaacccaaaaaattttctgcaccatttgaccctgcaagatataattattgggattacattgacgcctggaccaatatgttctggcatcaaaatagtaaattcaagcattcatggctaatttacttcaaaaataacactgtgtataattttccaaattggttcctccaatggtggaactacttcagaccaattccacagatattcccagaagaagtccaacagggattccaacaattcaacaagctctataatagcaaggaatcacgtattccggcagatttaaagtacttttccagttttgccttgtcatggattttttcaaggcaatacagatacggaaaaaccgaaaacagcaaacagtatccaccgttgcagagacacgcctttgtaaaatggtggtcacaattcgatacttcaaaggctgctccagaacaagtcaagaacagattccagagcaatcctgagttcctcaaacctgctaatccggagacatctttgtttttgaatcagaagtcgcaactggcagcattcttagcaagctcaaaatctaaagagagtcttgctcagaatctcaaagaagttctccaactacttcaacaggaagtggaagaagaaccccccaagaaggaagccgaatcatccgagactaatgatgaccaagaagatgatccattctaccagaatgaagatgactgttttggtatatcgttagacgacgattaattagttttagtaatcatgaattattgtaactaatttgtcggtacctcttattaatgtaatttgtaaaagttttgtaacagttccggtaaacattaccgacactgtagaaacagtaaaaattgagtctatttaaaggagtcctcgttccctttgtgaggtaccctttcagatagtctcaaaaccaggt

SEQ ID NO: 9319 - DNA, 1066 bp, Glycine max
  Gm_smallRNAprecursor_2152
atttccaaaaacaaatttttcaatgttttacaaatggaaccagaatactgggacaagaatcctttcaaagcaaccgccaaagtattccccccgggattccattacaggccaacagccacaaacaaaacccgcaaattctacgaattcattctaatagatacaaactcagtatctattaaacagttcaaagaccccaaagatctaaatctaaatacccattccagaatccaaatcttaaaggttatgcagccacgacattgtggctcaaaattaaaccaacccaaaaaattttctgcaccatttgaccctgcaagatataattattgggattacattgacgcctggaccaatatgttctggcatcaaaatagtaaattcaagcattcatggctaatttacttcaaaaataacactgtgtataattttccaaattggttcctccaatggtggaactacttcagaccaattccacagatattcccagaagaagtccaacagggattccaacaattcaacaagctctataatagcaaggaatcacgtattccggcagatttaaagtacttttccagttttgccttgtcatggattttttcaaggcaatacagatacggaaaaaccgaaaacagcaaacagtatccaccgttgcagagacacgcctttgtaaaatggtggtcacaattcgatacttcaaaggctgctccagaacaagtcaagaacagattccagagcaatcctgagttcctcaaacctgctaatccggagacatctttgtttttgaatcagaagtcgcaactggcagcattcttagcaagctcaaaatctaaagagagtcttgctcagaatctcaaagaagttctccaactacttcaacaggaagtggaagaagaaccccccaagaaggaagccgaatcatccgagactaatgatgaccaagaagatgatccattctaccagaatgaagatgactgttttggtatatcgttagacgacgattaattagttttagtaatcatgaattattgtaactaatttgtcggtacctcttattaatgtaatttgtaaa

SEQ ID NO: 9320 - DNA, 1067 bp, Glycine max
  Gm_smallRNAprecursor_2153
atttccaaaaacaaatttttcaatgttttacaaatggaaccagaatactgggacaagaatcctttcaaagcaaccgccaaagtattccccccgggattccattacaggccaacagccacaaacaaaacccgcaaattctacgaattcattctaatagatacaaactcagtatctattaaacagttcaaagaccccaaagatctaaatctaaatacccattccagaatccaaatcttaaaggttatgcagccacgacattgtggctcaaaattaaaccaacccaaaaaattttctgcaccatttgaccctgcaagatataattattgggattacattgacgcctggaccaatatgttctggcatcaaaatagtaaattcaagcattcatggctaatttacttcaaaaataacactgtgtataattttccaaattggttcctccaatggtggaactacttcagaccaattccacagatattcccagaagaagtccaacagggattccaacaattcaacaagctctataatagcaaggaatcacgtattccggcagatttaaagtacttttccagttttgccttgtcatggattttttcaaggcaatacagatacggaaaaaccgaaaacagcaaacagtatccaccgttgcagagacacgcctttgtaaaatggtggtcacaattcgatacttcaaaggctgctccagaacaagtcaagaacagattccagagcaatcctgagttcctcaaacctgctaatccggagacatctttgtttttgaatcagaagtcgcaactggcagcattcttagcaagctcaaaatctaaagagagtcttgctcagaatctcaaagaagttctccaactacttcaacaggaagtggaagaagaaccccccaagaaggaagccgaatcatccgagactaatgatgaccaagaagatgatccattctaccagaatgaagatgactgttttggtatatcgttagacgacgattaattagttttagtaatcatgaattattgtaactaatttgtcggtacctcttattaatgtaatttgtaaaa

SEQ ID NO: 9321 - DNA, 1069 bp, Glycine max
  Gm_smallRNAprecursor_2154
atttccaaaaacaaatttttcaatgttttacaaatggaaccagaatactgggacaagaatcctttcaaagcaaccgccaaagtattccccccgggattccattacaggccaacagccacaaacaaaacccgcaaattctacgaattcattctaatagatacaaactcagtatctattaaacagttcaaagaccccaaagatctaaatctaaatacccattccagaatccaaatcttaaaggttatgcagccacgacattgtggctcaaaattaaaccaacccaaaaaattttctgcaccatttgaccctgcaagatataattattgggattacattgacgcctggaccaatatgttctggcatcaaaatagtaaattcaagcattcatggctaatttacttcaaaaataacactgtgtataattttccaaattggttcctccaatggtggaactacttcagaccaattccacagatattcccagaagaagtccaacagggattccaacaattcaacaagctctataatagcaaggaatcacgtattccggcagatttaaagtacttttccagttttgccttgtcatggattttttcaaggcaatacagatacggaaaaaccgaaaacagcaaacagtatccaccgttgcagagacacgcctttgtaaaatggtggtcacaattcgatacttcaaaggctgctccagaacaagtcaagaacagattccagagcaatcctgagttcctcaaacctgctaatccggagacatctttgtttttgaatcagaagtcgcaactggcagcattcttagcaagctcaaaatctaaagagagtcttgctcagaatctcaaagaagttctccaactacttcaacaggaagtggaagaagaaccccccaagaaggaagccgaatcatccgagactaatgatgaccaagaagatgatccattctaccagaatgaagatgactgttttggtatatcgttagacgacgattaattagttttagtaatcatgaattattgtaactaatttgtcggtacctcttattaatgtaatttgtaaaagt

SEQ ID NO: 9322 - DNA, 1219 bp, Glycine max
  Gm_smallRNAprecursor_2155
atttccaaaaacaaatttttcaatgttttacaaatggaaccagaatactgggacaagaatcctttcaaagcaaccgccaaagtattccccccgggattccattacaggccaacagccacaaacaaaacccgcaaattctacgaattcattctaatagatacaaactcagtatctattaaacagttcaaagaccccaaagatctaaatctaaatacccattccagaatccaaatcttaaaggttatgcagccacgacattgtggctcaaaattaaaccaacccaaaaaattttctgcaccatttgaccctgcaagatataattattgggattacattgacgcctggaccaatatgttctggcatcaaaatagtaaattcaagcattcatggctaatttacttcaaaaataacactgtgtataattttccaaattggttcctccaatggtggaactacttcagaccaattccacagatattcccagaagaagtccaacagggattccaacaattcaacaagctctataatagcaaggaatcacgtattccggcagatttaaagtacttttccagttttgccttgtcatggattttttcaaggcaatacagatacggaaaaaccgaaaacagcaaacagtatccaccgttgcagagacacgcctttgtaaaatggtggtcacaattcgatacttcaaaggctgctccagaacaagtcaagaacagattccagagcaatcctgagttcctcaaacctgctaatccggagacatctttgtttttgaatcagaagtcgcaactggcagcattcttagcaagctcaaaatctaaagagagtcttgctcagaatctcaaagaagttctccaactacttcaacaggaagtggaagaagaaccccccaagaaggaagccgaatcatccgagactaatgatgaccaagaagatgatccattctaccagaatgaagatgactgttttggtatatcgttagacgacgattaattagttttagtaatcatgaattattgtaactaatttgtcggtacctcttattaatgtaatttgtaaaagttttgtaacagttccggtaaacattaccgacactgtagaaacagtaaaaattgagtctatttaaaggagtcctcgttccctttgtgaggtaccctttcagatagtctcaaaaccaggttttagagagagaagctctgcctaggaaaaactc

SEQ ID NO: 9323 - DNA, 1049 bp, Glycine max
  Gm_smallRNAprecursor_2156
caatgttttacaaatggaaccagaatactgggacaagaatcctttcaaagcaaccgccaaagtattccccccgggattccattacaggccaacagccacaaacaaaacccgcaaattctacgaattcattctaatagatacaaactcagtatctattaaacagttcaaagaccccaaagatctaaatctaaatacccattccagaatccaaatcttaaaggttatgcagccacgacattgtggctcaaaattaaaccaacccaaaaaattttctgcaccatttgaccctgcaagatataattattgggattacattgacgcctggaccaatatgttctggcatcaaaatagtaaattcaagcattcatggctaatttacttcaaaaataacactgtgtataattttccaaattggttcctccaatggtggaactacttcagaccaattccacagatattcccagaagaagtccaacagggattccaacaattcaacaagctctataatagcaaggaatcacgtattccggcagatttaaagtacttttccagttttgccttgtcatggattttttcaaggcaatacagatacggaaaaaccgaaaacagcaaacagtatccaccgttgcagagacacgcctttgtaaaatggtggtcacaattcgatacttcaaaggctgctccagaacaagtcaagaacagattccagagcaatcctgagttcctcaaacctgctaatccggagacatctttgtttttgaatcagaagtcgcaactggcagcattcttagcaagctcaaaatctaaagagagtcttgctcagaatctcaaagaagttctccaactacttcaacaggaagtggaagaagaaccccccaagaaggaagccgaatcatccgagactaatgatgaccaagaagatgatccattctaccagaatgaagatgactgttttggtatatcgttagacgacgattaattagttttagtaatcatgaattattgtaactaatttgtcggtacctcttattaatgtaatttgtaaaagt

SEQ ID NO: 9324 - DNA, 1131 bp, Glycine max
  Gm_smallRNAprecursor_2157
caatgttttacaaatggaaccagaatactgggacaagaatcctttcaaagcaaccgccaaagtattccccccgggattccattacaggccaacagccacaaacaaaacccgcaaattctacgaattcattctaatagatacaaactcagtatctattaaacagttcaaagaccccaaagatctaaatctaaatacccattccagaatccaaatcttaaaggttatgcagccacgacattgtggctcaaaattaaaccaacccaaaaaattttctgcaccatttgaccctgcaagatataattattgggattacattgacgcctggaccaatatgttctggcatcaaaatagtaaattcaagcattcatggctaatttacttcaaaaataacactgtgtataattttccaaattggttcctccaatggtggaactacttcagaccaattccacagatattcccagaagaagtccaacagggattccaacaattcaacaagctctataatagcaaggaatcacgtattccggcagatttaaagtacttttccagttttgccttgtcatggattttttcaaggcaatacagatacggaaaaaccgaaaacagcaaacagtatccaccgttgcagagacacgcctttgtaaaatggtggtcacaattcgatacttcaaaggctgctccagaacaagtcaagaacagattccagagcaatcctgagttcctcaaacctgctaatccggagacatctttgtttttgaatcagaagtcgcaactggcagcattcttagcaagctcaaaatctaaagagagtcttgctcagaatctcaaagaagttctccaactacttcaacaggaagtggaagaagaaccccccaagaaggaagccgaatcatccgagactaatgatgaccaagaagatgatccattctaccagaatgaagatgactgttttggtatatcgttagacgacgattaattagttttagtaatcatgaattattgtaactaatttgtcggtacctcttattaatgtaatttgtaaaagttttgtaacagttccggtaaacattaccgacactgtagaaacagtaaaaattgagtctatttaaaggagtcctcgttcccttt

SEQ ID NO: 9325 - DNA, 1131 bp, Glycine max; identical to SEQ ID NO: 9324
  Gm_smallRNAprecursor_2158

SEQ ID NO: 9326 - DNA, 1077 bp, Glycine max
  Gm_smallRNAprecursor_2159
caaagcaaccgccaaagtattccccccgggattccattacaggccaacagccacaaacaaaacccgcaaattctacgaattcattctaatagatacaaactcagtatctattaaacagttcaaagaccccaaagatctaaatctaaatacccattccagaatccaaatcttaaaggttatgcagccacgacattgtggctcaaaattaaaccaacccaaaaaattttctgcaccatttgaccctgcaagatataattattgggattacattgacgcctggaccaatatgttctggcatcaaaatagtaaattcaagcattcatggctaatttacttcaaaaataacactgtgtataattttccaaattggttcctccaatggtggaactacttcagaccaattccacagatattcccagaagaagtccaacagggattccaacaattcaacaagctctataatagcaaggaatcacgtattccggcagatttaaagtacttttccagttttgccttgtcatggattttttcaaggcaatacagatacggaaaaaccgaaaacagcaaacagtatccaccgttgcagagacacgcctttgtaaaatggtggtcacaattcgatacttcaaaggctgctccagaacaagtcaagaacagattccagagcaatcctgagttcctcaaacctgctaatccggagacatctttgtttttgaatcagaagtcgcaactggcagcattcttagcaagctcaaaatctaaagagagtcttgctcagaatctcaaagaagttctccaactacttcaacaggaagtggaagaagaaccccccaagaaggaagccgaatcatccgagactaatgatgaccaagaagatgatccattctaccagaatgaagatgactgttttggtatatcgttagacgacgattaattagttttagtaatcatgaattattgtaactaatttgtcggtacctcttattaatgtaatttgtaaaagttttgtaacagttccggtaaacattaccgacactgtagaaacagtaaaaattgagtctatttaaaggagtcctc

SEQ ID NO: 9327 - DNA, 1086 bp, Glycine max
  Gm_smallRNAprecursor_2160
caaagcaaccgccaaagtattccccccgggattccattacaggccaacagccacaaacaaaacccgcaaattctacgaattcattctaatagatacaaactcagtatctattaaacagttcaaagaccccaaagatctaaatctaaatacccattccagaatccaaatcttaaaggttatgcagccacgacattgtggctcaaaattaaaccaacccaaaaaattttctgcaccatttgaccctgcaagatataattattgggattacattgacgcctggaccaatatgttctggcatcaaaatagtaaattcaagcattcatggctaatttacttcaaaaataacactgtgtataattttccaaattggttcctccaatggtggaactacttcagaccaattccacagatattcccagaagaagtccaacagggattccaacaattcaacaagctctataatagcaaggaatcacgtattccggcagatttaaagtacttttccagttttgccttgtcatggattttttcaaggcaatacagatacggaaaaaccgaaaacagcaaacagtatccaccgttgcagagacacgcctttgtaaaatggtggtcacaattcgatacttcaaaggctgctccagaacaagtcaagaacagattccagagcaatcctgagttcctcaaacctgctaatccggagacatctttgtttttgaatcagaagtcgcaactggcagcattcttagcaagctcaaaatctaaagagagtcttgctcagaatctcaaagaagttctccaactacttcaacaggaagtggaagaagaaccccccaagaaggaagccgaatcatccgagactaatgatgaccaagaagatgatccattctaccagaatgaagatgactgttttggtatatcgttagacgacgattaattagttttagtaatcatgaattattgtaactaatttgtcggtacctcttattaatgtaatttgtaaaagttttgtaacagttccggtaaacattaccgacactgtagaaacagtaaaaattgagtctatttaaaggagtcctcgttcccttt

SEQ ID NO: 9328 - DNA, 1086 bp, Glycine max; identical to SEQ ID NO: 9327
  Gm_smallRNAprecursor_2161

SEQ ID NO: 9329 - DNA, 1076 bp, Glycine max
  Gm_smallRNAprecursor_2162
aaagcaaccgccaaagtattccccccgggattccattacaggccaacagccacaaacaaaacccgcaaattctacgaattcattctaatagatacaaactcagtatctattaaacagttcaaagaccccaaagatctaaatctaaatacccattccagaatccaaatcttaaaggttatgcagccacgacattgtggctcaaaattaaaccaacccaaaaaattttctgcaccatttgaccctgcaagatataattattgggattacattgacgcctggaccaatatgttctggcatcaaaatagtaaattcaagcattcatggctaatttacttcaaaaataacactgtgtataattttccaaattggttcctccaatggtggaactacttcagaccaattccacagatattcccagaagaagtccaacagggattccaacaattcaacaagctctataatagcaaggaatcacgtattccggcagatttaaagtacttttccagttttgccttgtcatggattttttcaaggcaatacagatacggaaaaaccgaaaacagcaaacagtatccaccgttgcagagacacgcctttgtaaaatggtggtcacaattcgatacttcaaaggctgctccagaacaagtcaagaacagattccagagcaatcctgagttcctcaaacctgctaatccggagacatctttgtttttgaatcagaagtcgcaactggcagcattcttagcaagctcaaaatctaaagagagtcttgctcagaatctcaaagaagttctccaactacttcaacaggaagtggaagaagaaccccccaagaaggaagccgaatcatccgagactaatgatgaccaagaagatgatccattctaccagaatgaagatgactgttttggtatatcgttagacgacgattaattagttttagtaatcatgaattattgtaactaatttgtcggtacctcttattaatgtaatttgtaaaagttttgtaacagttccggtaaacattaccgacactgtagaaacagtaaaaattgagtctatttaaaggagtcctc

SEQ ID NO: 9330 - DNA, 1085 bp, Glycine max
  Gm_smallRNAprecursor_2163
aaagcaaccgccaaagtattccccccgggattccattacaggccaacagccacaaacaaaacccgcaaattctacgaattcattctaatagatacaaactcagtatctattaaacagttcaaagaccccaaagatctaaatctaaatacccattccagaatccaaatcttaaaggttatgcagccacgacattgtggctcaaaattaaaccaacccaaaaaattttctgcaccatttgaccctgcaagatataattattgggattacattgacgcctggaccaatatgttctggcatcaaaatagtaaattcaagcattcatggctaatttacttcaaaaataacactgtgtataattttccaaattggttcctccaatggtggaactacttcagaccaattccacagatattcccagaagaagtccaacagggattccaacaattcaacaagctctataatagcaaggaatcacgtattccggcagatttaaagtacttttccagttttgccttgtcatggattttttcaaggcaatacagatacggaaaaaccgaaaacagcaaacagtatccaccgttgcagagacacgcctttgtaaaatggtggtcacaattcgatacttcaaaggctgctccagaacaagtcaagaacagattccagagcaatcctgagttcctcaaacctgctaatccggagacatctttgtttttgaatcagaagtcgcaactggcagcattcttagcaagctcaaaatctaaagagagtcttgctcagaatctcaaagaagttctccaactacttcaacaggaagtggaagaagaaccccccaagaaggaagccgaatcatccgagactaatgatgaccaagaagatgatccattctaccagaatgaagatgactgttttggtatatcgttagacgacgattaattagttttagtaatcatgaattattgtaactaatttgtcggtacctcttattaatgtaatttgtaaaagttttgtaacagttccggtaaacattaccgacactgtagaaacagtaaaaattgagtctatttaaaggagtcctcgttcccttt

SEQ ID NO: 9331 - DNA, 1085 bp, Glycine max; identical to SEQ ID NO: 9330
  Gm_smallRNAprecursor_2164

SEQ ID NO: 9332 - DNA, 1050 bp, Glycine max
  Gm_smallRNAprecursor_2165
gggattccattacaggccaacagccacaaacaaaacccgcaaattctacgaattcattctaatagatacaaactcagtatctattaaacagttcaaagaccccaaagatctaaatctaaatacccattccagaatccaaatcttaaaggttatgcagccacgacattgtggctcaaaattaaaccaacccaaaaaattttctgcaccatttgaccctgcaagatataattattgggattacattgacgcctggaccaatatgttctggcatcaaaatagtaaattcaagcattcatggctaatttacttcaaaaataacactgtgtataattttccaaattggttcctccaatggtggaactacttcagaccaattccacagatattcccagaagaagtccaacagggattccaacaattcaacaagctctataatagcaaggaatcacgtattccggcagatttaaagtacttttccagttttgccttgtcatggattttttcaaggcaatacagatacggaaaaaccgaaaacagcaaacagtatccaccgttgcagagacacgcctttgtaaaatggtggtcacaattcgatacttcaaaggctgctccagaacaagtcaagaacagattccagagcaatcctgagttcctcaaacctgctaatccggagacatctttgtttttgaatcagaagtcgcaactggcagcattcttagcaagctcaaaatctaaagagagtcttgctcagaatctcaaagaagttctccaactacttcaacaggaagtggaagaagaaccccccaagaaggaagccgaatcatccgagactaatgatgaccaagaagatgatccattctaccagaatgaagatgactgttttggtatatcgttagacgacgattaattagttttagtaatcatgaattattgtaactaatttgtcggtacctcttattaatgtaatttgtaaaagttttgtaacagttccggtaaacattaccgacactgtagaaacagtaaaaattgagtctatttaaaggagtcctc

SEQ ID NO: 9333 - DNA, 1050 bp, Glycine max; identical to SEQ ID NO: 9332
  Gm_smallRNAprecursor_2166

SEQ ID NO: 9334 - DNA, 1053 bp, Glycine max
  Gm_smallRNAprecursor_2167
acgaattcattctaatagatacaaactcagtatctattaaacagttcaaagaccccaaagatctaaatctaaatacccattccagaatccaaatcttaaaggttatgcagccacgacattgtggctcaaaattaaaccaacccaaaaaattttctgcaccatttgaccctgcaagatataattattgggattacattgacgcctggaccaatatgttctggcatcaaaatagtaaattcaagcattcatggctaatttacttcaaaaataacactgtgtataattttccaaattggttcctccaatggtggaactacttcagaccaattccacagatattcccagaagaagtccaacagggattccaacaattcaacaagctctataatagcaaggaatcacgtattccggcagatttaaagtacttttccagttttgccttgtcatggattttttcaaggcaatacagatacggaaaaaccgaaaacagcaaacagtatccaccgttgcagagacacgcctttgtaaaatggtggtcacaattcgatacttcaaaggctgctccagaacaagtcaagaacagattccagagcaatcctgagttcctcaaacctgctaatccggagacatctttgtttttgaatcagaagtcgcaactggcagcattcttagcaagctcaaaatctaaagagagtcttgctcagaatctcaaagaagttctccaactacttcaacaggaagtggaagaagaaccccccaagaaggaagccgaatcatccgagactaatgatgaccaagaagatgatccattctaccagaatgaagatgactgttttggtatatcgttagacgacgattaattagttttagtaatcatgaattattgtaactaatttgtcggtacctcttattaatgtaatttgtaaaagttttgtaacagttccggtaaacattaccgacactgtagaaacagtaaaaattgagtctatttaaaggagtcctcgttccctttgtgaggtaccctttcagatagtctcaaaaccaggttttaga

SEQ ID NO: 9335 - DNA, 1054 bp, Glycine max
  Gm_smallRNAprecursor_2168
acgaattcattctaatagatacaaactcagtatctattaaacagttcaaagaccccaaagatctaaatctaaatacccattccagaatccaaatcttaaaggttatgcagccacgacattgtggctcaaaattaaaccaacccaaaaaattttctgcaccatttgaccctgcaagatataattattgggattacattgacgcctggaccaatatgttctggcatcaaaatagtaaattcaagcattcatggctaatttacttcaaaaataacactgtgtataattttccaaattggttcctccaatggtggaactacttcagaccaattccacagatattcccagaagaagtccaacagggattccaacaattcaacaagctctataatagcaaggaatcacgtattccggcagatttaaagtacttttccagttttgccttgtcatggattttttcaaggcaatacagatacggaaaaaccgaaaacagcaaacagtatccaccgttgcagagacacgcctttgtaaaatggtggtcacaattcgatacttcaaaggctgctccagaacaagtcaagaacagattccagagcaatcctgagttcctcaaacctgctaatccggagacatctttgtttttgaatcagaagtcgcaactggcagcattcttagcaagctcaaaatctaaagagagtcttgctcagaatctcaaagaagttctccaactacttcaacaggaagtggaagaagaaccccccaagaaggaagccgaatcatccgagactaatgatgaccaagaagatgatccattctaccagaatgaagatgactgttttggtatatcgttagacgacgattaattagttttagtaatcatgaattattgtaactaatttgtcggtacctcttattaatgtaatttgtaaaagttttgtaacagttccggtaaacattaccgacactgtagaaacagtaaaaattgagtctatttaaaggagtcctcgttccctttgtgaggtaccctttcagatagtctcaaaaccaggttttagag

SEQ ID NO: 9336 - DNA, 1045 bp, Glycine max
  Gm_smallRNAprecursor_2169
gaattcattctaatagatacaaactcagtatctattaaacagttcaaagaccccaaagatctaaatctaaatacccattccagaatccaaatcttaaaggttatgcagccacgacattgtggctcaaaattaaaccaacccaaaaaattttctgcaccatttgaccctgcaagatataattattgggattacattgacgcctggaccaatatgttctggcatcaaaatagtaaattcaagcattcatggctaatttacttcaaaaataacactgtgtataattttccaaattggttcctccaatggtggaactacttcagaccaattccacagatattcccagaagaagtccaacagggattccaacaattcaacaagctctataatagcaaggaatcacgtattccggcagatttaaagtacttttccagttttgccttgtcatggattttttcaaggcaatacagatacggaaaaaccgaaaacagcaaacagtatccaccgttgcagagacacgcctttgtaaaatggtggtcacaattcgatacttcaaaggctgctccagaacaagtcaagaacagattccagagcaatcctgagttcctcaaacctgctaatccggagacatctttgtttttgaatcagaagtcgcaactggcagcattcttagcaagctcaaaatctaaagagagtcttgctcagaatctcaaagaagttctccaactacttcaacaggaagtggaagaagaaccccccaagaaggaagccgaatcatccgagactaatgatgaccaagaagatgatccattctaccagaatgaagatgactgttttggtatatcgttagacgacgattaattagttttagtaatcatgaattattgtaactaatttgtcggtacctcttattaatgtaatttgtaaaagttttgtaacagttccggtaaacattaccgacactgtagaaacagtaaaaattgagtctatttaaaggagtcctcgttccctttgtgaggtaccctttcagatagtctcaaaaccaggt

SEQ ID NO: 9337 - DNA, 1051 bp, Glycine max
  Gm_smallRNAprecursor_2170
gaattcattctaatagatacaaactcagtatctattaaacagttcaaagaccccaaagatctaaatctaaatacccattccagaatccaaatcttaaaggttatgcagccacgacattgtggctcaaaattaaaccaacccaaaaaattttctgcaccatttgaccctgcaagatataattattgggattacattgacgcctggaccaatatgttctggcatcaaaatagtaaattcaagcattcatggctaatttacttcaaaaataacactgtgtataattttccaaattggttcctccaatggtggaactacttcagaccaattccacagatattcccagaagaagtccaacagggattccaacaattcaacaagctctataatagcaaggaatcacgtattccggcagatttaaagtacttttccagttttgccttgtcatggattttttcaaggcaatacagatacggaaaaaccgaaaacagcaaacagtatccaccgttgcagagacacgcctttgtaaaatggtggtcacaattcgatacttcaaaggctgctccagaacaagtcaagaacagattccagagcaatcctgagttcctcaaacctgctaatccggagacatctttgtttttgaatcagaagtcgcaactggcagcattcttagcaagctcaaaatctaaagagagtcttgctcagaatctcaaagaagttctccaactacttcaacaggaagtggaagaagaaccccccaagaaggaagccgaatcatccgagactaatgatgaccaagaagatgatccattctaccagaatgaagatgactgttttggtatatcgttagacgacgattaattagttttagtaatcatgaattattgtaactaatttgtcggtacctcttattaatgtaatttgtaaaagttttgtaacagttccggtaaacattaccgacactgtagaaacagtaaaaattgagtctatttaaaggagtcctcgttccctttgtgaggtaccctttcagatagtctcaaaaccaggttttaga

SEQ ID NO: 9338 - DNA, 1204 bp, Glycine max
  Gm_smallRNAprecursor_2171
gaattcattctaatagatacaaactcagtatctattaaacagttcaaagaccccaaagatctaaatctaaatacccattccagaatccaaatcttaaaggttatgcagccacgacattgtggctcaaaattaaaccaacccaaaaaattttctgcaccatttgaccctgcaagatataattattgggattacattgacgcctggaccaatatgttctggcatcaaaatagtaaattcaagcattcatggctaatttacttcaaaaataacactgtgtataattttccaaattggttcctccaatggtggaactacttcagaccaattccacagatattcccagaagaagtccaacagggattccaacaattcaacaagctctataatagcaaggaatcacgtattccggcagatttaaagtacttttccagttttgccttgtcatggattttttcaaggcaatacagatacggaaaaaccgaaaacagcaaacagtatccaccgttgcagagacacgcctttgtaaaatggtggtcacaattcgatacttcaaaggctgctccagaacaagtcaagaacagattccagagcaatcctgagttcctcaaacctgctaatccggagacatctttgtttttgaatcagaagtcgcaactggcagcattcttagcaagctcaaaatctaaagagagtcttgctcagaatctcaaagaagttctccaactacttcaacaggaagtggaagaagaaccccccaagaaggaagccgaatcatccgagactaatgatgaccaagaagatgatccattctaccagaatgaagatgactgttttggtatatcgttagacgacgattaattagttttagtaatcatgaattattgtaactaatttgtcggtacctcttattaatgtaatttgtaaaagttttgtaacagttccggtaaacattaccgacactgtagaaacagtaaaaattgagtctatttaaaggagtcctcgttccctttgtgaggtaccctttcagatagtctcaaaaccaggttttagagagagaagctctgcctaggaaaaactctttgtaagcttctatgcccatatcaattaagggcttgatggctacttgtacacaaccgatgtgtagatatttatacttacggctatgttcataaattgaattttttgaaagtaaatgaaattcttc

SEQ ID NO: 9339 - DNA, 1165 bp, Glycine max
  Gm_smallRNAprecursor_2172
ctaatagatacaaactcagtatctattaaacagttcaaagaccccaaagatctaaatctaaatacccattccagaatccaaatcttaaaggttatgcagccacgacattgtggctcaaaattaaaccaacccaaaaaattttctgcaccatttgaccctgcaagatataattattgggattacattgacgcctggaccaatatgttctggcatcaaaatagtaaattcaagcattcatggctaatttacttcaaaaataacactgtgtataattttccaaattggttcctccaatggtggaactacttcagaccaattccacagatattcccagaagaagtccaacagggattccaacaattcaacaagctctataatagcaaggaatcacgtattccggcagatttaaagtacttttccagttttgccttgtcatggattttttcaaggcaatacagatacggaaaaaccgaaaacagcaaacagtatccaccgttgcagagacacgcctttgtaaaatggtggtcacaattcgatacttcaaaggctgctccagaacaagtcaagaacagattccagagcaatcctgagttcctcaaacctgctaatccggagacatctttgtttttgaatcagaagtcgcaactggcagcattcttagcaagctcaaaatctaaagagagtcttgctcagaatctcaaagaagttctccaactacttcaacaggaagtggaagaagaaccccccaagaaggaagccgaatcatccgagactaatgatgaccaagaagatgatccattctaccagaatgaagatgactgttttggtatatcgttagacgacgattaattagttttagtaatcatgaattattgtaactaatttgtcggtacctcttattaatgtaatttgtaaaagttttgtaacagttccggtaaacattaccgacactgtagaaacagtaaaaattgagtctatttaaaggagtcctcgttccctttgtgaggtaccctttcagatagtctcaaaaccaggttttagagagagaagctctgcctaggaaaaactctttgtaagcttctatgcccatatcaattaagggcttgatggctacttgtacacaaccgatgtgtagatatttatacttacggctatgttcataaat

SEQ ID NO: 9340 - DNA, 1157 bp, Glycine max
  Gm_smallRNAprecursor_2173
gatctaaatctaaatacccattccagaatccaaatcttaaaggttatgcagccacgacattgtggctcaaaattaaaccaacccaaaaaattttctgcaccatttgaccctgcaagatataattattgggattacattgacgcctggaccaatatgttctggcatcaaaatagtaaattcaagcattcatggctaatttacttcaaaaataacactgtgtataattttccaaattggttcctccaatggtggaactacttcagaccaattccacagatattcccagaagaagtccaacagggattccaacaattcaacaagctctataatagcaaggaatcacgtattccggcagatttaaagtacttttccagttttgccttgtcatggattttttcaaggcaatacagatacggaaaaaccgaaaacagcaaacagtatccaccgttgcagagacacgcctttgtaaaatggtggtcacaattcgatacttcaaaggctgctccagaacaagtcaagaacagattccagagcaatcctgagttcctcaaacctgctaatccggagacatctttgtttttgaatcagaagtcgcaactggcagcattcttagcaagctcaaaatctaaagagagtcttgctcagaatctcaaagaagttctccaactacttcaacaggaagtggaagaagaaccccccaagaaggaagccgaatcatccgagactaatgatgaccaagaagatgatccattctaccagaatgaagatgactgttttggtatatcgttagacgacgattaattagttttagtaatcatgaattattgtaactaatttgtcggtacctcttattaatgtaatttgtaaaagttttgtaacagttccggtaaacattaccgacactgtagaaacagtaaaaattgagtctatttaaaggagtcctcgttccctttgtgaggtaccctttcagatagtctcaaaaccaggttttagagagagaagctctgcctaggaaaaactctttgtaagcttctatgcccatatcaattaagggcttgatggctacttgtacacaaccgatgtgtagatatttatacttacggctatgttcataaattgaattttttgaaagtaaatgaaattcttcccctatatct

SEQ ID NO: 9341 - DNA, 1041 bp, Glycine max
  Gm_smallRNAprecursor_2174
tgcaccatttgaccctgcaagatataattattgggattacattgacgcctggaccaatatgttctggcatcaaaatagtaaattcaagcattcatggctaatttacttcaaaaataacactgtgtataattttccaaattggttcctccaatggtggaactacttcagaccaattccacagatattcccagaagaagtccaacagggattccaacaattcaacaagctctataatagcaaggaatcacgtattccggcagatttaaagtacttttccagttttgccttgtcatggattttttcaaggcaatacagatacggaaaaaccgaaaacagcaaacagtatccaccgttgcagagacacgcctttgtaaaatggtggtcacaattcgatacttcaaaggctgctccagaacaagtcaagaacagattccagagcaatcctgagttcctcaaacctgctaatccggagacatctttgtttttgaatcagaagtcgcaactggcagcattcttagcaagctcaaaatctaaagagagtcttgctcagaatctcaaagaagttctccaactacttcaacaggaagtggaagaagaaccccccaagaaggaagccgaatcatccgagactaatgatgaccaagaagatgatccattctaccagaatgaagatgactgttttggtatatcgttagacgacgattaattagttttagtaatcatgaattattgtaactaatttgtcggtacctcttattaatgtaatttgtaaaagttttgtaacagttccggtaaacattaccgacactgtagaaacagtaaaaattgagtctatttaaaggagtcctcgttccctttgtgaggtaccctttcagatagtctcaaaaccaggttttagagagagaagctctgcctaggaaaaactctttgtaagcttctatgcccatatcaattaagggcttgatggctacttgtacacaaccgatgtgtagatatttatacttacggctatgttcataaattgaattttttgaaagtaaa

SEQ ID NO: 9342 - DNA, 1183 bp, Glycine max
  Gm_smallRNAprecursor_2175
atataattattgggattacattgacgcctggaccaatatgttctggcatcaaaatagtaaattcaagcattcatggctaatttacttcaaaaataacactgtgtataattttccaaattggttcctccaatggtggaactacttcagaccaattccacagatattcccagaagaagtccaacagggattccaacaattcaacaagctctataatagcaaggaatcacgtattccggcagatttaaagtacttttccagttttgccttgtcatggattttttcaaggcaatacagatacggaaaaaccgaaaacagcaaacagtatccaccgttgcagagacacgcctttgtaaaatggtggtcacaattcgatacttcaaaggctgctccagaacaagtcaagaacagattccagagcaatcctgagttcctcaaacctgctaatccggagacatctttgtttttgaatcagaagtcgcaactggcagcattcttagcaagctcaaaatctaaagagagtcttgctcagaatctcaaagaagttctccaactacttcaacaggaagtggaagaagaaccccccaagaaggaagccgaatcatccgagactaatgatgaccaagaagatgatccattctaccagaatgaagatgactgttttggtatatcgttagacgacgattaattagttttagtaatcatgaattattgtaactaatttgtcggtacctcttattaatgtaatttgtaaaagttttgtaacagttccggtaaacattaccgacactgtagaaacagtaaaaattgagtctatttaaaggagtcctcgttccctttgtgaggtaccctttcagatagtctcaaaaccaggttttagagagagaagctctgcctaggaaaaactctttgtaagcttctatgcccatatcaattaagggcttgatggctacttgtacacaaccgatgtgtagatatttatacttacggctatgttcataaattgaattttttgaaagtaaatgaaattcttcccctatatcttgtcctagtggaatattgtttactactgttttgattatgtaatcaaagttgtatttgtcctttattgtttcaggaacgtatagttgatcctgagggatttctggaatgttccagtcatccatgttttgattgatatcttcga

SEQ ID NO: 9343 - DNA, 1153 bp, Glycine max
  Gm_smallRNAprecursor_2176
gaccaatatgttctggcatcaaaatagtaaattcaagcattcatggctaatttacttcaaaaataacactgtgtataattttccaaattggttcctccaatggtggaactacttcagaccaattccacagatattcccagaagaagtccaacagggattccaacaattcaacaagctctataatagcaaggaatcacgtattccggcagatttaaagtacttttccagttttgccttgtcatggattttttcaaggcaatacagatacggaaaaaccgaaaacagcaaacagtatccaccgttgcagagacacgcctttgtaaaatggtggtcacaattcgatacttcaaaggctgctccagaacaagtcaagaacagattccagagcaatcctgagttcctcaaacctgctaatccggagacatctttgtttttgaatcagaagtcgcaactggcagcattcttagcaagctcaaaatctaaagagagtcttgctcagaatctcaaagaagttctccaactacttcaacaggaagtggaagaagaaccccccaagaaggaagccgaatcatccgagactaatgatgaccaagaagatgatccattctaccagaatgaagatgactgttttggtatatcgttagacgacgattaattagttttagtaatcatgaattattgtaactaatttgtcggtacctcttattaatgtaatttgtaaaagttttgtaacagttccggtaaacattaccgacactgtagaaacagtaaaaattgagtctatttaaaggagtcctcgttccctttgtgaggtaccctttcagatagtctcaaaaccaggttttagagagagaagctctgcctaggaaaaactctttgtaagcttctatgcccatatcaattaagggcttgatggctacttgtacacaaccgatgtgtagatatttatacttacggctatgttcataaattgaattttttgaaagtaaatgaaattcttcccctatatcttgtcctagtggaatattgtttactactgttttgattatgtaatcaaagttgtatttgtcctttattgtttcaggaacgtatagttgatcctgagggatttctggaatgttccagtcatccatgttttgattgatatcttcga

SEQ ID NO: 9344 - DNA, 1172 bp, Glycine max
  Gm_smallRNAprecursor_2177
gaccaatatgttctggcatcaaaatagtaaattcaagcattcatggctaatttacttcaaaaataacactgtgtataattttccaaattggttcctccaatggtggaactacttcagaccaattccacagatattcccagaagaagtccaacagggattccaacaattcaacaagctctataatagcaaggaatcacgtattccggcagatttaaagtacttttccagttttgccttgtcatggattttttcaaggcaatacagatacggaaaaaccgaaaacagcaaacagtatccaccgttgcagagacacgcctttgtaaaatggtggtcacaattcgatacttcaaaggctgctccagaacaagtcaagaacagattccagagcaatcctgagttcctcaaacctgctaatccggagacatctttgtttttgaatcagaagtcgcaactggcagcattcttagcaagctcaaaatctaaagagagtcttgctcagaatctcaaagaagttctccaactacttcaacaggaagtggaagaagaaccccccaagaaggaagccgaatcatccgagactaatgatgaccaagaagatgatccattctaccagaatgaagatgactgttttggtatatcgttagacgacgattaattagttttagtaatcatgaattattgtaactaatttgtcggtacctcttattaatgtaatttgtaaaagttttgtaacagttccggtaaacattaccgacactgtagaaacagtaaaaattgagtctatttaaaggagtcctcgttccctttgtgaggtaccctttcagatagtctcaaaaccaggttttagagagagaagctctgcctaggaaaaactctttgtaagcttctatgcccatatcaattaagggcttgatggctacttgtacacaaccgatgtgtagatatttatacttacggctatgttcataaattgaattttttgaaagtaaatgaaattcttcccctatatcttgtcctagtggaatattgtttactactgttttgattatgtaatcaaagttgtatttgtcctttattgtttcaggaacgtatagttgatcctgagggatttctggaatgttccagtcatccatgttttgattgatatcttcgaatcggacttcctcatcgaa

SEQ ID NO: 9345 - DNA, 1106 bp, Glycine max
  Gm_smallRNAprecursor_2178
cactgtgtataattttccaaattggttcctccaatggtggaactacttcagaccaattccacagatattcccagaagaagtccaacagggattccaacaattcaacaagctctataatagcaaggaatcacgtattccggcagatttaaagtacttttccagttttgccttgtcatggattttttcaaggcaatacagatacggaaaaaccgaaaacagcaaacagtatccaccgttgcagagacacgcctttgtaaaatggtggtcacaattcgatacttcaaaggctgctccagaacaagtcaagaacagattccagagcaatcctgagttcctcaaacctgctaatccggagacatctttgtttttgaatcagaagtcgcaactggcagcattcttagcaagctcaaaatctaaagagagtcttgctcagaatctcaaagaagttctccaactacttcaacaggaagtggaagaagaaccccccaagaaggaagccgaatcatccgagactaatgatgaccaagaagatgatccattctaccagaatgaagatgactgttttggtatatcgttagacgacgattaattagttttagtaatcatgaattattgtaactaatttgtcggtacctcttattaatgtaatttgtaaaagttttgtaacagttccggtaaacattaccgacactgtagaaacagtaaaaattgagtctatttaaaggagtcctcgttccctttgtgaggtaccctttcagatagtctcaaaaccaggttttagagagagaagctctgcctaggaaaaactctttgtaagcttctatgcccatatcaattaagggcttgatggctacttgtacacaaccgatgtgtagatatttatacttacggctatgttcataaattgaattttttgaaagtaaatgaaattcttcccctatatcttgtcctagtggaatattgtttactactgttttgattatgtaatcaaagttgtatttgtcctttattgtttcaggaacgtatagttgatcctgagggatttctggaatgttccagtcatccatgttttgattgatatcttcgaatcggacttcctcatcgaa

SEQ ID NO: 9346 - DNA, 1053 bp, Glycine max
  Gm_smallRNAprecursor_2179
ttggttcctccaatggtggaactacttcagaccaattccacagatattcccagaagaagtccaacagggattccaacaattcaacaagctctataatagcaaggaatcacgtattccggcagatttaaagtacttttccagttttgccttgtcatggattttttcaaggcaatacagatacggaaaaaccgaaaacagcaaacagtatccaccgttgcagagacacgcctttgtaaaatggtggtcacaattcgatacttcaaaggctgctccagaacaagtcaagaacagattccagagcaatcctgagttcctcaaacctgctaatccggagacatctttgtttttgaatcagaagtcgcaactggcagcattcttagcaagctcaaaatctaaagagagtcttgctcagaatctcaaagaagttctccaactacttcaacaggaagtggaagaagaaccccccaagaaggaagccgaatcatccgagactaatgatgaccaagaagatgatccattctaccagaatgaagatgactgttttggtatatcgttagacgacgattaattagttttagtaatcatgaattattgtaactaatttgtcggtacctcttattaatgtaatttgtaaaagttttgtaacagttccggtaaacattaccgacactgtagaaacagtaaaaattgagtctatttaaaggagtcctcgttccctttgtgaggtaccctttcagatagtctcaaaaccaggttttagagagagaagctctgcctaggaaaaactctttgtaagcttctatgcccatatcaattaagggcttgatggctacttgtacacaaccgatgtgtagatatttatacttacggctatgttcataaattgaattttttgaaagtaaatgaaattcttcccctatatcttgtcctagtggaatattgtttactactgttttgattatgtaatcaaagttgtatttgtcctttattgtttcaggaacgtatagttgatcctgagggatttctggaatgttccagtcatccatgttttga

SEQ ID NO: 9347 - DNA, 1123 bp, Glycine max
  Gm_smallRNAprecursor_2180
gaagaagtccaacagggattccaacaattcaacaagctctataatagcaaggaatcacgtattccggcagatttaaagtacttttccagttttgccttgtcatggattttttcaaggcaatacagatacggaaaaaccgaaaacagcaaacagtatccaccgttgcagagacacgcctttgtaaaatggtggtcacaattcgatacttcaaaggctgctccagaacaagtcaagaacagattccagagcaatcctgagttcctcaaacctgctaatccggagacatctttgtttttgaatcagaagtcgcaactggcagcattcttagcaagctcaaaatctaaagagagtcttgctcagaatctcaaagaagttctccaactacttcaacaggaagtggaagaagaaccccccaagaaggaagccgaatcatccgagactaatgatgaccaagaagatgatccattctaccagaatgaagatgactgttttggtatatcgttagacgacgattaattagttttagtaatcatgaattattgtaactaatttgtcggtacctcttattaatgtaatttgtaaaagttttgtaacagttccggtaaacattaccgacactgtagaaacagtaaaaattgagtctatttaaaggagtcctcgttccctttgtgaggtaccctttcagatagtctcaaaaccaggttttagagagagaagctctgcctaggaaaaactctttgtaagcttctatgcccatatcaattaagggcttgatggctacttgtacacaaccgatgtgtagatatttatacttacggctatgttcataaattgaattttttgaaagtaaatgaaattcttcccctatatcttgtcctagtggaatattgtttactactgttttgattatgtaatcaaagttgtatttgtcctttattgtttcaggaacgtatagttgatcctgagggatttctggaatgttccagtcatccatgttttgattgatatcttcgaatcggacttcctcatcgaagagattttgttttgcggcgacctcttgggtctggttatcttgatcatttaataaattggagtttcttgaagaagatgaggaggaggagtt

SEQ ID NO: 9348 - DNA, 1196 bp, Glycine max
  Gm_smallRNAprecursor_2181
cagatacggaaaaaccgaaaacagcaaacagtatccaccgttgcagagacacgcctttgtaaaatggtggtcacaattcgatacttcaaaggctgctccagaacaagtcaagaacagattccagagcaatcctgagttcctcaaacctgctaatccggagacatctttgtttttgaatcagaagtcgcaactggcagcattcttagcaagctcaaaatctaaagagagtcttgctcagaatctcaaagaagttctccaactacttcaacaggaagtggaagaagaaccccccaagaaggaagccgaatcatccgagactaatgatgaccaagaagatgatccattctaccagaatgaagatgactgttttggtatatcgttagacgacgattaattagttttagtaatcatgaattattgtaactaatttgtcggtacctcttattaatgtaatttgtaaaagttttgtaacagttccggtaaacattaccgacactgtagaaacagtaaaaattgagtctatttaaaggagtcctcgttccctttgtgaggtaccctttcagatagtctcaaaaccaggttttagagagagaagctctgcctaggaaaaactctttgtaagcttctatgcccatatcaattaagggcttgatggctacttgtacacaaccgatgtgtagatatttatacttacggctatgttcataaattgaattttttgaaagtaaatgaaattcttcccctatatcttgtcctagtggaatattgtttactactgttttgattatgtaatcaaagttgtatttgtcctttattgtttcaggaacgtatagttgatcctgagggatttctggaatgttccagtcatccatgttttgattgatatcttcgaatcggacttcctcatcgaagagattttgttttgcggcgacctcttgggtctggttatcttgatcatttaataaattggagtttcttgaagaagatgaggaggaggagtttgagcgaaaagagatacgggaaaaagatcgtaatagtctagacatgattataatattctctaatatcttttccctcatttggttccatagaaatatccccgtaagtaaatatgtcacaaaatttttctggatctgaattatttttaagaaaaactcttttttttttataaaatagtttgaacggcaatcctatag

SEQ ID NO: 9349 - DNA, 1197 bp, Glycine max
  Gm_smallRNAprecursor_2182
taccagaatgaagatgactgttttggtatatcgttagacgacgattaattagttttagtaatcatgaattattgtaactaatttgtcggtacctcttattaatgtaatttgtaaaagttttgtaacagttccggtaaacattaccgacactgtagaaacagtaaaaattgagtctatttaaaggagtcctcgttccctttgtgaggtaccctttcagatagtctcaaaaccaggttttagagagagaagctctgcctaggaaaaactctttgtaagcttctatgcccatatcaattaagggcttgatggctacttgtacacaaccgatgtgtagatatttatacttacggctatgttcataaattgaattttttgaaagtaaatgaaattcttcccctatatcttgtcctagtggaatattgtttactactgttttgattatgtaatcaaagttgtatttgtcctttattgtttcaggaacgtatagttgatcctgagggatttctggaatgttccagtcatccatgttttgattgatatcttcgaatcggacttcctcatcgaagagattttgttttgcggcgacctcttgggtctggttatcttgatcatttaataaattggagtttcttgaagaagatgaggaggaggagtttgagcgaaaagagatacgggaaaaagatcgtaatagtctagacatgattataatattctctaatatcttttccctcatttggttccatagaaatatccccgtaagtaaatatgtcacaaaatttttctggatctgaattatttttaagaaaaactcttttttttttataaaatagtttgaacggcaatcctatagccaccagtatattatgtcttgatattttggttaaacagtacaccttagccttactaccctttatccatcacgggtcttactgctacagtaccatttaactaaaatattatatagctgtatttccaggaagtactgttcaaacatctactatacagatcaaaataaaatattactcgtattgtacaaggtttcagatcaataaaatttgtttacatatgtccttacggaccatattcctacttccccatcaggctctgataccagagatatgcccttgatacggtactgtaggaatatggtattgtaactaatatataggccttagaagatataggcctcaccaaagt

SEQ ID NO: 9350 - DNA, 1054 bp, Glycine max
  Gm_smallRNAprecursor_2183
tttttgaaagtaaatgaaattcttcccctatatcttgtcctagtggaatattgtttactactgttttgattatgtaatcaaagttgtatttgtcctttattgtttcaggaacgtatagttgatcctgagggatttctggaatgttccagtcatccatgttttgattgatatcttcgaatcggacttcctcatcgaagagattttgttttgcggcgacctcttgggtctggttatcttgatcatttaataaattggagtttcttgaagaagatgaggaggaggagtttgagcgaaaagagatacgggaaaaagatcgtaatagtctagacatgattataatattctctaatatcttttccctcatttggttccatagaaatatccccgtaagtaaatatgtcacaaaatttttctggatctgaattatttttaagaaaaactcttttttttttataaaatagtttgaacggcaatcctatagccaccagtatattatgtcttgatattttggttaaacagtacaccttagccttactaccctttatccatcacgggtcttactgctacagtaccatttaactaaaatattatatagctgtatttccaggaagtactgttcaaacatctactatacagatcaaaataaaatattactcgtattgtacaaggtttcagatcaataaaatttgtttacatatgtccttacggaccatattcctacttccccatcaggctctgataccagagatatgcccttgatacggtactgtaggaatatggtattgtaactaatatataggccttagaagatataggcctcaccaaagtaccaaaattggccaaaaagacctgggcagaaatggcctcagaataagatgatgattctaaaacagatctgcaaaaacaaatccaaaaggccaaacagaccaaaactgtctgtaaccaaacaccaagccaatcgttgactcaacaagaatcaacgccacaacccagcaacagttatatttccaaaaacaaatttttcaatgttttacaaatggaaccagaatactgg

SEQ ID NO: 9351 - DNA, 1130 bp, Glycine max
  Gm_smallRNAprecursor_2184
tttttgaaagtaaatgaaattcttcccctatatcttgtcctagtggaatattgtttactactgttttgattatgtaatcaaagttgtatttgtcctttattgtttcaggaacgtatagttgatcctgagggatttctggaatgttccagtcatccatgttttgattgatatcttcgaatcggacttcctcatcgaagagattttgttttgcggcgacctcttgggtctggttatcttgatcatttaataaattggagtttcttgaagaagatgaggaggaggagtttgagcgaaaagagatacgggaaaaagatcgtaatagtctagacatgattataatattctctaatatcttttccctcatttggttccatagaaatatccccgtaagtaaatatgtcacaaaatttttctggatctgaattatttttaagaaaaactcttttttttttataaaatagtttgaacggcaatcctatagccaccagtatattatgtcttgatattttggttaaacagtacaccttagccttactaccctttatccatcacgggtcttactgctacagtaccatttaactaaaatattatatagctgtatttccaggaagtactgttcaaacatctactatacagatcaaaataaaatattactcgtattgtacaaggtttcagatcaataaaatttgtttacatatgtccttacggaccatattcctacttccccatcaggctctgataccagagatatgcccttgatacggtactgtaggaatatggtattgtaactaatatataggccttagaagatataggcctcaccaaagtaccaaaattggccaaaaagacctgggcagaaatggcctcagaataagatgatgattctaaaacagatctgcaaaaacaaatccaaaaggccaaacagaccaaaactgtctgtaaccaaacaccaagccaatcgttgactcaacaagaatcaacgccacaacccagcaacagttatatttccaaaaacaaatttttcaatgttttacaaatggaaccagaatactgggacaagaatcctttcaaagcaaccgccaaagtattccccccgggattccattacaggccaacagccacaaacaaaa

SEQ ID NO: 9352 - DNA, 1108 bp, Glycine max
  Gm_smallRNAprecursor_2185
ttcccctatatcttgtcctagtggaatattgtttactactgttttgattatgtaatcaaagttgtatttgtcctttattgtttcaggaacgtatagttgatcctgagggatttctggaatgttccagtcatccatgttttgattgatatcttcgaatcggacttcctcatcgaagagattttgttttgcggcgacctcttgggtctggttatcttgatcatttaataaattggagtttcttgaagaagatgaggaggaggagtttgagcgaaaagagatacgggaaaaagatcgtaatagtctagacatgattataatattctctaatatcttttccctcatttggttccatagaaatatccccgtaagtaaatatgtcacaaaatttttctggatctgaattatttttaagaaaaactcttttttttttataaaatagtttgaacggcaatcctatagccaccagtatattatgtcttgatattttggttaaacagtacaccttagccttactaccctttatccatcacgggtcttactgctacagtaccatttaactaaaatattatatagctgtatttccaggaagtactgttcaaacatctactatacagatcaaaataaaatattactcgtattgtacaaggtttcagatcaataaaatttgtttacatatgtccttacggaccatattcctacttccccatcaggctctgataccagagatatgcccttgatacggtactgtaggaatatggtattgtaactaatatataggccttagaagatataggcctcaccaaagtaccaaaattggccaaaaagacctgggcagaaatggcctcagaataagatgatgattctaaaacagatctgcaaaaacaaatccaaaaggccaaacagaccaaaactgtctgtaaccaaacaccaagccaatcgttgactcaacaagaatcaacgccacaacccagcaacagttatatttccaaaaacaaatttttcaatgttttacaaatggaaccagaatactgggacaagaatcctttcaaagcaaccgccaaagtattccccccgggattccattacaggccaacagccacaaacaaaa

SEQ ID NO: 9353 - DNA, 1186 bp, Glycine max
  Gm_smallRNAprecursor_2186
ttatgtaatcaaagttgtatttgtcctttattgtttcaggaacgtatagttgatcctgagggatttctggaatgttccagtcatccatgttttgattgatatcttcgaatcggacttcctcatcgaagagattttgttttgcggcgacctcttgggtctggttatcttgatcatttaataaattggagtttcttgaagaagatgaggaggaggagtttgagcgaaaagagatacgggaaaaagatcgtaatagtctagacatgattataatattctctaatatcttttccctcatttggttccatagaaatatccccgtaagtaaatatgtcacaaaatttttctggatctgaattatttttaagaaaaactcttttttttttataaaatagtttgaacggcaatcctatagccaccagtatattatgtcttgatattttggttaaacagtacaccttagccttactaccctttatccatcacgggtcttactgctacagtaccatttaactaaaatattatatagctgtatttccaggaagtactgttcaaacatctactatacagatcaaaataaaatattactcgtattgtacaaggtttcagatcaataaaatttgtttacatatgtccttacggaccatattcctacttccccatcaggctctgataccagagatatgcccttgatacggtactgtaggaatatggtattgtaactaatatataggccttagaagatataggcctcaccaaagtaccaaaattggccaaaaagacctgggcagaaatggcctcagaataagatgatgattctaaaacagatctgcaaaaacaaatccaaaaggccaaacagaccaaaactgtctgtaaccaaacaccaagccaatcgttgactcaacaagaatcaacgccacaacccagcaacagttatatttccaaaaacaaatttttcaatgttttacaaatggaaccagaatactgggacaagaatcctttcaaagcaaccgccaaagtattccccccgggattccattacaggccaacagccacaaacaaaacccgcaaattctacgaattcattctaatagatacaaactcagtatctattaaacagttcaaagaccccaaagatctaaatctaaatacccattccagaatccaaatcttaaaggttatgcagcca

SEQ ID NO: 9354 - DNA, 1141 bp, Glycine max
  Gm_smallRNAprecursor_2187
ttgtcctttattgtttcaggaacgtatagttgatcctgagggatttctggaatgttccagtcatccatgttttgattgatatcttcgaatcggacttcctcatcgaagagattttgttttgcggcgacctcttgggtctggttatcttgatcatttaataaattggagtttcttgaagaagatgaggaggaggagtttgagcgaaaagagatacgggaaaaagatcgtaatagtctagacatgattataatattctctaatatcttttccctcatttggttccatagaaatatccccgtaagtaaatatgtcacaaaatttttctggatctgaattatttttaagaaaaactcttttttttttataaaatagtttgaacggcaatcctatagccaccagtatattatgtcttgatattttggttaaacagtacaccttagccttactaccctttatccatcacgggtcttactgctacagtaccatttaactaaaatattatatagctgtatttccaggaagtactgttcaaacatctactatacagatcaaaataaaatattactcgtattgtacaaggtttcagatcaataaaatttgtttacatatgtccttacggaccatattcctacttccccatcaggctctgataccagagatatgcccttgatacggtactgtaggaatatggtattgtaactaatatataggccttagaagatataggcctcaccaaagtaccaaaattggccaaaaagacctgggcagaaatggcctcagaataagatgatgattctaaaacagatctgcaaaaacaaatccaaaaggccaaacagaccaaaactgtctgtaaccaaacaccaagccaatcgttgactcaacaagaatcaacgccacaacccagcaacagttatatttccaaaaacaaatttttcaatgttttacaaatggaaccagaatactgggacaagaatcctttcaaagcaaccgccaaagtattccccccgggattccattacaggccaacagccacaaacaaaacccgcaaattctacgaattcattctaatagatacaaactcagtatctattaaacagttcaaagaccccaaagatctaaatctaaatacccattccagaat

SEQ ID NO: 9355 - DNA, 1173 bp, Glycine max
  Gm_smallRNAprecursor_2188
atagttgatcctgagggatttctggaatgttccagtcatccatgttttgattgatatcttcgaatcggacttcctcatcgaagagattttgttttgcggcgacctcttgggtctggttatcttgatcatttaataaattggagtttcttgaagaagatgaggaggaggagtttgagcgaaaagagatacgggaaaaagatcgtaatagtctagacatgattataatattctctaatatcttttccctcatttggttccatagaaatatccccgtaagtaaatatgtcacaaaatttttctggatctgaattatttttaagaaaaactcttttttttttataaaatagtttgaacggcaatcctatagccaccagtatattatgtcttgatattttggttaaacagtacaccttagccttactaccctttatccatcacgggtcttactgctacagtaccatttaactaaaatattatatagctgtatttccaggaagtactgttcaaacatctactatacagatcaaaataaaatattactcgtattgtacaaggtttcagatcaataaaatttgtttacatatgtccttacggaccatattcctacttccccatcaggctctgataccagagatatgcccttgatacggtactgtaggaatatggtattgtaactaatatataggccttagaagatataggcctcaccaaagtaccaaaattggccaaaaagacctgggcagaaatggcctcagaataagatgatgattctaaaacagatctgcaaaaacaaatccaaaaggccaaacagaccaaaactgtctgtaaccaaacaccaagccaatcgttgactcaacaagaatcaacgccacaacccagcaacagttatatttccaaaaacaaatttttcaatgttttacaaatggaaccagaatactgggacaagaatcctttcaaagcaaccgccaaagtattccccccgggattccattacaggccaacagccacaaacaaaacccgcaaattctacgaattcattctaatagatacaaactcagtatctattaaacagttcaaagaccccaaagatctaaatctaaatacccattccagaatccaaatcttaaaggttatgcagccacgacattgtggctcaaaattaaaccaacccaa

SEQ ID NO: 9356 - DNA, 1143 bp, Glycine max
  Gm_smallRNAprecursor_2189
ggatttctggaatgttccagtcatccatgttttgattgatatcttcgaatcggacttcctcatcgaagagattttgttttgcggcgacctcttgggtctggttatcttgatcatttaataaattggagtttcttgaagaagatgaggaggaggagtttgagcgaaaagagatacgggaaaaagatcgtaatagtctagacatgattataatattctctaatatcttttccctcatttggttccatagaaatatccccgtaagtaaatatgtcacaaaatttttctggatctgaattatttttaagaaaaactcttttttttttataaaatagtttgaacggcaatcctatagccaccagtatattatgtcttgatattttggttaaacagtacaccttagccttactaccctttatccatcacgggtcttactgctacagtaccatttaactaaaatattatatagctgtatttccaggaagtactgttcaaacatctactatacagatcaaaataaaatattactcgtattgtacaaggtttcagatcaataaaatttgtttacatatgtccttacggaccatattcctacttccccatcaggctctgataccagagatatgcccttgatacggtactgtaggaatatggtattgtaactaatatataggccttagaagatataggcctcaccaaagtaccaaaattggccaaaaagacctgggcagaaatggcctcagaataagatgatgattctaaaacagatctgcaaaaacaaatccaaaaggccaaacagaccaaaactgtctgtaaccaaacaccaagccaatcgttgactcaacaagaatcaacgccacaacccagcaacagttatatttccaaaaacaaatttttcaatgttttacaaatggaaccagaatactgggacaagaatcctttcaaagcaaccgccaaagtattccccccgggattccattacaggccaacagccacaaacaaaacccgcaaattctacgaattcattctaatagatacaaactcagtatctattaaacagttcaaagaccccaaagatctaaatctaaatacccattccagaatccaaatcttaaaggttatgcagccacgacattgtggctcaaa

SEQ ID NO: 9357 - DNA, 1044 bp, Glycine max
  Gm_smallRNAprecursor_2190
ggcgacctcttgggtctggttatcttgatcatttaataaattggagtttcttgaagaagatgaggaggaggagtttgagcgaaaagagatacgggaaaaagatcgtaatagtctagacatgattataatattctctaatatcttttccctcatttggttccatagaaatatccccgtaagtaaatatgtcacaaaatttttctggatctgaattatttttaagaaaaactcttttttttttataaaatagtttgaacggcaatcctatagccaccagtatattatgtcttgatattttggttaaacagtacaccttagccttactaccctttatccatcacgggtcttactgctacagtaccatttaactaaaatattatatagctgtatttccaggaagtactgttcaaacatctactatacagatcaaaataaaatattactcgtattgtacaaggtttcagatcaataaaatttgtttacatatgtccttacggaccatattcctacttccccatcaggctctgataccagagatatgcccttgatacggtactgtaggaatatggtattgtaactaatatataggccttagaagatataggcctcaccaaagtaccaaaattggccaaaaagacctgggcagaaatggcctcagaataagatgatgattctaaaacagatctgcaaaaacaaatccaaaaggccaaacagaccaaaactgtctgtaaccaaacaccaagccaatcgttgactcaacaagaatcaacgccacaacccagcaacagttatatttccaaaaacaaatttttcaatgttttacaaatggaaccagaatactgggacaagaatcctttcaaagcaaccgccaaagtattccccccgggattccattacaggccaacagccacaaacaaaacccgcaaattctacgaattcattctaatagatacaaactcagtatctattaaacagttcaaagaccccaaagatctaaatctaaatacccattccagaatccaaatcttaaaggttatgcagcca

SEQ ID NO: 9358 - DNA, 1101 bp, Glycine max
  Gm_smallRNAprecursor_2191
gagtttcttgaagaagatgaggaggaggagtttgagcgaaaagagatacgggaaaaagatcgtaatagtctagacatgattataatattctctaatatcttttccctcatttggttccatagaaatatccccgtaagtaaatatgtcacaaaatttttctggatctgaattatttttaagaaaaactcttttttttttataaaatagtttgaacggcaatcctatagccaccagtatattatgtcttgatattttggttaaacagtacaccttagccttactaccctttatccatcacgggtcttactgctacagtaccatttaactaaaatattatatagctgtatttccaggaagtactgttcaaacatctactatacagatcaaaataaaatattactcgtattgtacaaggtttcagatcaataaaatttgtttacatatgtccttacggaccatattcctacttccccatcaggctctgataccagagatatgcccttgatacggtactgtaggaatatggtattgtaactaatatataggccttagaagatataggcctcaccaaagtaccaaaattggccaaaaagacctgggcagaaatggcctcagaataagatgatgattctaaaacagatctgcaaaaacaaatccaaaaggccaaacagaccaaaactgtctgtaaccaaacaccaagccaatcgttgactcaacaagaatcaacgccacaacccagcaacagttatatttccaaaaacaaatttttcaatgttttacaaatggaaccagaatactgggacaagaatcctttcaaagcaaccgccaaagtattccccccgggattccattacaggccaacagccacaaacaaaacccgcaaattctacgaattcattctaatagatacaaactcagtatctattaaacagttcaaagaccccaaagatctaaatctaaatacccattccagaatccaaatcttaaaggttatgcagccacgacattgtggctcaaaattaaaccaacccaaaaaattttctgcaccatttgaccctgcaagatataattattgggattacattgacgcctggaccaata

SEQ ID NO: 9359 - DNA, 1126 bp, Glycine max
  Gm_smallRNAprecursor_2192
gagtttcttgaagaagatgaggaggaggagtttgagcgaaaagagatacgggaaaaagatcgtaatagtctagacatgattataatattctctaatatcttttccctcatttggttccatagaaatatccccgtaagtaaatatgtcacaaaatttttctggatctgaattatttttaagaaaaactcttttttttttataaaatagtttgaacggcaatcctatagccaccagtatattatgtcttgatattttggttaaacagtacaccttagccttactaccctttatccatcacgggtcttactgctacagtaccatttaactaaaatattatatagctgtatttccaggaagtactgttcaaacatctactatacagatcaaaataaaatattactcgtattgtacaaggtttcagatcaataaaatttgtttacatatgtccttacggaccatattcctacttccccatcaggctctgataccagagatatgcccttgatacggtactgtaggaatatggtattgtaactaatatataggccttagaagatataggcctcaccaaagtaccaaaattggccaaaaagacctgggcagaaatggcctcagaataagatgatgattctaaaacagatctgcaaaaacaaatccaaaaggccaaacagaccaaaactgtctgtaaccaaacaccaagccaatcgttgactcaacaagaatcaacgccacaacccagcaacagttatatttccaaaaacaaatttttcaatgttttacaaatggaaccagaatactgggacaagaatcctttcaaagcaaccgccaaagtattccccccgggattccattacaggccaacagccacaaacaaaacccgcaaattctacgaattcattctaatagatacaaactcagtatctattaaacagttcaaagaccccaaagatctaaatctaaatacccattccagaatccaaatcttaaaggttatgcagccacgacattgtggctcaaaattaaaccaacccaaaaaattttctgcaccatttgaccctgcaagatataattattgggattacattgacgcctggaccaatatgttctggcatcaaaatagtaaatt

SEQ ID NO: 9360 - DNA, 1108 bp, Glycine max
  Gm_smallRNAprecursor_2193
atttttaagaaaaactcttttttttttataaaatagtttgaacggcaatcctatagccaccagtatattatgtcttgatattttggttaaacagtacaccttagccttactaccctttatccatcacgggtcttactgctacagtaccatttaactaaaatattatatagctgtatttccaggaagtactgttcaaacatctactatacagatcaaaataaaatattactcgtattgtacaaggtttcagatcaataaaatttgtttacatatgtccttacggaccatattcctacttccccatcaggctctgataccagagatatgcccttgatacggtactgtaggaatatggtattgtaactaatatataggccttagaagatataggcctcaccaaagtaccaaaattggccaaaaagacctgggcagaaatggcctcagaataagatgatgattctaaaacagatctgcaaaaacaaatccaaaaggccaaacagaccaaaactgtctgtaaccaaacaccaagccaatcgttgactcaacaagaatcaacgccacaacccagcaacagttatatttccaaaaacaaatttttcaatgttttacaaatggaaccagaatactgggacaagaatcctttcaaagcaaccgccaaagtattccccccgggattccattacaggccaacagccacaaacaaaacccgcaaattctacgaattcattctaatagatacaaactcagtatctattaaacagttcaaagaccccaaagatctaaatctaaatacccattccagaatccaaatcttaaaggttatgcagccacgacattgtggctcaaaattaaaccaacccaaaaaattttctgcaccatttgaccctgcaagatataattattgggattacattgacgcctggaccaatatgttctggcatcaaaatagtaaattcaagcattcatggctaatttacttcaaaaataacactgtgtataattttccaaattggttcctccaatggtggaactacttcagaccaattccacagatattcccagaagaagtccaacagggattccaacaattcaacaagctctataatag

SEQ ID NO: 9361 - DNA, 1092 bp, Glycine max
  Gm_smallRNAprecursor_2194
gtacaccttagccttactaccctttatccatcacgggtcttactgctacagtaccatttaactaaaatattatatagctgtatttccaggaagtactgttcaaacatctactatacagatcaaaataaaatattactcgtattgtacaaggtttcagatcaataaaatttgtttacatatgtccttacggaccatattcctacttccccatcaggctctgataccagagatatgcccttgatacggtactgtaggaatatggtattgtaactaatatataggccttagaagatataggcctcaccaaagtaccaaaattggccaaaaagacctgggcagaaatggcctcagaataagatgatgattctaaaacagatctgcaaaaacaaatccaaaaggccaaacagaccaaaactgtctgtaaccaaacaccaagccaatcgttgactcaacaagaatcaacgccacaacccagcaacagttatatttccaaaaacaaatttttcaatgttttacaaatggaaccagaatactgggacaagaatcctttcaaagcaaccgccaaagtattccccccgggattccattacaggccaacagccacaaacaaaacccgcaaattctacgaattcattctaatagatacaaactcagtatctattaaacagttcaaagaccccaaagatctaaatctaaatacccattccagaatccaaatcttaaaggttatgcagccacgacattgtggctcaaaattaaaccaacccaaaaaattttctgcaccatttgaccctgcaagatataattattgggattacattgacgcctggaccaatatgttctggcatcaaaatagtaaattcaagcattcatggctaatttacttcaaaaataacactgtgtataattttccaaattggttcctccaatggtggaactacttcagaccaattccacagatattcccagaagaagtccaacagggattccaacaattcaacaagctctataatagcaaggaatcacgtattccggcagatttaaagtacttttccagttttgccttgtcatggattttttcaaggcaataca

SEQ ID NO: 9362 - DNA, 1194 bp, Glycine max
  Gm_smallRNAprecursor_2195
ccatcaggctctgataccagagatatgcccttgatacggtactgtaggaatatggtattgtaactaatatataggccttagaagatataggcctcaccaaagtaccaaaattggccaaaaagacctgggcagaaatggcctcagaataagatgatgattctaaaacagatctgcaaaaacaaatccaaaaggccaaacagaccaaaactgtctgtaaccaaacaccaagccaatcgttgactcaacaagaatcaacgccacaacccagcaacagttatatttccaaaaacaaatttttcaatgttttacaaatggaaccagaatactgggacaagaatcctttcaaagcaaccgccaaagtattccccccgggattccattacaggccaacagccacaaacaaaacccgcaaattctacgaattcattctaatagatacaaactcagtatctattaaacagttcaaagaccccaaagatctaaatctaaatacccattccagaatccaaatcttaaaggttatgcagccacgacattgtggctcaaaattaaaccaacccaaaaaattttctgcaccatttgaccctgcaagatataattattgggattacattgacgcctggaccaatatgttctggcatcaaaatagtaaattcaagcattcatggctaatttacttcaaaaataacactgtgtataattttccaaattggttcctccaatggtggaactacttcagaccaattccacagatattcccagaagaagtccaacagggattccaacaattcaacaagctctataatagcaaggaatcacgtattccggcagatttaaagtacttttccagttttgccttgtcatggattttttcaaggcaatacagatacggaaaaaccgaaaacagcaaacagtatccaccgttgcagagacacgcctttgtaaaatggtggtcacaattcgatacttcaaaggctgctccagaacaagtcaagaacagattccagagcaatcctgagttcctcaaacctgctaatccggagacatctttgtttttgaatcagaagtcgcaactggcagcattcttagcaagctcaaaatctaaagagagtcttgctcagaatctcaaagaagttctccaactacttcaacaggaagtggaagaagaaccccccaagaaggaagccgaatcat

SEQ ID NO: 9363 - DNA, 1071 bp, Glycine max; identical to SEQ ID NO: 9317
  Gm_smallRNAprecursor_2196

SEQ ID NO: 9364 - DNA, 1191 bp, Glycine max; identical to SEQ ID NO: 9318
  Gm_smallRNAprecursor_2197

SEQ ID NO: 9365 - DNA, 1066 bp, Glycine max; identical to SEQ ID NO: 9319
  Gm_smallRNAprecursor_2198

SEQ ID NO: 9366 - DNA, 1067 bp, Glycine max; identical to SEQ ID NO: 9320
  Gm_smallRNAprecursor_2199

SEQ ID NO: 9367 - DNA, 1069 bp, Glycine max; identical to SEQ ID NO: 9321
  Gm_smallRNAprecursor_2200

SEQ ID NO: 9368 - DNA, 1219 bp, Glycine max; identical to SEQ ID NO: 9322
  Gm_smallRNAprecursor_2201

SEQ ID NO: 9369 - DNA, 1049 bp, Glycine max; identical to SEQ ID NO: 9323
  Gm_smallRNAprecursor_2202

SEQ ID NO: 9370 - DNA, 1131 bp, Glycine max; identical to SEQ ID NO: 9324
  Gm_smallRNAprecursor_2203

SEQ ID NO: 9371 - DNA, 1131 bp, Glycine max; identical to SEQ ID NO: 9324
  Gm_smallRNAprecursor_2204

SEQ ID NO: 9372 - DNA, 1077 bp, Glycine max; identical to SEQ ID NO: 9326
  Gm_smallRNAprecursor_2205

SEQ ID NO: 9373 - DNA, 1086 bp, Glycine max; identical to SEQ ID NO: 9327
  Gm_smallRNAprecursor_2206

SEQ ID NO: 9374 - DNA, 1086 bp, Glycine max; identical to SEQ ID NO: 9327
  Gm_smallRNAprecursor_2207

SEQ ID NO: 9375 - DNA, 1076 bp, Glycine max; identical to SEQ ID NO: 9329
  Gm_smallRNAprecursor_2208

SEQ ID NO: 9376 - DNA, 1085 bp, Glycine max; identical to SEQ ID NO: 9330
  Gm_smallRNAprecursor_2209

SEQ ID NO: 9377 - DNA, 1085 bp, Glycine max; identical to SEQ ID NO: 9330
  Gm_smallRNAprecursor_2210

SEQ ID NO: 9378 - DNA, 1050 bp, Glycine max; identical to SEQ ID NO: 9332
  Gm_smallRNAprecursor_2211

SEQ ID NO: 9379 - DNA, 1050 bp, Glycine max; identical to SEQ ID NO: 9332
  Gm_smallRNAprecursor_2212

SEQ ID NO: 9380 - DNA, 1053 bp, Glycine max; identical to SEQ ID NO: 9334
  Gm_smallRNAprecursor_2213

SEQ ID NO: 9381 - DNA, 1054 bp, Glycine max; identical to SEQ ID NO: 9335
  Gm_smallRNAprecursor_2214

SEQ ID NO: 9382 - DNA, 1045 bp, Glycine max; identical to SEQ ID NO: 9336
  Gm_smallRNAprecursor_2215

SEQ ID NO: 9383 - DNA, 1051 bp, Glycine max; identical to SEQ ID NO: 9337
  Gm_smallRNAprecursor_2216

SEQ ID NO: 9384 - DNA, 1204 bp, Glycine max; identical to SEQ ID NO: 9338
  Gm_smallRNAprecursor_2217

SEQ ID NO: 9385 - DNA, 1165 bp, Glycine max; identical to SEQ ID NO: 9339
  Gm_smallRNAprecursor_2218

SEQ ID NO: 9386 - DNA, 1157 bp, Glycine max; identical to SEQ ID NO: 9340
  Gm_smallRNAprecursor_2219

SEQ ID NO: 9387 - DNA, 1041 bp, Glycine max; identical to SEQ ID NO: 9341
  Gm_smallRNAprecursor_2220

SEQ ID NO: 9388 - DNA, 1183 bp, Glycine max
  Gm_smallRNAprecursor_2221
atataattattgggattacattgacgcctggaccaatatgttctggcatcaaaatagtaaattcaagcattcatggctaatttacttcaaaaataacactgtgtataattttccaaattggttcctccaatggtggaactacttcagaccaattccacagatattcccagaagaagtccaacagggattccaacaattcaacaagctctataatagcaaggaatcacgtattccggcagatttaaagtacttttccagttttgccttgtcatggattttttcaaggcaatacagatacggaaaaaccgaaaacagcaaacagtatccaccgttgcagagacacgcctttgtaaaatggtggtcacaattcgatacttcaaaggctgctccagaacaagtcaagaacagattccagagcaatcctgagttcctcaaacctgctaatccggagacatctttgtttttgaatcagaagtcgcaactggcagcattcttagcaagctcaaaatctaaagagagtcttgctcagaatctcaaagaagttctccaactacttcaacaggaagtggaagaagaaccccccaagaaggaagccgaatcatccgagactaatgatgaccaagaagatgatccattctaccagaatgaagatgactgttttggtatatcgttagacgacgattaattagttttagtaatcatgaattattgtaactaatttgtcggtacctcttattaatgtaatttgtaaaagttttgtaacagttccggtaaacattaccgacactgtagaaacagtaaaaattgagtctatttaaaggagtcctcgttccctttgtgaggtaccctttcagatagtctcaaaaccaggttttagagagagaagctctgcctaggaaaaactctttgtaagcttctatgcccatatcaattaagggcttgatggctacttgtacacaaccgatgtgtagatatttatacttacggctatgttcataaattgaattttttgaaagtaaatgaaattcttcccctatatcttgtcctagtggaatattgtttactactgctttgattatgtaatcaaagttgtatttgtcctttattgtttcaggaacgtatagttgatcctgagggatttctggaatgttccagtcatccatgttttgattgatatcttcga

SEQ ID NO: 9389 - DNA, 1153 bp, Glycine max
  Gm_smallRNAprecursor_2222
gaccaatatgttctggcatcaaaatagtaaattcaagcattcatggctaatttacttcaaaaataacactgtgtataattttccaaattggttcctccaatggtggaactacttcagaccaattccacagatattcccagaagaagtccaacagggattccaacaattcaacaagctctataatagcaaggaatcacgtattccggcagatttaaagtacttttccagttttgccttgtcatggattttttcaaggcaatacagatacggaaaaaccgaaaacagcaaacagtatccaccgttgcagagacacgcctttgtaaaatggtggtcacaattcgatacttcaaaggctgctccagaacaagtcaagaacagattccagagcaatcctgagttcctcaaacctgctaatccggagacatctttgtttttgaatcagaagtcgcaactggcagcattcttagcaagctcaaaatctaaagagagtcttgctcagaatctcaaagaagttctccaactacttcaacaggaagtggaagaagaaccccccaagaaggaagccgaatcatccgagactaatgatgaccaagaagatgatccattctaccagaatgaagatgactgttttggtatatcgttagacgacgattaattagttttagtaatcatgaattattgtaactaatttgtcggtacctcttattaatgtaatttgtaaaagttttgtaacagttccggtaaacattaccgacactgtagaaacagtaaaaattgagtctatttaaaggagtcctcgttccctttgtgaggtaccctttcagatagtctcaaaaccaggttttagagagagaagctctgcctaggaaaaactctttgtaagcttctatgcccatatcaattaagggcttgatggctacttgtacacaaccgatgtgtagatatttatacttacggctatgttcataaattgaattttttgaaagtaaatgaaattcttcccctatatcttgtcctagtggaatattgtttactactgctttgattatgtaatcaaagttgtatttgtcctttattgtttcaggaacgtatagttgatcctgagggatttctggaatgttccagtcatccatgttttgattgatatcttcga

SEQ ID NO: 9390 - DNA, 1172 bp, Glycine max
  Gm_smallRNAprecursor_2223
gaccaatatgttctggcatcaaaatagtaaattcaagcattcatggctaatttacttcaaaaataacactgtgtataattttccaaattggttcctccaatggtggaactacttcagaccaattccacagatattcccagaagaagtccaacagggattccaacaattcaacaagctctataatagcaaggaatcacgtattccggcagatttaaagtacttttccagttttgccttgtcatggattttttcaaggcaatacagatacggaaaaaccgaaaacagcaaacagtatccaccgttgcagagacacgcctttgtaaaatggtggtcacaattcgatacttcaaaggctgctccagaacaagtcaagaacagattccagagcaatcctgagttcctcaaacctgctaatccggagacatctttgtttttgaatcagaagtcgcaactggcagcattcttagcaagctcaaaatctaaagagagtcttgctcagaatctcaaagaagttctccaactacttcaacaggaagtggaagaagaaccccccaagaaggaagccgaatcatccgagactaatgatgaccaagaagatgatccattctaccagaatgaagatgactgttttggtatatcgttagacgacgattaattagttttagtaatcatgaattattgtaactaatttgtcggtacctcttattaatgtaatttgtaaaagttttgtaacagttccggtaaacattaccgacactgtagaaacagtaaaaattgagtctatttaaaggagtcctcgttccctttgtgaggtaccctttcagatagtctcaaaaccaggttttagagagagaagctctgcctaggaaaaactctttgtaagcttctatgcccatatcaattaagggcttgatggctacttgtacacaaccgatgtgtagatatttatacttacggctatgttcataaattgaattttttgaaagtaaatgaaattcttcccctatatcttgtcctagtggaatattgtttactactgctttgattatgtaatcaaagttgtatttgtcctttattgtttcaggaacgtatagttgatcctgagggatttctggaatgttccagtcatccatgttttgattgatatcttcgaatcggacttcctcatcgaa

SEQ ID NO: 9391 - DNA, 1106 bp, Glycine max
  Gm_smallRNAprecursor_2224
cactgtgtataattttccaaattggttcctccaatggtggaactacttcagaccaattccacagatattcccagaagaagtccaacagggattccaacaattcaacaagctctataatagcaaggaatcacgtattccggcagatttaaagtacttttccagttttgccttgtcatggattttttcaaggcaatacagatacggaaaaaccgaaaacagcaaacagtatccaccgttgcagagacacgcctttgtaaaatggtggtcacaattcgatacttcaaaggctgctccagaacaagtcaagaacagattccagagcaatcctgagttcctcaaacctgctaatccggagacatctttgtttttgaatcagaagtcgcaactggcagcattcttagcaagctcaaaatctaaagagagtcttgctcagaatctcaaagaagttctccaactacttcaacaggaagtggaagaagaaccccccaagaaggaagccgaatcatccgagactaatgatgaccaagaagatgatccattctaccagaatgaagatgactgttttggtatatcgttagacgacgattaattagttttagtaatcatgaattattgtaactaatttgtcggtacctcttattaatgtaatttgtaaaagttttgtaacagttccggtaaacattaccgacactgtagaaacagtaaaaattgagtctatttaaaggagtcctcgttccctttgtgaggtaccctttcagatagtctcaaaaccaggttttagagagagaagctctgcctaggaaaaactctttgtaagcttctatgcccatatcaattaagggcttgatggctacttgtacacaaccgatgtgtagatatttatacttacggctatgttcataaattgaattttttgaaagtaaatgaaattcttcccctatatcttgtcctagtggaatattgtttactactgctttgattatgtaatcaaagttgtatttgtcctttattgtttcaggaacgtatagttgatcctgagggatttctggaatgttccagtcatccatgttttgattgatatcttcgaatcggacttcctcatcgaa

SEQ ID NO: 9392 - DNA, 1053 bp, Glycine max
  Gm_smallRNAprecursor_2225
ttggttcctccaatggtggaactacttcagaccaattccacagatattcccagaagaagtccaacagggattccaacaattcaacaagctctataatagcaaggaatcacgtattccggcagatttaaagtacttttccagttttgccttgtcatggattttttcaaggcaatacagatacggaaaaaccgaaaacagcaaacagtatccaccgttgcagagacacgcctttgtaaaatggtggtcacaattcgatacttcaaaggctgctccagaacaagtcaagaacagattccagagcaatcctgagttcctcaaacctgctaatccggagacatctttgtttttgaatcagaagtcgcaactggcagcattcttagcaagctcaaaatctaaagagagtcttgctcagaatctcaaagaagttctccaactacttcaacaggaagtggaagaagaaccccccaagaaggaagccgaatcatccgagactaatgatgaccaagaagatgatccattctaccagaatgaagatgactgttttggtatatcgttagacgacgattaattagttttagtaatcatgaattattgtaactaatttgtcggtacctcttattaatgtaatttgtaaaagttttgtaacagttccggtaaacattaccgacactgtagaaacagtaaaaattgagtctatttaaaggagtcctcgttccctttgtgaggtaccctttcagatagtctcaaaaccaggttttagagagagaagctctgcctaggaaaaactctttgtaagcttctatgcccatatcaattaagggcttgatggctacttgtacacaaccgatgtgtagatatttatacttacggctatgttcataaattgaattttttgaaagtaaatgaaattcttcccctatatcttgtcctagtggaatattgtttactactgctttgattatgtaatcaaagttgtatttgtcctttattgtttcaggaacgtatagttgatcctgagggatttctggaatgttccagtcatccatgttttga

SEQ ID NO: 9393 - DNA, 1123 bp, Glycine max
  Gm_smallRNAprecursor_2226
gaagaagtccaacagggattccaacaattcaacaagctctataatagcaaggaatcacgtattccggcagatttaaagtacttttccagttttgccttgtcatggattttttcaaggcaatacagatacggaaaaaccgaaaacagcaaacagtatccaccgttgcagagacacgcctttgtaaaatggtggtcacaattcgatacttcaaaggctgctccagaacaagtcaagaacagattccagagcaatcctgagttcctcaaacctgctaatccggagacatctttgtttttgaatcagaagtcgcaactggcagcattcttagcaagctcaaaatctaaagagagtcttgctcagaatctcaaagaagttctccaactacttcaacaggaagtggaagaagaaccccccaagaaggaagccgaatcatccgagactaatgatgaccaagaagatgatccattctaccagaatgaagatgactgttttggtatatcgttagacgacgattaattagttttagtaatcatgaattattgtaactaatttgtcggtacctcttattaatgtaatttgtaaaagttttgtaacagttccggtaaacattaccgacactgtagaaacagtaaaaattgagtctatttaaaggagtcctcgttccctttgtgaggtaccctttcagatagtctcaaaaccaggttttagagagagaagctctgcctaggaaaaactctttgtaagcttctatgcccatatcaattaagggcttgatggctacttgtacacaaccgatgtgtagatatttatacttacggctatgttcataaattgaattttttgaaagtaaatgaaattcttcccctatatcttgtcctagtggaatattgtttactactgctttgattatgtaatcaaagttgtatttgtcctttattgtttcaggaacgtatagttgatcctgagggatttctggaatgttccagtcatccatgttttgattgatatcttcgaatcggacttcctcatcgaagagattttgttttgcggcgacctcttgggtctggttatcttgatcatttaataaattggagtttcttgaagaagatgaggaggaggagtt

SEQ ID NO: 9394 - DNA, 1196 bp, Glycine max
  Gm_smallRNAprecursor_2227
cagatacggaaaaaccgaaaacagcaaacagtatccaccgttgcagagacacgcctttgtaaaatggtggtcacaattcgatacttcaaaggctgctccagaacaagtcaagaacagattccagagcaatcctgagttcctcaaacctgctaatccggagacatctttgtttttgaatcagaagtcgcaactggcagcattcttagcaagctcaaaatctaaagagagtcttgctcagaatctcaaagaagttctccaactacttcaacaggaagtggaagaagaaccccccaagaaggaagccgaatcatccgagactaatgatgaccaagaagatgatccattctaccagaatgaagatgactgttttggtatatcgttagacgacgattaattagttttagtaatcatgaattattgtaactaatttgtcggtacctcttattaatgtaatttgtaaaagttttgtaacagttccggtaaacattaccgacactgtagaaacagtaaaaattgagtctatttaaaggagtcctcgttccctttgtgaggtaccctttcagatagtctcaaaaccaggttttagagagagaagctctgcctaggaaaaactctttgtaagcttctatgcccatatcaattaagggcttgatggctacttgtacacaaccgatgtgtagatatttatacttacggctatgttcataaattgaattttttgaaagtaaatgaaattcttcccctatatcttgtcctagtggaatattgtttactactgctttgattatgtaatcaaagttgtatttgtcctttattgtttcaggaacgtatagttgatcctgagggatttctggaatgttccagtcatccatgttttgattgatatcttcgaatcggacttcctcatcgaagagattttgttttgcggcgacctcttgggtctggttatcttgatcatttaataaattggagtttcttgaagaagatgaggaggaggagtttgagcgaaaagagatacgggaaaaagatcgtaatagtctagacatgattataatattctctaatatcttttccctcatttggttccatagaaatatccccgtaagtaaatatgtcacaaaatttttctggatctgaattatttttaagaaaaaactctttttttttttataaaatagtttgaacggcaatcctat

SEQ ID NO: 9395 - DNA, 1114 bp, Glycine max
  Gm_smallRNAprecursor_2228
ctaatccggagacatctttgtttttgaatcagaagtcgcaactggcagcattcttagcaagctcaaaatctaaagagagtcttgctcagaatctcaaagaagttctccaactacttcaacaggaagtggaagaagaaccccccaagaaggaagccgaatcatccgagactaatgatgaccaagaagatgatccattctaccagaatgaagatgactgttttggtatatcgttagacgacgattaattagttttagtaatcatgaattattgtaactaatttgtcggtacctcttattaatgtaatttgtaaaagttttgtaacagttccggtaaacattaccgacactgtagaaacagtaaaaattgagtctatttaaaggagtcctcgttccctttgtgaggtaccctttcagatagtctcaaaaccaggttttagagagagaagctctgcctaggaaaaactctttgtaagcttctatgcccatatcaattaagggcttgatggctacttgtacacaaccgatgtgtagatatttatacttacggctatgttcataaattgaattttttgaaagtaaatgaaattcttcccctatatcttgtcctagtggaatattgtttactactgctttgattatgtaatcaaagttgtatttgtcctttattgtttcaggaacgtatagttgatcctgagggatttctggaatgttccagtcatccatgttttgattgatatcttcgaatcggacttcctcatcgaagagattttgttttgcggcgacctcttgggtctggttatcttgatcatttaataaattggagtttcttgaagaagatgaggaggaggagtttgagcgaaaagagatacgggaaaaagatcgtaatagtctagacatgattataatattctctaatatcttttccctcatttggttccatagaaatatccccgtaagtaaatatgtcacaaaatttttctggatctgaattatttttaagaaaaaactctttttttttttataaaatagtttgaacggcaatcctatagccaccagtatattatgtcttgatattttggttaaacagtacaccttagccttactaccctttatc

SEQ ID NO: 9396 - DNA, 1197 bp, Glycine max
  Gm_smallRNAprecursor_2229
taccagaatgaagatgactgttttggtatatcgttagacgacgattaattagttttagtaatcatgaattattgtaactaatttgtcggtacctcttattaatgtaatttgtaaaagttttgtaacagttccggtaaacattaccgacactgtagaaacagtaaaaattgagtctatttaaaggagtcctcgttccctttgtgaggtaccctttcagatagtctcaaaaccaggttttagagagagaagctctgcctaggaaaaactctttgtaagcttctatgcccatatcaattaagggcttgatggctacttgtacacaaccgatgtgtagatatttatacttacggctatgttcataaattgaattttttgaaagtaaatgaaattcttcccctatatcttgtcctagtggaatattgtttactactgctttgattatgtaatcaaagttgtatttgtcctttattgtttcaggaacgtatagttgatcctgagggatttctggaatgttccagtcatccatgttttgattgatatcttcgaatcggacttcctcatcgaagagattttgttttgcggcgacctcttgggtctggttatcttgatcatttaataaattggagtttcttgaagaagatgaggaggaggagtttgagcgaaaagagatacgggaaaaagatcgtaatagtctagacatgattataatattctctaatatcttttccctcatttggttccatagaaatatccccgtaagtaaatatgtcacaaaatttttctggatctgaattatttttaagaaaaaactctttttttttttataaaatagtttgaacggcaatcctatagccaccagtatattatgtcttgatattttggttaaacagtacaccttagccttactaccctttatccatcacgggtcttactgctacagtaccatttaactaaaatattatatagctgtatttccaggaagtactgttcaaacatctactatacagatcaaaataaaatattactcatattgtacaaggtttcagatcaataaaatttgtttacatatgtccttacggaccatattcctacttccccatcaggctctgataccagagatatgcccttgatacggtactgtaggaatatggtattgtaactaatatataggccttagaagatataggcctcaccaaa

SEQ ID NO: 9397 - DNA, 1054 bp, Glycine max
  Gm_smallRNAprecursor_2230
tttgaaagtaaatgaaattcttcccctatatcttgtcctagtggaatattgtttactactgctttgattatgtaatcaaagttgtatttgtcctttattgtttcaggaacgtatagttgatcctgagggatttctggaatgttccagtcatccatgttttgattgatatcttcgaatcggacttcctcatcgaagagattttgttttgcggcgacctcttgggtctggttatcttgatcatttaataaattggagtttcttgaagaagatgaggaggaggagtttgagcgaaaagagatacgggaaaaagatcgtaatagtctagacatgattataatattctctaatatcttttccctcatttggttccatagaaatatccccgtaagtaaatatgtcacaaaatttttctggatctgaattatttttaagaaaaaactctttttttttttataaaatagtttgaacggcaatcctatagccaccagtatattatgtcttgatattttggttaaacagtacaccttagccttactaccctttatccatcacgggtcttactgctacagtaccatttaactaaaatattatatagctgtatttccaggaagtactgttcaaacatctactatacagatcaaaataaaatattactcatattgtacaaggtttcagatcaataaaatttgtttacatatgtccttacggaccatattcctacttccccatcaggctctgataccagagatatgcccttgatacggtactgtaggaatatggtattgtaactaatatataggccttagaagatataggcctcaccaaagtaccaaaattggccaaaaagacctgggcagaaatggcctcagaataagatgatgattctaaaacagatctgcaaaaacaaatccaaaaggccaaacagaccaaaactgtctgtaaccaaacaccaagccaatcgttgactcaacaagaatcaacgccacaacccagcaacagttatatttccaaaaacaaatttttcaatgttttacaaatggaaccagaatactgg

SEQ ID NO: 9398 - DNA, 1130 bp, Glycine max
  Gm_smallRNAprecursor_2231
tttgaaagtaaatgaaattcttcccctatatcttgtcctagtggaatattgtttactactgctttgattatgtaatcaaagttgtatttgtcctttattgtttcaggaacgtatagttgatcctgagggatttctggaatgttccagtcatccatgttttgattgatatcttcgaatcggacttcctcatcgaagagattttgttttgcggcgacctcttgggtctggttatcttgatcatttaataaattggagtttcttgaagaagatgaggaggaggagtttgagcgaaaagagatacgggaaaaagatcgtaatagtctagacatgattataatattctctaatatcttttccctcatttggttccatagaaatatccccgtaagtaaatatgtcacaaaatttttctggatctgaattatttttaagaaaaaactctttttttttttataaaatagtttgaacggcaatcctatagccaccagtatattatgtcttgatattttggttaaacagtacaccttagccttactaccctttatccatcacgggtcttactgctacagtaccatttaactaaaatattatatagctgtatttccaggaagtactgttcaaacatctactatacagatcaaaataaaatattactcatattgtacaaggtttcagatcaataaaatttgtttacatatgtccttacggaccatattcctacttccccatcaggctctgataccagagatatgcccttgatacggtactgtaggaatatggtattgtaactaatatataggccttagaagatataggcctcaccaaagtaccaaaattggccaaaaagacctgggcagaaatggcctcagaataagatgatgattctaaaacagatctgcaaaaacaaatccaaaaggccaaacagaccaaaactgtctgtaaccaaacaccaagccaatcgttgactcaacaagaatcaacgccacaacccagcaacagttatatttccaaaaacaaatttttcaatgttttacaaatggaaccagaatactgggacaagaatcctttcaaagcaaccgccaaagtattccccccgggattccattacaggccaacagccacaaacaaaa

SEQ ID NO: 9399 - DNA, 1108 bp, Glycine max
  Gm_smallRNAprecursor_2232
cccctatatcttgtcctagtggaatattgtttactactgctttgattatgtaatcaaagttgtatttgtcctttattgtttcaggaacgtatagttgatcctgagggatttctggaatgttccagtcatccatgttttgattgatatcttcgaatcggacttcctcatcgaagagattttgttttgcggcgacctcttgggtctggttatcttgatcatttaataaattggagtttcttgaagaagatgaggaggaggagtttgagcgaaaagagatacgggaaaaagatcgtaatagtctagacatgattataatattctctaatatcttttccctcatttggttccatagaaatatccccgtaagtaaatatgtcacaaaatttttctggatctgaattatttttaagaaaaaactctttttttttttataaaatagtttgaacggcaatcctatagccaccagtatattatgtcttgatattttggttaaacagtacaccttagccttactaccctttatccatcacgggtcttactgctacagtaccatttaactaaaatattatatagctgtatttccaggaagtactgttcaaacatctactatacagatcaaaataaaatattactcatattgtacaaggtttcagatcaataaaatttgtttacatatgtccttacggaccatattcctacttccccatcaggctctgataccagagatatgcccttgatacggtactgtaggaatatggtattgtaactaatatataggccttagaagatataggcctcaccaaagtaccaaaattggccaaaaagacctgggcagaaatggcctcagaataagatgatgattctaaaacagatctgcaaaaacaaatccaaaaggccaaacagaccaaaactgtctgtaaccaaacaccaagccaatcgttgactcaacaagaatcaacgccacaacccagcaacagttatatttccaaaaacaaatttttcaatgttttacaaatggaaccagaatactgggacaagaatcctttcaaagcaaccgccaaagtattccccccgggattccattacaggccaacagccacaaacaaaa

SEQ ID NO: 9400 - DNA, 1186 bp, Glycine max
  Gm_smallRNAprecursor_2233
atgtaatcaaagttgtatttgtcctttattgtttcaggaacgtatagttgatcctgagggatttctggaatgttccagtcatccatgttttgattgatatcttcgaatcggacttcctcatcgaagagattttgttttgcggcgacctcttgggtctggttatcttgatcatttaataaattggagtttcttgaagaagatgaggaggaggagtttgagcgaaaagagatacgggaaaaagatcgtaatagtctagacatgattataatattctctaatatcttttccctcatttggttccatagaaatatccccgtaagtaaatatgtcacaaaatttttctggatctgaattatttttaagaaaaaactctttttttttttataaaatagtttgaacggcaatcctatagccaccagtatattatgtcttgatattttggttaaacagtacaccttagccttactaccctttatccatcacgggtcttactgctacagtaccatttaactaaaatattatatagctgtatttccaggaagtactgttcaaacatctactatacagatcaaaataaaatattactcatattgtacaaggtttcagatcaataaaatttgtttacatatgtccttacggaccatattcctacttccccatcaggctctgataccagagatatgcccttgatacggtactgtaggaatatggtattgtaactaatatataggccttagaagatataggcctcaccaaagtaccaaaattggccaaaaagacctgggcagaaatggcctcagaataagatgatgattctaaaacagatctgcaaaaacaaatccaaaaggccaaacagaccaaaactgtctgtaaccaaacaccaagccaatcgttgactcaacaagaatcaacgccacaacccagcaacagttatatttccaaaaacaaatttttcaatgttttacaaatggaaccagaatactgggacaagaatcctttcaaagcaaccgccaaagtattccccccgggattccattacaggccaacagccacaaacaaaacccgcaaattctacgaattcattctaatagatacaaactcagtatctattaaacagttcaaagaccccaaagatctaaatctaaatacccattccagaatccaaatcttaaaggttatgcagcca

SEQ ID NO: 9401 - DNA, 1141 bp, Glycine max
  Gm_smallRNAprecursor_2234
gtcctttattgtttcaggaacgtatagttgatcctgagggatttctggaatgttccagtcatccatgttttgattgatatcttcgaatcggacttcctcatcgaagagattttgttttgcggcgacctcttgggtctggttatcttgatcatttaataaattggagtttcttgaagaagatgaggaggaggagtttgagcgaaaagagatacgggaaaaagatcgtaatagtctagacatgattataatattctctaatatcttttccctcatttggttccatagaaatatccccgtaagtaaatatgtcacaaaatttttctggatctgaattatttttaagaaaaaactctttttttttttataaaatagtttgaacggcaatcctatagccaccagtatattatgtcttgatattttggttaaacagtacaccttagccttactaccctttatccatcacgggtcttactgctacagtaccatttaactaaaatattatatagctgtatttccaggaagtactgttcaaacatctactatacagatcaaaataaaatattactcatattgtacaaggtttcagatcaataaaatttgtttacatatgtccttacggaccatattcctacttccccatcaggctctgataccagagatatgcccttgatacggtactgtaggaatatggtattgtaactaatatataggccttagaagatataggcctcaccaaagtaccaaaattggccaaaaagacctgggcagaaatggcctcagaataagatgatgattctaaaacagatctgcaaaaacaaatccaaaaggccaaacagaccaaaactgtctgtaaccaaacaccaagccaatcgttgactcaacaagaatcaacgccacaacccagcaacagttatatttccaaaaacaaatttttcaatgttttacaaatggaaccagaatactgggacaagaatcctttcaaagcaaccgccaaagtattccccccgggattccattacaggccaacagccacaaacaaaacccgcaaattctacgaattcattctaatagatacaaactcagtatctattaaacagttcaaagaccccaaagatctaaatctaaatacccattccagaat

SEQ ID NO: 9402 - DNA, 1173 bp, Glycine max
  Gm_smallRNAprecursor_2235
agttgatcctgagggatttctggaatgttccagtcatccatgttttgattgatatcttcgaatcggacttcctcatcgaagagattttgttttgcggcgacctcttgggtctggttatcttgatcatttaataaattggagtttcttgaagaagatgaggaggaggagtttgagcgaaaagagatacgggaaaaagatcgtaatagtctagacatgattataatattctctaatatcttttccctcatttggttccatagaaatatccccgtaagtaaatatgtcacaaaatttttctggatctgaattatttttaagaaaaaactctttttttttttataaaatagtttgaacggcaatcctatagccaccagtatattatgtcttgatattttggttaaacagtacaccttagccttactaccctttatccatcacgggtcttactgctacagtaccatttaactaaaatattatatagctgtatttccaggaagtactgttcaaacatctactatacagatcaaaataaaatattactcatattgtacaaggtttcagatcaataaaatttgtttacatatgtccttacggaccatattcctacttccccatcaggctctgataccagagatatgcccttgatacggtactgtaggaatatggtattgtaactaatatataggccttagaagatataggcctcaccaaagtaccaaaattggccaaaaagacctgggcagaaatggcctcagaataagatgatgattctaaaacagatctgcaaaaacaaatccaaaaggccaaacagaccaaaactgtctgtaaccaaacaccaagccaatcgttgactcaacaagaatcaacgccacaacccagcaacagttatatttccaaaaacaaatttttcaatgttttacaaatggaaccagaatactgggacaagaatcctttcaaagcaaccgccaaagtattccccccgggattccattacaggccaacagccacaaacaaaacccgcaaattctacgaattcattctaatagatacaaactcagtatctattaaacagttcaaagaccccaaagatctaaatctaaatacccattccagaatccaaatcttaaaggttatgcagccacgacattgtggctcaaaattaaaccaacccaa

SEQ ID NO: 9403 - DNA, 1143 bp, Glycine max
  Gm_smallRNAprecursor_2236
atttctggaatgttccagtcatccatgttttgattgatatcttcgaatcggacttcctcatcgaagagattttgttttgcggcgacctcttgggtctggttatcttgatcatttaataaattggagtttcttgaagaagatgaggaggaggagtttgagcgaaaagagatacgggaaaaagatcgtaatagtctagacatgattataatattctctaatatcttttccctcatttggttccatagaaatatccccgtaagtaaatatgtcacaaaatttttctggatctgaattatttttaagaaaaaactctttttttttttataaaatagtttgaacggcaatcctatagccaccagtatattatgtcttgatattttggttaaacagtacaccttagccttactaccctttatccatcacgggtcttactgctacagtaccatttaactaaaatattatatagctgtatttccaggaagtactgttcaaacatctactatacagatcaaaataaaatattactcatattgtacaaggtttcagatcaataaaatttgtttacatatgtccttacggaccatattcctacttccccatcaggctctgataccagagatatgcccttgatacggtactgtaggaatatggtattgtaactaatatataggccttagaagatataggcctcaccaaagtaccaaaattggccaaaaagacctgggcagaaatggcctcagaataagatgatgattctaaaacagatctgcaaaaacaaatccaaaaggccaaacagaccaaaactgtctgtaaccaaacaccaagccaatcgttgactcaacaagaatcaacgccacaacccagcaacagttatatttccaaaaacaaatttttcaatgttttacaaatggaaccagaatactgggacaagaatcctttcaaagcaaccgccaaagtattccccccgggattccattacaggccaacagccacaaacaaaacccgcaaattctacgaattcattctaatagatacaaactcagtatctattaaacagttcaaagaccccaaagatctaaatctaaatacccattccagaatccaaatcttaaaggttatgcagccacgacattgtggctcaaa

SEQ ID NO: 9404 - DNA, 1044 bp, Glycine max
  Gm_smallRNAprecursor_2237
cgacctcttgggtctggttatcttgatcatttaataaattggagtttcttgaagaagatgaggaggaggagtttgagcgaaaagagatacgggaaaaagatcgtaatagtctagacatgattataatattctctaatatcttttccctcatttggttccatagaaatatccccgtaagtaaatatgtcacaaaatttttctggatctgaattatttttaagaaaaaactctttttttttttataaaatagtttgaacggcaatcctatagccaccagtatattatgtcttgatattttggttaaacagtacaccttagccttactaccctttatccatcacgggtcttactgctacagtaccatttaactaaaatattatatagctgtatttccaggaagtactgttcaaacatctactatacagatcaaaataaaatattactcatattgtacaaggtttcagatcaataaaatttgtttacatatgtccttacggaccatattcctacttccccatcaggctctgataccagagatatgcccttgatacggtactgtaggaatatggtattgtaactaatatataggccttagaagatataggcctcaccaaagtaccaaaattggccaaaaagacctgggcagaaatggcctcagaataagatgatgattctaaaacagatctgcaaaaacaaatccaaaaggccaaacagaccaaaactgtctgtaaccaaacaccaagccaatcgttgactcaacaagaatcaacgccacaacccagcaacagttatatttccaaaaacaaatttttcaatgttttacaaatggaaccagaatactgggacaagaatcctttcaaagcaaccgccaaagtattccccccgggattccattacaggccaacagccacaaacaaaacccgcaaattctacgaattcattctaatagatacaaactcagtatctattaaacagttcaaagaccccaaagatctaaatctaaatacccattccagaatccaaatcttaaaggttatgcagcca

SEQ ID NO: 9405 - DNA, 1101 bp, Glycine max
  Gm_smallRNAprecursor_2238
gtttcttgaagaagatgaggaggaggagtttgagcgaaaagagatacgggaaaaagatcgtaatagtctagacatgattataatattctctaatatcttttccctcatttggttccatagaaatatccccgtaagtaaatatgtcacaaaatttttctggatctgaattatttttaagaaaaaactctttttttttttataaaatagtttgaacggcaatcctatagccaccagtatattatgtcttgatattttggttaaacagtacaccttagccttactaccctttatccatcacgggtcttactgctacagtaccatttaactaaaatattatatagctgtatttccaggaagtactgttcaaacatctactatacagatcaaaataaaatattactcatattgtacaaggtttcagatcaataaaatttgtttacatatgtccttacggaccatattcctacttccccatcaggctctgataccagagatatgcccttgatacggtactgtaggaatatggtattgtaactaatatataggccttagaagatataggcctcaccaaagtaccaaaattggccaaaaagacctgggcagaaatggcctcagaataagatgatgattctaaaacagatctgcaaaaacaaatccaaaaggccaaacagaccaaaactgtctgtaaccaaacaccaagccaatcgttgactcaacaagaatcaacgccacaacccagcaacagttatatttccaaaaacaaatttttcaatgttttacaaatggaaccagaatactgggacaagaatcctttcaaagcaaccgccaaagtattccccccgggattccattacaggccaacagccacaaacaaaacccgcaaattctacgaattcattctaatagatacaaactcagtatctattaaacagttcaaagaccccaaagatctaaatctaaatacccattccagaatccaaatcttaaaggttatgcagccacgacattgtggctcaaaattaaaccaacccaaaaaattttctgcaccatttgaccctgcaagatataattattgggattacattgacgcctggaccaata

SEQ ID NO: 9406 - DNA, 1126 bp, Glycine max
  Gm_smallRNAprecursor_2239
gtttcttgaagaagatgaggaggaggagtttgagcgaaaagagatacgggaaaaagatcgtaatagtctagacatgattataatattctctaatatcttttccctcatttggttccatagaaatatccccgtaagtaaatatgtcacaaaatttttctggatctgaattatttttaagaaaaaactctttttttttttataaaatagtttgaacggcaatcctatagccaccagtatattatgtcttgatattttggttaaacagtacaccttagccttactaccctttatccatcacgggtcttactgctacagtaccatttaactaaaatattatatagctgtatttccaggaagtactgttcaaacatctactatacagatcaaaataaaatattactcatattgtacaaggtttcagatcaataaaatttgtttacatatgtccttacggaccatattcctacttccccatcaggctctgataccagagatatgcccttgatacggtactgtaggaatatggtattgtaactaatatataggccttagaagatataggcctcaccaaagtaccaaaattggccaaaaagacctgggcagaaatggcctcagaataagatgatgattctaaaacagatctgcaaaaacaaatccaaaaggccaaacagaccaaaactgtctgtaaccaaacaccaagccaatcgttgactcaacaagaatcaacgccacaacccagcaacagttatatttccaaaaacaaatttttcaatgttttacaaatggaaccagaatactgggacaagaatcctttcaaagcaaccgccaaagtattccccccgggattccattacaggccaacagccacaaacaaaacccgcaaattctacgaattcattctaatagatacaaactcagtatctattaaacagttcaaagaccccaaagatctaaatctaaatacccattccagaatccaaatcttaaaggttatgcagccacgacattgtggctcaaaattaaaccaacccaaaaaattttctgcaccatttgaccctgcaagatataattattgggattacattgacgcctggaccaatatgttctggcatcaaaatagtaaatt

SEQ ID NO: 9407 - DNA, 1108 bp, Glycine max
  Gm_smallRNAprecursor_2240
ttttaagaaaaaactctttttttttttataaaatagtttgaacggcaatcctatagccaccagtatattatgtcttgatattttggttaaacagtacaccttagccttactaccctttatccatcacgggtcttactgctacagtaccatttaactaaaatattatatagctgtatttccaggaagtactgttcaaacatctactatacagatcaaaataaaatattactcatattgtacaaggtttcagatcaataaaatttgtttacatatgtccttacggaccatattcctacttccccatcaggctctgataccagagatatgcccttgatacggtactgtaggaatatggtattgtaactaatatataggccttagaagatataggcctcaccaaagtaccaaaattggccaaaaagacctgggcagaaatggcctcagaataagatgatgattctaaaacagatctgcaaaaacaaatccaaaaggccaaacagaccaaaactgtctgtaaccaaacaccaagccaatcgttgactcaacaagaatcaacgccacaacccagcaacagttatatttccaaaaacaaatttttcaatgttttacaaatggaaccagaatactgggacaagaatcctttcaaagcaaccgccaaagtattccccccgggattccattacaggccaacagccacaaacaaaacccgcaaattctacgaattcattctaatagatacaaactcagtatctattaaacagttcaaagaccccaaagatctaaatctaaatacccattccagaatccaaatcttaaaggttatgcagccacgacattgtggctcaaaattaaaccaacccaaaaaattttctgcaccatttgaccctgcaagatataattattgggattacattgacgcctggaccaatatgttctggcatcaaaatagtaaattcaagcattcatggctaatttacttcaaaaataacactgtgtataattttccaaattggttcctccaatggtggaactacttcagaccaattccacagatattcccagaagaagtccaacagggattccaacaattcaacaagctctataatag

SEQ ID NO: 9408 - DNA, 1092 bp, Glycine max
  Gm_smallRNAprecursor_2241
gtacaccttagccttactaccctttatccatcacgggtcttactgctacagtaccatttaactaaaatattatatagctgtatttccaggaagtactgttcaaacatctactatacagatcaaaataaaatattactcatattgtacaaggtttcagatcaataaaatttgtttacatatgtccttacggaccatattcctacttccccatcaggctctgataccagagatatgcccttgatacggtactgtaggaatatggtattgtaactaatatataggccttagaagatataggcctcaccaaagtaccaaaattggccaaaaagacctgggcagaaatggcctcagaataagatgatgattctaaaacagatctgcaaaaacaaatccaaaaggccaaacagaccaaaactgtctgtaaccaaacaccaagccaatcgttgactcaacaagaatcaacgccacaacccagcaacagttatatttccaaaaacaaatttttcaatgttttacaaatggaaccagaatactgggacaagaatcctttcaaagcaaccgccaaagtattccccccgggattccattacaggccaacagccacaaacaaaacccgcaaattctacgaattcattctaatagatacaaactcagtatctattaaacagttcaaagaccccaaagatctaaatctaaatacccattccagaatccaaatcttaaaggttatgcagccacgacattgtggctcaaaattaaaccaacccaaaaaattttctgcaccatttgaccctgcaagatataattattgggattacattgacgcctggaccaatatgttctggcatcaaaatagtaaattcaagcattcatggctaatttacttcaaaaataacactgtgtataattttccaaattggttcctccaatggtggaactacttcagaccaattccacagatattcccagaagaagtccaacagggattccaacaattcaacaagctctataatagcaaggaatcacgtattccggcagatttaaagtacttttccagttttgccttgtcatggattttttcaaggcaataca

SEQ ID NO: 9409 - DNA, 1194 bp, Glycine max
  Gm_smallRNAprecursor_2242
ccatcaggctctgataccagagatatgcccttgatacggtactgtaggaatatggtattgtaactaatatataggccttagaagatataggcctcaccaaagtaccaaaattggccaaaaagacctgggcagaaatggcctcagaataagatgatgattctaaaacagatctgcaaaaacaaatccaaaaggccaaacagaccaaaactgtctgtaaccaaacaccaagccaatcgttgactcaacaagaatcaacgccacaacccagcaacagttatatttccaaaaacaaatttttcaatgttttacaaatggaaccagaatactgggacaagaatcctttcaaagcaaccgccaaagtattccccccgggattccattacaggccaacagccacaaacaaaacccgcaaattctacgaattcattctaatagatacaaactcagtatctattaaacagttcaaagaccccaaagatctaaatctaaatacccattccagaatccaaatcttaaaggttatgcagccacgacattgtggctcaaaattaaaccaacccaaaaaattttctgcaccatttgaccctgcaagatataattattgggattacattgacgcctggaccaatatgttctggcatcaaaatagtaaattcaagcattcatggctaatttacttcaaaaataacactgtgtataattttccaaattggttcctccaatggtggaactacttcagaccaattccacagatattcccagaagaagtccaacagggattccaacaattcaacaagctctataatagcaaggaatcacgtattccggcagatttaaagtacttttccagttttgccttgtcatggattttttcaaggcaatacagatacggaaaaaccgaaaacagcaaacagtatccaccgttgcagagacacgcctttgtaaaatggtggtcacaattcgatacttcaaaggctgctccagaacaagtcaagaactggttccagagcaatcctgagttcctcaaacctgctaatccgaagacatctttgtttctgaatcagaagtcacaactggcagcattcttagcaagctcaaaatctaaagagagtcttgctcagaatctcaaagaagttctccaactacttcaacaggaagtggaagaagaacccccgaagaaggaagtcgaatcat

SEQ ID NO: 9410 - DNA, 1071 bp, Glycine max
  Gm_smallRNAprecursor_2243
caaacagaccaaaactgtctgtaaccaaacaccaagccaatcgttgactcaacaagaatcaacgccacaacccagcaacagttatatttccaaaaacaaatttttcaatgttttacaaatggaaccagaatactgggacaagaatcctttcaaagcaaccgccaaagtattccccccgggattccattacaggccaacagccacaaacaaaacccgcaaattctacgaattcattctaatagatacaaactcagtatctattaaacagttcaaagaccccaaagatctaaatctaaatacccattccagaatccaaatcttaaaggttatgcagccacgacattgtggctcaaaattaaaccaacccaaaaaattttctgcaccatttgaccctgcaagatataattattgggattacattgacgcctggaccaatatgttctggcatcaaaatagtaaattcaagcattcatggctaatttacttcaaaaataacactgtgtataattttccaaattggttcctccaatggtggaactacttcagaccaattccacagatattcccagaagaagtccaacagggattccaacaattcaacaagctctataatagcaaggaatcacgtattccggcagatttaaagtacttttccagttttgccttgtcatggattttttcaaggcaatacagatacggaaaaaccgaaaacagcaaacagtatccaccgttgcagagacacgcctttgtaaaatggtggtcacaattcgatacttcaaaggctgctccagaacaagtcaagaactggttccagagcaatcctgagttcctcaaacctgctaatccgaagacatctttgtttctgaatcagaagtcacaactggcagcattcttagcaagctcaaaatctaaagagagtcttgctcagaatctcaaagaagttctccaactacttcaacaggaagtggaagaagaacccccgaagaaggaagtcgaatcatccgagactaatgatgaccaagaagatgatccattctaccagaatgaagatgactattttggtatatcgtt

SEQ ID NO: 9411 - DNA, 1191 bp, Glycine max
  Gm_smallRNAprecursor_2244
gttatatttccaaaaacaaatttttcaatgttttacaaatggaaccagaatactgggacaagaatcctttcaaagcaaccgccaaagtattccccccgggattccattacaggccaacagccacaaacaaaacccgcaaattctacgaattcattctaatagatacaaactcagtatctattaaacagttcaaagaccccaaagatctaaatctaaatacccattccagaatccaaatcttaaaggttatgcagccacgacattgtggctcaaaattaaaccaacccaaaaaattttctgcaccatttgaccctgcaagatataattattgggattacattgacgcctggaccaatatgttctggcatcaaaatagtaaattcaagcattcatggctaatttacttcaaaaataacactgtgtataattttccaaattggttcctccaatggtggaactacttcagaccaattccacagatattcccagaagaagtccaacagggattccaacaattcaacaagctctataatagcaaggaatcacgtattccggcagatttaaagtacttttccagttttgccttgtcatggattttttcaaggcaatacagatacggaaaaaccgaaaacagcaaacagtatccaccgttgcagagacacgcctttgtaaaatggtggtcacaattcgatacttcaaaggctgctccagaacaagtcaagaactggttccagagcaatcctgagttcctcaaacctgctaatccgaagacatctttgtttctgaatcagaagtcacaactggcagcattcttagcaagctcaaaatctaaagagagtcttgctcagaatctcaaagaagttctccaactacttcaacaggaagtggaagaagaacccccgaagaaggaagtcgaatcatccgagactaatgatgaccaagaagatgatccattctaccagaatgaagatgactattttggtatatcgttagacgacgattaattagttttagtaatcatgaattattgtaactaatttgtcggtacctcttattaatgtaatttgtaaaatttttgtaacagttccggtaaacattaccgacactgtagaaacagtaaaaattgagtctatttaaaggagtcctcgttccctttgtgaggtaccctttcagatagtctcataaccaggt

SEQ ID NO: 9412 - DNA, 1066 bp, Glycine max
  Gm_smallRNAprecursor_2245
atttccaaaaacaaatttttcaatgttttacaaatggaaccagaatactgggacaagaatcctttcaaagcaaccgccaaagtattccccccgggattccattacaggccaacagccacaaacaaaacccgcaaattctacgaattcattctaatagatacaaactcagtatctattaaacagttcaaagaccccaaagatctaaatctaaatacccattccagaatccaaatcttaaaggttatgcagccacgacattgtggctcaaaattaaaccaacccaaaaaattttctgcaccatttgaccctgcaagatataattattgggattacattgacgcctggaccaatatgttctggcatcaaaatagtaaattcaagcattcatggctaatttacttcaaaaataacactgtgtataattttccaaattggttcctccaatggtggaactacttcagaccaattccacagatattcccagaagaagtccaacagggattccaacaattcaacaagctctataatagcaaggaatcacgtattccggcagatttaaagtacttttccagttttgccttgtcatggattttttcaaggcaatacagatacggaaaaaccgaaaacagcaaacagtatccaccgttgcagagacacgcctttgtaaaatggtggtcacaattcgatacttcaaaggctgctccagaacaagtcaagaactggttccagagcaatcctgagttcctcaaacctgctaatccgaagacatctttgtttctgaatcagaagtcacaactggcagcattcttagcaagctcaaaatctaaagagagtcttgctcagaatctcaaagaagttctccaactacttcaacaggaagtggaagaagaacccccgaagaaggaagtcgaatcatccgagactaatgatgaccaagaagatgatccattctaccagaatgaagatgactattttggtatatcgttagacgacgattaattagttttagtaatcatgaattattgtaactaatttgtcggtacctcttattaatgtaatttgtaaa

SEQ ID NO: 9413 - DNA, 1067 bp, Glycine max
  Gm_smallRNAprecursor_2246
atttccaaaaacaaatttttcaatgttttacaaatggaaccagaatactgggacaagaatcctttcaaagcaaccgccaaagtattccccccgggattccattacaggccaacagccacaaacaaaacccgcaaattctacgaattcattctaatagatacaaactcagtatctattaaacagttcaaagaccccaaagatctaaatctaaatacccattccagaatccaaatcttaaaggttatgcagccacgacattgtggctcaaaattaaaccaacccaaaaaattttctgcaccatttgaccctgcaagatataattattgggattacattgacgcctggaccaatatgttctggcatcaaaatagtaaattcaagcattcatggctaatttacttcaaaaataacactgtgtataattttccaaattggttcctccaatggtggaactacttcagaccaattccacagatattcccagaagaagtccaacagggattccaacaattcaacaagctctataatagcaaggaatcacgtattccggcagatttaaagtacttttccagttttgccttgtcatggattttttcaaggcaatacagatacggaaaaaccgaaaacagcaaacagtatccaccgttgcagagacacgcctttgtaaaatggtggtcacaattcgatacttcaaaggctgctccagaacaagtcaagaactggttccagagcaatcctgagttcctcaaacctgctaatccgaagacatctttgtttctgaatcagaagtcacaactggcagcattcttagcaagctcaaaatctaaagagagtcttgctcagaatctcaaagaagttctccaactacttcaacaggaagtggaagaagaacccccgaagaaggaagtcgaatcatccgagactaatgatgaccaagaagatgatccattctaccagaatgaagatgactattttggtatatcgttagacgacgattaattagttttagtaatcatgaattattgtaactaatttgtcggtacctcttattaatgtaatttgtaaaa

SEQ ID NO: 9414 - DNA, 1069 bp, Glycine max
  Gm_smallRNAprecursor_2247
atttccaaaaacaaatttttcaatgttttacaaatggaaccagaatactgggacaagaatcctttcaaagcaaccgccaaagtattccccccgggattccattacaggccaacagccacaaacaaaacccgcaaattctacgaattcattctaatagatacaaactcagtatctattaaacagttcaaagaccccaaagatctaaatctaaatacccattccagaatccaaatcttaaaggttatgcagccacgacattgtggctcaaaattaaaccaacccaaaaaattttctgcaccatttgaccctgcaagatataattattgggattacattgacgcctggaccaatatgttctggcatcaaaatagtaaattcaagcattcatggctaatttacttcaaaaataacactgtgtataattttccaaattggttcctccaatggtggaactacttcagaccaattccacagatattcccagaagaagtccaacagggattccaacaattcaacaagctctataatagcaaggaatcacgtattccggcagatttaaagtacttttccagttttgccttgtcatggattttttcaaggcaatacagatacggaaaaaccgaaaacagcaaacagtatccaccgttgcagagacacgcctttgtaaaatggtggtcacaattcgatacttcaaaggctgctccagaacaagtcaagaactggttccagagcaatcctgagttcctcaaacctgctaatccgaagacatctttgtttctgaatcagaagtcacaactggcagcattcttagcaagctcaaaatctaaagagagtcttgctcagaatctcaaagaagttctccaactacttcaacaggaagtggaagaagaacccccgaagaaggaagtcgaatcatccgagactaatgatgaccaagaagatgatccattctaccagaatgaagatgactattttggtatatcgttagacgacgattaattagttttagtaatcatgaattattgtaactaatttgtcggtacctcttattaatgtaatttgtaaaatt

SEQ ID NO: 9415 - DNA, 1049 bp, Glycine max
  Gm_smallRNAprecursor_2248
caatgttttacaaatggaaccagaatactgggacaagaatcctttcaaagcaaccgccaaagtattccccccgggattccattacaggccaacagccacaaacaaaacccgcaaattctacgaattcattctaatagatacaaactcagtatctattaaacagttcaaagaccccaaagatctaaatctaaatacccattccagaatccaaatcttaaaggttatgcagccacgacattgtggctcaaaattaaaccaacccaaaaaattttctgcaccatttgaccctgcaagatataattattgggattacattgacgcctggaccaatatgttctggcatcaaaatagtaaattcaagcattcatggctaatttacttcaaaaataacactgtgtataattttccaaattggttcctccaatggtggaactacttcagaccaattccacagatattcccagaagaagtccaacagggattccaacaattcaacaagctctataatagcaaggaatcacgtattccggcagatttaaagtacttttccagttttgccttgtcatggattttttcaaggcaatacagatacggaaaaaccgaaaacagcaaacagtatccaccgttgcagagacacgcctttgtaaaatggtggtcacaattcgatacttcaaaggctgctccagaacaagtcaagaactggttccagagcaatcctgagttcctcaaacctgctaatccgaagacatctttgtttctgaatcagaagtcacaactggcagcattcttagcaagctcaaaatctaaagagagtcttgctcagaatctcaaagaagttctccaactacttcaacaggaagtggaagaagaacccccgaagaaggaagtcgaatcatccgagactaatgatgaccaagaagatgatccattctaccagaatgaagatgactattttggtatatcgttagacgacgattaattagttttagtaatcatgaattattgtaactaatttgtcggtacctcttattaatgtaatttgtaaaatt

SEQ ID NO: 9416 - DNA, 1131 bp, Glycine max
  Gm_smallRNAprecursor_2249
caatgttttacaaatggaaccagaatactgggacaagaatcctttcaaagcaaccgccaaagtattccccccgggattccattacaggccaacagccacaaacaaaacccgcaaattctacgaattcattctaatagatacaaactcagtatctattaaacagttcaaagaccccaaagatctaaatctaaatacccattccagaatccaaatcttaaaggttatgcagccacgacattgtggctcaaaattaaaccaacccaaaaaattttctgcaccatttgaccctgcaagatataattattgggattacattgacgcctggaccaatatgttctggcatcaaaatagtaaattcaagcattcatggctaatttacttcaaaaataacactgtgtataattttccaaattggttcctccaatggtggaactacttcagaccaattccacagatattcccagaagaagtccaacagggattccaacaattcaacaagctctataatagcaaggaatcacgtattccggcagatttaaagtacttttccagttttgccttgtcatggattttttcaaggcaatacagatacggaaaaaccgaaaacagcaaacagtatccaccgttgcagagacacgcctttgtaaaatggtggtcacaattcgatacttcaaaggctgctccagaacaagtcaagaactggttccagagcaatcctgagttcctcaaacctgctaatccgaagacatctttgtttctgaatcagaagtcacaactggcagcattcttagcaagctcaaaatctaaagagagtcttgctcagaatctcaaagaagttctccaactacttcaacaggaagtggaagaagaacccccgaagaaggaagtcgaatcatccgagactaatgatgaccaagaagatgatccattctaccagaatgaagatgactattttggtatatcgttagacgacgattaattagttttagtaatcatgaattattgtaactaatttgtcggtacctcttattaatgtaatttgtaaaatttttgtaacagttccggtaaacattaccgacactgtagaaacagtaaaaattgagtctatttaaaggagtcctcgttcccttt

SEQ ID NO: 9417 - DNA, 1131 bp, Glycine max; identical to SEQ ID NO: 9416
  Gm_smallRNAprecursor_2250

SEQ ID NO: 9418 - DNA, 1077 bp, Glycine max
  Gm_smallRNAprecursor_2251
caaagcaaccgccaaagtattccccccgggattccattacaggccaacagccacaaacaaaacccgcaaattctacgaattcattctaatagatacaaactcagtatctattaaacagttcaaagaccccaaagatctaaatctaaatacccattccagaatccaaatcttaaaggttatgcagccacgacattgtggctcaaaattaaaccaacccaaaaaattttctgcaccatttgaccctgcaagatataattattgggattacattgacgcctggaccaatatgttctggcatcaaaatagtaaattcaagcattcatggctaatttacttcaaaaataacactgtgtataattttccaaattggttcctccaatggtggaactacttcagaccaattccacagatattcccagaagaagtccaacagggattccaacaattcaacaagctctataatagcaaggaatcacgtattccggcagatttaaagtacttttccagttttgccttgtcatggattttttcaaggcaatacagatacggaaaaaccgaaaacagcaaacagtatccaccgttgcagagacacgcctttgtaaaatggtggtcacaattcgatacttcaaaggctgctccagaacaagtcaagaactggttccagagcaatcctgagttcctcaaacctgctaatccgaagacatctttgtttctgaatcagaagtcacaactggcagcattcttagcaagctcaaaatctaaagagagtcttgctcagaatctcaaagaagttctccaactacttcaacaggaagtggaagaagaacccccgaagaaggaagtcgaatcatccgagactaatgatgaccaagaagatgatccattctaccagaatgaagatgactattttggtatatcgttagacgacgattaattagttttagtaatcatgaattattgtaactaatttgtcggtacctcttattaatgtaatttgtaaaatttttgtaacagttccggtaaacattaccgacactgtagaaacagtaaaaattgagtctatttaaaggagtcctc

SEQ ID NO: 9419 - DNA, 1086 bp, Glycine max
  Gm_smallRNAprecursor_2252
caaagcaaccgccaaagtattccccccgggattccattacaggccaacagccacaaacaaaacccgcaaattctacgaattcattctaatagatacaaactcagtatctattaaacagttcaaagaccccaaagatctaaatctaaatacccattccagaatccaaatcttaaaggttatgcagccacgacattgtggctcaaaattaaaccaacccaaaaaattttctgcaccatttgaccctgcaagatataattattgggattacattgacgcctggaccaatatgttctggcatcaaaatagtaaattcaagcattcatggctaatttacttcaaaaataacactgtgtataattttccaaattggttcctccaatggtggaactacttcagaccaattccacagatattcccagaagaagtccaacagggattccaacaattcaacaagctctataatagcaaggaatcacgtattccggcagatttaaagtacttttccagttttgccttgtcatggattttttcaaggcaatacagatacggaaaaaccgaaaacagcaaacagtatccaccgttgcagagacacgcctttgtaaaatggtggtcacaattcgatacttcaaaggctgctccagaacaagtcaagaactggttccagagcaatcctgagttcctcaaacctgctaatccgaagacatctttgtttctgaatcagaagtcacaactggcagcattcttagcaagctcaaaatctaaagagagtcttgctcagaatctcaaagaagttctccaactacttcaacaggaagtggaagaagaacccccgaagaaggaagtcgaatcatccgagactaatgatgaccaagaagatgatccattctaccagaatgaagatgactattttggtatatcgttagacgacgattaattagttttagtaatcatgaattattgtaactaatttgtcggtacctcttattaatgtaatttgtaaaatttttgtaacagttccggtaaacattaccgacactgtagaaacagtaaaaattgagtctatttaaaggagtcctcgttcccttt

SEQ ID NO: 9420 - DNA, 1086 bp, Glycine max; identical to SEQ ID NO: 9419
  Gm_smallRNAprecursor_2253

SEQ ID NO: 9421 - DNA, 1137 bp, Glycine max
  Gm_smallRNAprecursor_2254
caaagcaaccgccaaagtattccccccgggattccattacaggccaacagccacaaacaaaacccgcaaattctacgaattcattctaatagatacaaactcagtatctattaaacagttcaaagaccccaaagatctaaatctaaatacccattccagaatccaaatcttaaaggttatgcagccacgacattgtggctcaaaattaaaccaacccaaaaaattttctgcaccatttgaccctgcaagatataattattgggattacattgacgcctggaccaatatgttctggcatcaaaatagtaaattcaagcattcatggctaatttacttcaaaaataacactgtgtataattttccaaattggttcctccaatggtggaactacttcagaccaattccacagatattcccagaagaagtccaacagggattccaacaattcaacaagctctataatagcaaggaatcacgtattccggcagatttaaagtacttttccagttttgccttgtcatggattttttcaaggcaatacagatacggaaaaaccgaaaacagcaaacagtatccaccgttgcagagacacgcctttgtaaaatggtggtcacaattcgatacttcaaaggctgctccagaacaagtcaagaactggttccagagcaatcctgagttcctcaaacctgctaatccgaagacatctttgtttctgaatcagaagtcacaactggcagcattcttagcaagctcaaaatctaaagagagtcttgctcagaatctcaaagaagttctccaactacttcaacaggaagtggaagaagaacccccgaagaaggaagtcgaatcatccgagactaatgatgaccaagaagatgatccattctaccagaatgaagatgactattttggtatatcgttagacgacgattaattagttttagtaatcatgaattattgtaactaatttgtcggtacctcttattaatgtaatttgtaaaatttttgtaacagttccggtaaacattaccgacactgtagaaacagtaaaaattgagtctatttaaaggagtcctcgttccctttgtgaggtaccctttcagatagtctcataaccaggttttagagagagaagct

SEQ ID NO: 9422 - DNA, 1076 bp, Glycine max
  Gm_smallRNAprecursor_2255
aaagcaaccgccaaagtattccccccgggattccattacaggccaacagccacaaacaaaacccgcaaattctacgaattcattctaatagatacaaactcagtatctattaaacagttcaaagaccccaaagatctaaatctaaatacccattccagaatccaaatcttaaaggttatgcagccacgacattgtggctcaaaattaaaccaacccaaaaaattttctgcaccatttgaccctgcaagatataattattgggattacattgacgcctggaccaatatgttctggcatcaaaatagtaaattcaagcattcatggctaatttacttcaaaaataacactgtgtataattttccaaattggttcctccaatggtggaactacttcagaccaattccacagatattcccagaagaagtccaacagggattccaacaattcaacaagctctataatagcaaggaatcacgtattccggcagatttaaagtacttttccagttttgccttgtcatggattttttcaaggcaatacagatacggaaaaaccgaaaacagcaaacagtatccaccgttgcagagacacgcctttgtaaaatggtggtcacaattcgatacttcaaaggctgctccagaacaagtcaagaactggttccagagcaatcctgagttcctcaaacctgctaatccgaagacatctttgtttctgaatcagaagtcacaactggcagcattcttagcaagctcaaaatctaaagagagtcttgctcagaatctcaaagaagttctccaactacttcaacaggaagtggaagaagaacccccgaagaaggaagtcgaatcatccgagactaatgatgaccaagaagatgatccattctaccagaatgaagatgactattttggtatatcgttagacgacgattaattagttttagtaatcatgaattattgtaactaatttgtcggtacctcttattaatgtaatttgtaaaatttttgtaacagttccggtaaacattaccgacactgtagaaacagtaaaaattgagtctatttaaaggagtcctc

SEQ ID NO: 9423 - DNA, 1085 bp, Glycine max
  Gm_smallRNAprecursor_2256
aaagcaaccgccaaagtattccccccgggattccattacaggccaacagccacaaacaaaacccgcaaattctacgaattcattctaatagatacaaactcagtatctattaaacagttcaaagaccccaaagatctaaatctaaatacccattccagaatccaaatcttaaaggttatgcagccacgacattgtggctcaaaattaaaccaacccaaaaaattttctgcaccatttgaccctgcaagatataattattgggattacattgacgcctggaccaatatgttctggcatcaaaatagtaaattcaagcattcatggctaatttacttcaaaaataacactgtgtataattttccaaattggttcctccaatggtggaactacttcagaccaattccacagatattcccagaagaagtccaacagggattccaacaattcaacaagctctataatagcaaggaatcacgtattccggcagatttaaagtacttttccagttttgccttgtcatggattttttcaaggcaatacagatacggaaaaaccgaaaacagcaaacagtatccaccgttgcagagacacgcctttgtaaaatggtggtcacaattcgatacttcaaaggctgctccagaacaagtcaagaactggttccagagcaatcctgagttcctcaaacctgctaatccgaagacatctttgtttctgaatcagaagtcacaactggcagcattcttagcaagctcaaaatctaaagagagtcttgctcagaatctcaaagaagttctccaactacttcaacaggaagtggaagaagaacccccgaagaaggaagtcgaatcatccgagactaatgatgaccaagaagatgatccattctaccagaatgaagatgactattttggtatatcgttagacgacgattaattagttttagtaatcatgaattattgtaactaatttgtcggtacctcttattaatgtaatttgtaaaatttttgtaacagttccggtaaacattaccgacactgtagaaacagtaaaaattgagtctatttaaaggagtcctcgttcccttt

SEQ ID NO: 9424 - DNA, 1085 bp, Glycine max; identical to SEQ ID NO: 9423
  Gm_smallRNAprecursor_2257

SEQ ID NO: 9425 - DNA, 1136 bp, Glycine max
  Gm_smallRNAprecursor_2258
aaagcaaccgccaaagtattccccccgggattccattacaggccaacagccacaaacaaaacccgcaaattctacgaattcattctaatagatacaaactcagtatctattaaacagttcaaagaccccaaagatctaaatctaaatacccattccagaatccaaatcttaaaggttatgcagccacgacattgtggctcaaaattaaaccaacccaaaaaattttctgcaccatttgaccctgcaagatataattattgggattacattgacgcctggaccaatatgttctggcatcaaaatagtaaattcaagcattcatggctaatttacttcaaaaataacactgtgtataattttccaaattggttcctccaatggtggaactacttcagaccaattccacagatattcccagaagaagtccaacagggattccaacaattcaacaagctctataatagcaaggaatcacgtattccggcagatttaaagtacttttccagttttgccttgtcatggattttttcaaggcaatacagatacggaaaaaccgaaaacagcaaacagtatccaccgttgcagagacacgcctttgtaaaatggtggtcacaattcgatacttcaaaggctgctccagaacaagtcaagaactggttccagagcaatcctgagttcctcaaacctgctaatccgaagacatctttgtttctgaatcagaagtcacaactggcagcattcttagcaagctcaaaatctaaagagagtcttgctcagaatctcaaagaagttctccaactacttcaacaggaagtggaagaagaacccccgaagaaggaagtcgaatcatccgagactaatgatgaccaagaagatgatccattctaccagaatgaagatgactattttggtatatcgttagacgacgattaattagttttagtaatcatgaattattgtaactaatttgtcggtacctcttattaatgtaatttgtaaaatttttgtaacagttccggtaaacattaccgacactgtagaaacagtaaaaattgagtctatttaaaggagtcctcgttccctttgtgaggtaccctttcagatagtctcataaccaggttttagagagagaagct

SEQ ID NO: 9426 - DNA, 1149 bp, Glycine max
  Gm_smallRNAprecursor_2259
agcaaccgccaaagtattccccccgggattccattacaggccaacagccacaaacaaaacccgcaaattctacgaattcattctaatagatacaaactcagtatctattaaacagttcaaagaccccaaagatctaaatctaaatacccattccagaatccaaatcttaaaggttatgcagccacgacattgtggctcaaaattaaaccaacccaaaaaattttctgcaccatttgaccctgcaagatataattattgggattacattgacgcctggaccaatatgttctggcatcaaaatagtaaattcaagcattcatggctaatttacttcaaaaataacactgtgtataattttccaaattggttcctccaatggtggaactacttcagaccaattccacagatattcccagaagaagtccaacagggattccaacaattcaacaagctctataatagcaaggaatcacgtattccggcagatttaaagtacttttccagttttgccttgtcatggattttttcaaggcaatacagatacggaaaaaccgaaaacagcaaacagtatccaccgttgcagagacacgcctttgtaaaatggtggtcacaattcgatacttcaaaggctgctccagaacaagtcaagaactggttccagagcaatcctgagttcctcaaacctgctaatccgaagacatctttgtttctgaatcagaagtcacaactggcagcattcttagcaagctcaaaatctaaagagagtcttgctcagaatctcaaagaagttctccaactacttcaacaggaagtggaagaagaacccccgaagaaggaagtcgaatcatccgagactaatgatgaccaagaagatgatccattctaccagaatgaagatgactattttggtatatcgttagacgacgattaattagttttagtaatcatgaattattgtaactaatttgtcggtacctcttattaatgtaatttgtaaaatttttgtaacagttccggtaaacattaccgacactgtagaaacagtaaaaattgagtctatttaaaggagtcctcgttccctttgtgaggtaccctttcagatagtctcataaccaggttttagagagagaagctctgcctagggaaaaa

SEQ ID NO: 9427 - DNA, 1050 bp, Glycine max
  Gm_smallRNAprecursor_2260
gggattccattacaggccaacagccacaaacaaaacccgcaaattctacgaattcattctaatagatacaaactcagtatctattaaacagttcaaagaccccaaagatctaaatctaaatacccattccagaatccaaatcttaaaggttatgcagccacgacattgtggctcaaaattaaaccaacccaaaaaattttctgcaccatttgaccctgcaagatataattattgggattacattgacgcctggaccaatatgttctggcatcaaaatagtaaattcaagcattcatggctaatttacttcaaaaataacactgtgtataattttccaaattggttcctccaatggtggaactacttcagaccaattccacagatattcccagaagaagtccaacagggattccaacaattcaacaagctctataatagcaaggaatcacgtattccggcagatttaaagtacttttccagttttgccttgtcatggattttttcaaggcaatacagatacggaaaaaccgaaaacagcaaacagtatccaccgttgcagagacacgcctttgtaaaatggtggtcacaattcgatacttcaaaggctgctccagaacaagtcaagaactggttccagagcaatcctgagttcctcaaacctgctaatccgaagacatctttgtttctgaatcagaagtcacaactggcagcattcttagcaagctcaaaatctaaagagagtcttgctcagaatctcaaagaagttctccaactacttcaacaggaagtggaagaagaacccccgaagaaggaagtcgaatcatccgagactaatgatgaccaagaagatgatccattctaccagaatgaagatgactattttggtatatcgttagacgacgattaattagttttagtaatcatgaattattgtaactaatttgtcggtacctcttattaatgtaatttgtaaaatttttgtaacagttccggtaaacattaccgacactgtagaaacagtaaaaattgagtctatttaaaggagtcctc

SEQ ID NO: 9428 - DNA, 1050 bp, Glycine max; identical to SEQ ID NO: 9427
  Gm_smallRNAprecursor_2261

SEQ ID NO: 9429 - DNA, 1053 bp, Glycine max
  Gm_smallRNAprecursor_2262
acgaattcattctaatagatacaaactcagtatctattaaacagttcaaagaccccaaagatctaaatctaaatacccattccagaatccaaatcttaaaggttatgcagccacgacattgtggctcaaaattaaaccaacccaaaaaattttctgcaccatttgaccctgcaagatataattattgggattacattgacgcctggaccaatatgttctggcatcaaaatagtaaattcaagcattcatggctaatttacttcaaaaataacactgtgtataattttccaaattggttcctccaatggtggaactacttcagaccaattccacagatattcccagaagaagtccaacagggattccaacaattcaacaagctctataatagcaaggaatcacgtattccggcagatttaaagtacttttccagttttgccttgtcatggattttttcaaggcaatacagatacggaaaaaccgaaaacagcaaacagtatccaccgttgcagagacacgcctttgtaaaatggtggtcacaattcgatacttcaaaggctgctccagaacaagtcaagaactggttccagagcaatcctgagttcctcaaacctgctaatccgaagacatctttgtttctgaatcagaagtcacaactggcagcattcttagcaagctcaaaatctaaagagagtcttgctcagaatctcaaagaagttctccaactacttcaacaggaagtggaagaagaacccccgaagaaggaagtcgaatcatccgagactaatgatgaccaagaagatgatccattctaccagaatgaagatgactattttggtatatcgttagacgacgattaattagttttagtaatcatgaattattgtaactaatttgtcggtacctcttattaatgtaatttgtaaaatttttgtaacagttccggtaaacattaccgacactgtagaaacagtaaaaattgagtctatttaaaggagtcctcgttccctttgtgaggtaccctttcagatagtctcataaccaggttttaga

SEQ ID NO: 9430 - DNA, 1054 bp, Glycine max
  Gm_smallRNAprecursor_2263
acgaattcattctaatagatacaaactcagtatctattaaacagttcaaagaccccaaagatctaaatctaaatacccattccagaatccaaatcttaaaggttatgcagccacgacattgtggctcaaaattaaaccaacccaaaaaattttctgcaccatttgaccctgcaagatataattattgggattacattgacgcctggaccaatatgttctggcatcaaaatagtaaattcaagcattcatggctaatttacttcaaaaataacactgtgtataattttccaaattggttcctccaatggtggaactacttcagaccaattccacagatattcccagaagaagtccaacagggattccaacaattcaacaagctctataatagcaaggaatcacgtattccggcagatttaaagtacttttccagttttgccttgtcatggattttttcaaggcaatacagatacggaaaaaccgaaaacagcaaacagtatccaccgttgcagagacacgcctttgtaaaatggtggtcacaattcgatacttcaaaggctgctccagaacaagtcaagaactggttccagagcaatcctgagttcctcaaacctgctaatccgaagacatctttgtttctgaatcagaagtcacaactggcagcattcttagcaagctcaaaatctaaagagagtcttgctcagaatctcaaagaagttctccaactacttcaacaggaagtggaagaagaacccccgaagaaggaagtcgaatcatccgagactaatgatgaccaagaagatgatccattctaccagaatgaagatgactattttggtatatcgttagacgacgattaattagttttagtaatcatgaattattgtaactaatttgtcggtacctcttattaatgtaatttgtaaaatttttgtaacagttccggtaaacattaccgacactgtagaaacagtaaaaattgagtctatttaaaggagtcctcgttccctttgtgaggtaccctttcagatagtctcataaccaggttttagag

SEQ ID NO: 9431 - DNA, 1063 bp, Glycine max
  Gm_smallRNAprecursor_2264
acgaattcattctaatagatacaaactcagtatctattaaacagttcaaagaccccaaagatctaaatctaaatacccattccagaatccaaatcttaaaggttatgcagccacgacattgtggctcaaaattaaaccaacccaaaaaattttctgcaccatttgaccctgcaagatataattattgggattacattgacgcctggaccaatatgttctggcatcaaaatagtaaattcaagcattcatggctaatttacttcaaaaataacactgtgtataattttccaaattggttcctccaatggtggaactacttcagaccaattccacagatattcccagaagaagtccaacagggattccaacaattcaacaagctctataatagcaaggaatcacgtattccggcagatttaaagtacttttccagttttgccttgtcatggattttttcaaggcaatacagatacggaaaaaccgaaaacagcaaacagtatccaccgttgcagagacacgcctttgtaaaatggtggtcacaattcgatacttcaaaggctgctccagaacaagtcaagaactggttccagagcaatcctgagttcctcaaacctgctaatccgaagacatctttgtttctgaatcagaagtcacaactggcagcattcttagcaagctcaaaatctaaagagagtcttgctcagaatctcaaagaagttctccaactacttcaacaggaagtggaagaagaacccccgaagaaggaagtcgaatcatccgagactaatgatgaccaagaagatgatccattctaccagaatgaagatgactattttggtatatcgttagacgacgattaattagttttagtaatcatgaattattgtaactaatttgtcggtacctcttattaatgtaatttgtaaaatttttgtaacagttccggtaaacattaccgacactgtagaaacagtaaaaattgagtctatttaaaggagtcctcgttccctttgtgaggtaccctttcagatagtctcataaccaggttttagagagagaagct

SEQ ID NO: 9432 - DNA, 1045 bp, Glycine max
  Gm_smallRNAprecursor_2265
gaattcattctaatagatacaaactcagtatctattaaacagttcaaagaccccaaagatctaaatctaaatacccattccagaatccaaatcttaaaggttatgcagccacgacattgtggctcaaaattaaaccaacccaaaaaattttctgcaccatttgaccctgcaagatataattattgggattacattgacgcctggaccaatatgttctggcatcaaaatagtaaattcaagcattcatggctaatttacttcaaaaataacactgtgtataattttccaaattggttcctccaatggtggaactacttcagaccaattccacagatattcccagaagaagtccaacagggattccaacaattcaacaagctctataatagcaaggaatcacgtattccggcagatttaaagtacttttccagttttgccttgtcatggattttttcaaggcaatacagatacggaaaaaccgaaaacagcaaacagtatccaccgttgcagagacacgcctttgtaaaatggtggtcacaattcgatacttcaaaggctgctccagaacaagtcaagaactggttccagagcaatcctgagttcctcaaacctgctaatccgaagacatctttgtttctgaatcagaagtcacaactggcagcattcttagcaagctcaaaatctaaagagagtcttgctcagaatctcaaagaagttctccaactacttcaacaggaagtggaagaagaacccccgaagaaggaagtcgaatcatccgagactaatgatgaccaagaagatgatccattctaccagaatgaagatgactattttggtatatcgttagacgacgattaattagttttagtaatcatgaattattgtaactaatttgtcggtacctcttattaatgtaatttgtaaaatttttgtaacagttccggtaaacattaccgacactgtagaaacagtaaaaattgagtctatttaaaggagtcctcgttccctttgtgaggtaccctttcagatagtctcataaccaggt

SEQ ID NO: 9433 - DNA, 1051 bp, Glycine max
  Gm_smallRNAprecursor_2266
gaattcattctaatagatacaaactcagtatctattaaacagttcaaagaccccaaagatctaaatctaaatacccattccagaatccaaatcttaaaggttatgcagccacgacattgtggctcaaaattaaaccaacccaaaaaattttctgcaccatttgaccctgcaagatataattattgggattacattgacgcctggaccaatatgttctggcatcaaaatagtaaattcaagcattcatggctaatttacttcaaaaataacactgtgtataattttccaaattggttcctccaatggtggaactacttcagaccaattccacagatattcccagaagaagtccaacagggattccaacaattcaacaagctctataatagcaaggaatcacgtattccggcagatttaaagtacttttccagttttgccttgtcatggattttttcaaggcaatacagatacggaaaaaccgaaaacagcaaacagtatccaccgttgcagagacacgcctttgtaaaatggtggtcacaattcgatacttcaaaggctgctccagaacaagtcaagaactggttccagagcaatcctgagttcctcaaacctgctaatccgaagacatctttgtttctgaatcagaagtcacaactggcagcattcttagcaagctcaaaatctaaagagagtcttgctcagaatctcaaagaagttctccaactacttcaacaggaagtggaagaagaacccccgaagaaggaagtcgaatcatccgagactaatgatgaccaagaagatgatccattctaccagaatgaagatgactattttggtatatcgttagacgacgattaattagttttagtaatcatgaattattgtaactaatttgtcggtacctcttattaatgtaatttgtaaaatttttgtaacagttccggtaaacattaccgacactgtagaaacagtaaaaattgagtctatttaaaggagtcctcgttccctttgtgaggtaccctttcagatagtctcataaccaggttttaga

SEQ ID NO: 9434 - DNA, 1204 bp, Glycine max
  Gm_smallRNAprecursor_2267
gaattcattctaatagatacaaactcagtatctattaaacagttcaaagaccccaaagatctaaatctaaatacccattccagaatccaaatcttaaaggttatgcagccacgacattgtggctcaaaattaaaccaacccaaaaaattttctgcaccatttgaccctgcaagatataattattgggattacattgacgcctggaccaatatgttctggcatcaaaatagtaaattcaagcattcatggctaatttacttcaaaaataacactgtgtataattttccaaattggttcctccaatggtggaactacttcagaccaattccacagatattcccagaagaagtccaacagggattccaacaattcaacaagctctataatagcaaggaatcacgtattccggcagatttaaagtacttttccagttttgccttgtcatggattttttcaaggcaatacagatacggaaaaaccgaaaacagcaaacagtatccaccgttgcagagacacgcctttgtaaaatggtggtcacaattcgatacttcaaaggctgctccagaacaagtcaagaactggttccagagcaatcctgagttcctcaaacctgctaatccgaagacatctttgtttctgaatcagaagtcacaactggcagcattcttagcaagctcaaaatctaaagagagtcttgctcagaatctcaaagaagttctccaactacttcaacaggaagtggaagaagaacccccgaagaaggaagtcgaatcatccgagactaatgatgaccaagaagatgatccattctaccagaatgaagatgactattttggtatatcgttagacgacgattaattagttttagtaatcatgaattattgtaactaatttgtcggtacctcttattaatgtaatttgtaaaatttttgtaacagttccggtaaacattaccgacactgtagaaacagtaaaaattgagtctatttaaaggagtcctcgttccctttgtgaggtaccctttcagatagtctcataaccaggttttagagagagaagctctgcctagggaaaaactctttgtaagcttctatgcccatatcaattaagagcttgatgggtacttgtacacaaccgatgtttagatatttatacttacggctatgttcataaattgaattttttgaaagtaaatgaaattctt

SEQ ID NO: 9435 - DNA, 1165 bp, Glycine max
  Gm_smallRNAprecursor_2268
ctaatagatacaaactcagtatctattaaacagttcaaagaccccaaagatctaaatctaaatacccattccagaatccaaatcttaaaggttatgcagccacgacattgtggctcaaaattaaaccaacccaaaaaattttctgcaccatttgaccctgcaagatataattattgggattacattgacgcctggaccaatatgttctggcatcaaaatagtaaattcaagcattcatggctaatttacttcaaaaataacactgtgtataattttccaaattggttcctccaatggtggaactacttcagaccaattccacagatattcccagaagaagtccaacagggattccaacaattcaacaagctctataatagcaaggaatcacgtattccggcagatttaaagtacttttccagttttgccttgtcatggattttttcaaggcaatacagatacggaaaaaccgaaaacagcaaacagtatccaccgttgcagagacacgcctttgtaaaatggtggtcacaattcgatacttcaaaggctgctccagaacaagtcaagaactggttccagagcaatcctgagttcctcaaacctgctaatccgaagacatctttgtttctgaatcagaagtcacaactggcagcattcttagcaagctcaaaatctaaagagagtcttgctcagaatctcaaagaagttctccaactacttcaacaggaagtggaagaagaacccccgaagaaggaagtcgaatcatccgagactaatgatgaccaagaagatgatccattctaccagaatgaagatgactattttggtatatcgttagacgacgattaattagttttagtaatcatgaattattgtaactaatttgtcggtacctcttattaatgtaatttgtaaaatttttgtaacagttccggtaaacattaccgacactgtagaaacagtaaaaattgagtctatttaaaggagtcctcgttccctttgtgaggtaccctttcagatagtctcataaccaggttttagagagagaagctctgcctagggaaaaactctttgtaagcttctatgcccatatcaattaagagcttgatgggtacttgtacacaaccgatgtttagatatttatacttacggctatgttcataaa

SEQ ID NO: 9436 - DNA, 1157 bp, Glycine max
  Gm_smallRNAprecursor_2269
gatctaaatctaaatacccattccagaatccaaatcttaaaggttatgcagccacgacattgtggctcaaaattaaaccaacccaaaaaattttctgcaccatttgaccctgcaagatataattattgggattacattgacgcctggaccaatatgttctggcatcaaaatagtaaattcaagcattcatggctaatttacttcaaaaataacactgtgtataattttccaaattggttcctccaatggtggaactacttcagaccaattccacagatattcccagaagaagtccaacagggattccaacaattcaacaagctctataatagcaaggaatcacgtattccggcagatttaaagtacttttccagttttgccttgtcatggattttttcaaggcaatacagatacggaaaaaccgaaaacagcaaacagtatccaccgttgcagagacacgcctttgtaaaatggtggtcacaattcgatacttcaaaggctgctccagaacaagtcaagaactggttccagagcaatcctgagttcctcaaacctgctaatccgaagacatctttgtttctgaatcagaagtcacaactggcagcattcttagcaagctcaaaatctaaagagagtcttgctcagaatctcaaagaagttctccaactacttcaacaggaagtggaagaagaacccccgaagaaggaagtcgaatcatccgagactaatgatgaccaagaagatgatccattctaccagaatgaagatgactattttggtatatcgttagacgacgattaattagttttagtaatcatgaattattgtaactaatttgtcggtacctcttattaatgtaatttgtaaaatttttgtaacagttccggtaaacattaccgacactgtagaaacagtaaaaattgagtctatttaaaggagtcctcgttccctttgtgaggtaccctttcagatagtctcataaccaggttttagagagagaagctctgcctagggaaaaactctttgtaagcttctatgcccatatcaattaagagcttgatgggtacttgtacacaaccgatgtttagatatttatacttacggctatgttcataaattgaattttttgaaagtaaatgaaattcttcccctatatc

SEQ ID NO: 9437 - DNA, 1086 bp, Glycine max
  Gm_smallRNAprecursor_2270
taaatacccattccagaatccaaatcttaaaggttatgcagccacgacattgtggctcaaaattaaaccaacccaaaaaattttctgcaccatttgaccctgcaagatataattattgggattacattgacgcctggaccaatatgttctggcatcaaaatagtaaattcaagcattcatggctaatttacttcaaaaataacactgtgtataattttccaaattggttcctccaatggtggaactacttcagaccaattccacagatattcccagaagaagtccaacagggattccaacaattcaacaagctctataatagcaaggaatcacgtattccggcagatttaaagtacttttccagttttgccttgtcatggattttttcaaggcaatacagatacggaaaaaccgaaaacagcaaacagtatccaccgttgcagagacacgcctttgtaaaatggtggtcacaattcgatacttcaaaggctgctccagaacaagtcaagaactggttccagagcaatcctgagttcctcaaacctgctaatccgaagacatctttgtttctgaatcagaagtcacaactggcagcattcttagcaagctcaaaatctaaagagagtcttgctcagaatctcaaagaagttctccaactacttcaacaggaagtggaagaagaacccccgaagaaggaagtcgaatcatccgagactaatgatgaccaagaagatgatccattctaccagaatgaagatgactattttggtatatcgttagacgacgattaattagttttagtaatcatgaattattgtaactaatttgtcggtacctcttattaatgtaatttgtaaaatttttgtaacagttccggtaaacattaccgacactgtagaaacagtaaaaattgagtctatttaaaggagtcctcgttccctttgtgaggtaccctttcagatagtctcataaccaggttttagagagagaagctctgcctagggaaaaactctttgtaagcttctatgcccatatcaattaagagcttgatgggtacttgtacacaaccgatgtttagatatttat

SEQ ID NO: 9438 - DNA, 1137 bp, Glycine max
  Gm_smallRNAprecursor_2271
taaatacccattccagaatccaaatcttaaaggttatgcagccacgacattgtggctcaaaattaaaccaacccaaaaaattttctgcaccatttgaccctgcaagatataattattgggattacattgacgcctggaccaatatgttctggcatcaaaatagtaaattcaagcattcatggctaatttacttcaaaaataacactgtgtataattttccaaattggttcctccaatggtggaactacttcagaccaattccacagatattcccagaagaagtccaacagggattccaacaattcaacaagctctataatagcaaggaatcacgtattccggcagatttaaagtacttttccagttttgccttgtcatggattttttcaaggcaatacagatacggaaaaaccgaaaacagcaaacagtatccaccgttgcagagacacgcctttgtaaaatggtggtcacaattcgatacttcaaaggctgctccagaacaagtcaagaactggttccagagcaatcctgagttcctcaaacctgctaatccgaagacatctttgtttctgaatcagaagtcacaactggcagcattcttagcaagctcaaaatctaaagagagtcttgctcagaatctcaaagaagttctccaactacttcaacaggaagtggaagaagaacccccgaagaaggaagtcgaatcatccgagactaatgatgaccaagaagatgatccattctaccagaatgaagatgactattttggtatatcgttagacgacgattaattagttttagtaatcatgaattattgtaactaatttgtcggtacctcttattaatgtaatttgtaaaatttttgtaacagttccggtaaacattaccgacactgtagaaacagtaaaaattgagtctatttaaaggagtcctcgttccctttgtgaggtaccctttcagatagtctcataaccaggttttagagagagaagctctgcctagggaaaaactctttgtaagcttctatgcccatatcaattaagagcttgatgggtacttgtacacaaccgatgtttagatatttatacttacggctatgttcataaattgaattttttgaaagtaaatgaaattctt

SEQ ID NO: 9439 - DNA, 1121 bp, Glycine max
  Gm_smallRNAprecursor_2272
cattccagaatccaaatcttaaaggttatgcagccacgacattgtggctcaaaattaaaccaacccaaaaaattttctgcaccatttgaccctgcaagatataattattgggattacattgacgcctggaccaatatgttctggcatcaaaatagtaaattcaagcattcatggctaatttacttcaaaaataacactgtgtataattttccaaattggttcctccaatggtggaactacttcagaccaattccacagatattcccagaagaagtccaacagggattccaacaattcaacaagctctataatagcaaggaatcacgtattccggcagatttaaagtacttttccagttttgccttgtcatggattttttcaaggcaatacagatacggaaaaaccgaaaacagcaaacagtatccaccgttgcagagacacgcctttgtaaaatggtggtcacaattcgatacttcaaaggctgctccagaacaagtcaagaactggttccagagcaatcctgagttcctcaaacctgctaatccgaagacatctttgtttctgaatcagaagtcacaactggcagcattcttagcaagctcaaaatctaaagagagtcttgctcagaatctcaaagaagttctccaactacttcaacaggaagtggaagaagaacccccgaagaaggaagtcgaatcatccgagactaatgatgaccaagaagatgatccattctaccagaatgaagatgactattttggtatatcgttagacgacgattaattagttttagtaatcatgaattattgtaactaatttgtcggtacctcttattaatgtaatttgtaaaatttttgtaacagttccggtaaacattaccgacactgtagaaacagtaaaaattgagtctatttaaaggagtcctcgttccctttgtgaggtaccctttcagatagtctcataaccaggttttagagagagaagctctgcctagggaaaaactctttgtaagcttctatgcccatatcaattaagagcttgatgggtacttgtacacaaccgatgtttagatatttatacttacggctatgttcataaattgaattttttgaaagtaaatg

SEQ ID NO: 9440 - DNA, 1080 bp, Glycine max
  Gm_smallRNAprecursor_2273
attccagaatccaaatcttaaaggttatgcagccacgacattgtggctcaaaattaaaccaacccaaaaaattttctgcaccatttgaccctgcaagatataattattgggattacattgacgcctggaccaatatgttctggcatcaaaatagtaaattcaagcattcatggctaatttacttcaaaaataacactgtgtataattttccaaattggttcctccaatggtggaactacttcagaccaattccacagatattcccagaagaagtccaacagggattccaacaattcaacaagctctataatagcaaggaatcacgtattccggcagatttaaagtacttttccagttttgccttgtcatggattttttcaaggcaatacagatacggaaaaaccgaaaacagcaaacagtatccaccgttgcagagacacgcctttgtaaaatggtggtcacaattcgatacttcaaaggctgctccagaacaagtcaagaactggttccagagcaatcctgagttcctcaaacctgctaatccgaagacatctttgtttctgaatcagaagtcacaactggcagcattcttagcaagctcaaaatctaaagagagtcttgctcagaatctcaaagaagttctccaactacttcaacaggaagtggaagaagaacccccgaagaaggaagtcgaatcatccgagactaatgatgaccaagaagatgatccattctaccagaatgaagatgactattttggtatatcgttagacgacgattaattagttttagtaatcatgaattattgtaactaatttgtcggtacctcttattaatgtaatttgtaaaatttttgtaacagttccggtaaacattaccgacactgtagaaacagtaaaaattgagtctatttaaaggagtcctcgttccctttgtgaggtaccctttcagatagtctcataaccaggttttagagagagaagctctgcctagggaaaaactctttgtaagcttctatgcccatatcaattaagagcttgatgggtacttgtacacaaccgatgtttagatatttatact

SEQ ID NO: 9441 - DNA, 1098 bp, Glycine max
  Gm_smallRNAprecursor_2274
attccagaatccaaatcttaaaggttatgcagccacgacattgtggctcaaaattaaaccaacccaaaaaattttctgcaccatttgaccctgcaagatataattattgggattacattgacgcctggaccaatatgttctggcatcaaaatagtaaattcaagcattcatggctaatttacttcaaaaataacactgtgtataattttccaaattggttcctccaatggtggaactacttcagaccaattccacagatattcccagaagaagtccaacagggattccaacaattcaacaagctctataatagcaaggaatcacgtattccggcagatttaaagtacttttccagttttgccttgtcatggattttttcaaggcaatacagatacggaaaaaccgaaaacagcaaacagtatccaccgttgcagagacacgcctttgtaaaatggtggtcacaattcgatacttcaaaggctgctccagaacaagtcaagaactggttccagagcaatcctgagttcctcaaacctgctaatccgaagacatctttgtttctgaatcagaagtcacaactggcagcattcttagcaagctcaaaatctaaagagagtcttgctcagaatctcaaagaagttctccaactacttcaacaggaagtggaagaagaacccccgaagaaggaagtcgaatcatccgagactaatgatgaccaagaagatgatccattctaccagaatgaagatgactattttggtatatcgttagacgacgattaattagttttagtaatcatgaattattgtaactaatttgtcggtacctcttattaatgtaatttgtaaaatttttgtaacagttccggtaaacattaccgacactgtagaaacagtaaaaattgagtctatttaaaggagtcctcgttccctttgtgaggtaccctttcagatagtctcataaccaggttttagagagagaagctctgcctagggaaaaactctttgtaagcttctatgcccatatcaattaagagcttgatgggtacttgtacacaaccgatgtttagatatttatacttacggctatgttcataaa

SEQ ID NO: 9442 - DNA, 1120 bp, Glycine max
  Gm_smallRNAprecursor_2275
attccagaatccaaatcttaaaggttatgcagccacgacattgtggctcaaaattaaaccaacccaaaaaattttctgcaccatttgaccctgcaagatataattattgggattacattgacgcctggaccaatatgttctggcatcaaaatagtaaattcaagcattcatggctaatttacttcaaaaataacactgtgtataattttccaaattggttcctccaatggtggaactacttcagaccaattccacagatattcccagaagaagtccaacagggattccaacaattcaacaagctctataatagcaaggaatcacgtattccggcagatttaaagtacttttccagttttgccttgtcatggattttttcaaggcaatacagatacggaaaaaccgaaaacagcaaacagtatccaccgttgcagagacacgcctttgtaaaatggtggtcacaattcgatacttcaaaggctgctccagaacaagtcaagaactggttccagagcaatcctgagttcctcaaacctgctaatccgaagacatctttgtttctgaatcagaagtcacaactggcagcattcttagcaagctcaaaatctaaagagagtcttgctcagaatctcaaagaagttctccaactacttcaacaggaagtggaagaagaacccccgaagaaggaagtcgaatcatccgagactaatgatgaccaagaagatgatccattctaccagaatgaagatgactattttggtatatcgttagacgacgattaattagttttagtaatcatgaattattgtaactaatttgtcggtacctcttattaatgtaatttgtaaaatttttgtaacagttccggtaaacattaccgacactgtagaaacagtaaaaattgagtctatttaaaggagtcctcgttccctttgtgaggtaccctttcagatagtctcataaccaggttttagagagagaagctctgcctagggaaaaactctttgtaagcttctatgcccatatcaattaagagcttgatgggtacttgtacacaaccgatgtttagatatttatacttacggctatgttcataaattgaattttttgaaagtaaatg

SEQ ID NO: 9443 - DNA, 1041 bp, Glycine max
  Gm_smallRNAprecursor_2276
tgcaccatttgaccctgcaagatataattattgggattacattgacgcctggaccaatatgttctggcatcaaaatagtaaattcaagcattcatggctaatttacttcaaaaataacactgtgtataattttccaaattggttcctccaatggtggaactacttcagaccaattccacagatattcccagaagaagtccaacagggattccaacaattcaacaagctctataatagcaaggaatcacgtattccggcagatttaaagtacttttccagttttgccttgtcatggattttttcaaggcaatacagatacggaaaaaccgaaaacagcaaacagtatccaccgttgcagagacacgcctttgtaaaatggtggtcacaattcgatacttcaaaggctgctccagaacaagtcaagaactggttccagagcaatcctgagttcctcaaacctgctaatccgaagacatctttgtttctgaatcagaagtcacaactggcagcattcttagcaagctcaaaatctaaagagagtcttgctcagaatctcaaagaagttctccaactacttcaacaggaagtggaagaagaacccccgaagaaggaagtcgaatcatccgagactaatgatgaccaagaagatgatccattctaccagaatgaagatgactattttggtatatcgttagacgacgattaattagttttagtaatcatgaattattgtaactaatttgtcggtacctcttattaatgtaatttgtaaaatttttgtaacagttccggtaaacattaccgacactgtagaaacagtaaaaattgagtctatttaaaggagtcctcgttccctttgtgaggtaccctttcagatagtctcataaccaggttttagagagagaagctctgcctagggaaaaactctttgtaagcttctatgcccatatcaattaagagcttgatgggtacttgtacacaaccgatgtttagatatttatacttacggctatgttcataaattgaattttttgaaagtaa

SEQ ID NO: 9444 - DNA, 1183 bp, Glycine max
  Gm_smallRNAprecursor_2277
atataattattgggattacattgacgcctggaccaatatgttctggcatcaaaatagtaaattcaagcattcatggctaatttacttcaaaaataacactgtgtataattttccaaattggttcctccaatggtggaactacttcagaccaattccacagatattcccagaagaagtccaacagggattccaacaattcaacaagctctataatagcaaggaatcacgtattccggcagatttaaagtacttttccagttttgccttgtcatggattttttcaaggcaatacagatacggaaaaaccgaaaacagcaaacagtatccaccgttgcagagacacgcctttgtaaaatggtggtcacaattcgatacttcaaaggctgctccagaacaagtcaagaactggttccagagcaatcctgagttcctcaaacctgctaatccgaagacatctttgtttctgaatcagaagtcacaactggcagcattcttagcaagctcaaaatctaaagagagtcttgctcagaatctcaaagaagttctccaactacttcaacaggaagtggaagaagaacccccgaagaaggaagtcgaatcatccgagactaatgatgaccaagaagatgatccattctaccagaatgaagatgactattttggtatatcgttagacgacgattaattagttttagtaatcatgaattattgtaactaatttgtcggtacctcttattaatgtaatttgtaaaatttttgtaacagttccggtaaacattaccgacactgtagaaacagtaaaaattgagtctatttaaaggagtcctcgttccctttgtgaggtaccctttcagatagtctcataaccaggttttagagagagaagctctgcctagggaaaaactctttgtaagcttctatgcccatatcaattaagagcttgatgggtacttgtacacaaccgatgtttagatatttatacttacggctatgttcataaattgaattttttgaaagtaaatgaaattcttcccctatatcttgtcctagaggaatattgttttctactgttttgattatgtaatcaaagttgtgtttgtcctttattgtttcaggaacgtatagttgatcctgagggatttctggaatgttccagtcatccatgttttgattgatatattcg

SEQ ID NO: 9445 - DNA, 1153 bp, Glycine max
  Gm_smallRNAprecursor_2278
gaccaatatgttctggcatcaaaatagtaaattcaagcattcatggctaatttacttcaaaaataacactgtgtataattttccaaattggttcctccaatggtggaactacttcagaccaattccacagatattcccagaagaagtccaacagggattccaacaattcaacaagctctataatagcaaggaatcacgtattccggcagatttaaagtacttttccagttttgccttgtcatggattttttcaaggcaatacagatacggaaaaaccgaaaacagcaaacagtatccaccgttgcagagacacgcctttgtaaaatggtggtcacaattcgatacttcaaaggctgctccagaacaagtcaagaactggttccagagcaatcctgagttcctcaaacctgctaatccgaagacatctttgtttctgaatcagaagtcacaactggcagcattcttagcaagctcaaaatctaaagagagtcttgctcagaatctcaaagaagttctccaactacttcaacaggaagtggaagaagaacccccgaagaaggaagtcgaatcatccgagactaatgatgaccaagaagatgatccattctaccagaatgaagatgactattttggtatatcgttagacgacgattaattagttttagtaatcatgaattattgtaactaatttgtcggtacctcttattaatgtaatttgtaaaatttttgtaacagttccggtaaacattaccgacactgtagaaacagtaaaaattgagtctatttaaaggagtcctcgttccctttgtgaggtaccctttcagatagtctcataaccaggttttagagagagaagctctgcctagggaaaaactctttgtaagcttctatgcccatatcaattaagagcttgatgggtacttgtacacaaccgatgtttagatatttatacttacggctatgttcataaattgaattttttgaaagtaaatgaaattcttcccctatatcttgtcctagaggaatattgttttctactgttttgattatgtaatcaaagttgtgtttgtcctttattgtttcaggaacgtatagttgatcctgagggatttctggaatgttccagtcatccatgttttgattgatatattcg

SEQ ID NO: 9446 - DNA, 1172 bp, Glycine max
  Gm_smallRNAprecursor_2279
gaccaatatgttctggcatcaaaatagtaaattcaagcattcatggctaatttacttcaaaaataacactgtgtataattttccaaattggttcctccaatggtggaactacttcagaccaattccacagatattcccagaagaagtccaacagggattccaacaattcaacaagctctataatagcaaggaatcacgtattccggcagatttaaagtacttttccagttttgccttgtcatggattttttcaaggcaatacagatacggaaaaaccgaaaacagcaaacagtatccaccgttgcagagacacgcctttgtaaaatggtggtcacaattcgatacttcaaaggctgctccagaacaagtcaagaactggttccagagcaatcctgagttcctcaaacctgctaatccgaagacatctttgtttctgaatcagaagtcacaactggcagcattcttagcaagctcaaaatctaaagagagtcttgctcagaatctcaaagaagttctccaactacttcaacaggaagtggaagaagaacccccgaagaaggaagtcgaatcatccgagactaatgatgaccaagaagatgatccattctaccagaatgaagatgactattttggtatatcgttagacgacgattaattagttttagtaatcatgaattattgtaactaatttgtcggtacctcttattaatgtaatttgtaaaatttttgtaacagttccggtaaacattaccgacactgtagaaacagtaaaaattgagtctatttaaaggagtcctcgttccctttgtgaggtaccctttcagatagtctcataaccaggttttagagagagaagctctgcctagggaaaaactctttgtaagcttctatgcccatatcaattaagagcttgatgggtacttgtacacaaccgatgtttagatatttatacttacggctatgttcataaattgaattttttgaaagtaaatgaaattcttcccctatatcttgtcctagaggaatattgttttctactgttttgattatgtaatcaaagttgtgtttgtcctttattgtttcaggaacgtatagttgatcctgagggatttctggaatgttccagtcatccatgttttgattgatatattcgaatcggacttcctcatcga

SEQ ID NO: 9447 - DNA, 1106 bp, Glycine max
  Gm_smallRNAprecursor_2280
cactgtgtataattttccaaattggttcctccaatggtggaactacttcagaccaattccacagatattcccagaagaagtccaacagggattccaacaattcaacaagctctataatagcaaggaatcacgtattccggcagatttaaagtacttttccagttttgccttgtcatggattttttcaaggcaatacagatacggaaaaaccgaaaacagcaaacagtatccaccgttgcagagacacgcctttgtaaaatggtggtcacaattcgatacttcaaaggctgctccagaacaagtcaagaactggttccagagcaatcctgagttcctcaaacctgctaatccgaagacatctttgtttctgaatcagaagtcacaactggcagcattcttagcaagctcaaaatctaaagagagtcttgctcagaatctcaaagaagttctccaactacttcaacaggaagtggaagaagaacccccgaagaaggaagtcgaatcatccgagactaatgatgaccaagaagatgatccattctaccagaatgaagatgactattttggtatatcgttagacgacgattaattagttttagtaatcatgaattattgtaactaatttgtcggtacctcttattaatgtaatttgtaaaatttttgtaacagttccggtaaacattaccgacactgtagaaacagtaaaaattgagtctatttaaaggagtcctcgttccctttgtgaggtaccctttcagatagtctcataaccaggttttagagagagaagctctgcctagggaaaaactctttgtaagcttctatgcccatatcaattaagagcttgatgggtacttgtacacaaccgatgtttagatatttatacttacggctatgttcataaattgaattttttgaaagtaaatgaaattcttcccctatatcttgtcctagaggaatattgttttctactgttttgattatgtaatcaaagttgtgtttgtcctttattgtttcaggaacgtatagttgatcctgagggatttctggaatgttccagtcatccatgttttgattgatatattcgaatcggacttcctcatcga

SEQ ID NO: 9448 - DNA, 1053 bp, Glycine max
  Gm_smallRNAprecursor_2281
ttggttcctccaatggtggaactacttcagaccaattccacagatattcccagaagaagtccaacagggattccaacaattcaacaagctctataatagcaaggaatcacgtattccggcagatttaaagtacttttccagttttgccttgtcatggattttttcaaggcaatacagatacggaaaaaccgaaaacagcaaacagtatccaccgttgcagagacacgcctttgtaaaatggtggtcacaattcgatacttcaaaggctgctccagaacaagtcaagaactggttccagagcaatcctgagttcctcaaacctgctaatccgaagacatctttgtttctgaatcagaagtcacaactggcagcattcttagcaagctcaaaatctaaagagagtcttgctcagaatctcaaagaagttctccaactacttcaacaggaagtggaagaagaacccccgaagaaggaagtcgaatcatccgagactaatgatgaccaagaagatgatccattctaccagaatgaagatgactattttggtatatcgttagacgacgattaattagttttagtaatcatgaattattgtaactaatttgtcggtacctcttattaatgtaatttgtaaaatttttgtaacagttccggtaaacattaccgacactgtagaaacagtaaaaattgagtctatttaaaggagtcctcgttccctttgtgaggtaccctttcagatagtctcataaccaggttttagagagagaagctctgcctagggaaaaactctttgtaagcttctatgcccatatcaattaagagcttgatgggtacttgtacacaaccgatgtttagatatttatacttacggctatgttcataaattgaattttttgaaagtaaatgaaattcttcccctatatcttgtcctagaggaatattgttttctactgttttgattatgtaatcaaagttgtgtttgtcctttattgtttcaggaacgtatagttgatcctgagggatttctggaatgttccagtcatccatgttttg

SEQ ID NO: 9449 - DNA, 1123 bp, Glycine max
  Gm_smallRNAprecursor_2282
gaagaagtccaacagggattccaacaattcaacaagctctataatagcaaggaatcacgtattccggcagatttaaagtacttttccagttttgccttgtcatggattttttcaaggcaatacagatacggaaaaaccgaaaacagcaaacagtatccaccgttgcagagacacgcctttgtaaaatggtggtcacaattcgatacttcaaaggctgctccagaacaagtcaagaactggttccagagcaatcctgagttcctcaaacctgctaatccgaagacatctttgtttctgaatcagaagtcacaactggcagcattcttagcaagctcaaaatctaaagagagtcttgctcagaatctcaaagaagttctccaactacttcaacaggaagtggaagaagaacccccgaagaaggaagtcgaatcatccgagactaatgatgaccaagaagatgatccattctaccagaatgaagatgactattttggtatatcgttagacgacgattaattagttttagtaatcatgaattattgtaactaatttgtcggtacctcttattaatgtaatttgtaaaatttttgtaacagttccggtaaacattaccgacactgtagaaacagtaaaaattgagtctatttaaaggagtcctcgttccctttgtgaggtaccctttcagatagtctcataaccaggttttagagagagaagctctgcctagggaaaaactctttgtaagcttctatgcccatatcaattaagagcttgatgggtacttgtacacaaccgatgtttagatatttatacttacggctatgttcataaattgaattttttgaaagtaaatgaaattcttcccctatatcttgtcctagaggaatattgttttctactgttttgattatgtaatcaaagttgtgtttgtcctttattgtttcaggaacgtatagttgatcctgagggatttctggaatgttccagtcatccatgttttgattgatatattcgaatcggacttcctcatcgaagagattgtgttttggggcgacctcttgggtctggttatcttgatcatttaataaattggagtttcttgaagatgaggaggaggagtttg

SEQ ID NO: 9450 - DNA, 1197 bp, Glycine max
  Gm_smallRNAprecursor_2283
cagatacggaaaaaccgaaaacagcaaacagtatccaccgttgcagagacacgcctttgtaaaatggtggtcacaattcgatacttcaaaggctgctccagaacaagtcaagaactggttccagagcaatcctgagttcctcaaacctgctaatccgaagacatctttgtttctgaatcagaagtcacaactggcagcattcttagcaagctcaaaatctaaagagagtcttgctcagaatctcaaagaagttctccaactacttcaacaggaagtggaagaagaacccccgaagaaggaagtcgaatcatccgagactaatgatgaccaagaagatgatccattctaccagaatgaagatgactattttggtatatcgttagacgacgattaattagttttagtaatcatgaattattgtaactaatttgtcggtacctcttattaatgtaatttgtaaaatttttgtaacagttccggtaaacattaccgacactgtagaaacagtaaaaattgagtctatttaaaggagtcctcgttccctttgtgaggtaccctttcagatagtctcataaccaggttttagagagagaagctctgcctagggaaaaactctttgtaagcttctatgcccatatcaattaagagcttgatgggtacttgtacacaaccgatgtttagatatttatacttacggctatgttcataaattgaattttttgaaagtaaatgaaattcttcccctatatcttgtcctagaggaatattgttttctactgttttgattatgtaatcaaagttgtgtttgtcctttattgtttcaggaacgtatagttgatcctgagggatttctggaatgttccagtcatccatgttttgattgatatattcgaatcggacttcctcatcgaagagattgtgttttggggcgacctcttgggtctggttatcttgatcatttaataaattggagtttcttgaagatgaggaggaggagtttgagcgaaaagagatacgggaaaaagatcgtaatagtctagacatgattataatattctctaatatctttgccctcatttggttccatagaaatatccccgtaagtaaatatgtcacaaaatttttctggatctgaattattttaaagaaaaactcttttttttatatataaaatagtttgaacggcaatcctatagc

SEQ ID NO: 9451 - DNA, 1159 bp, Glycine max
  Gm_smallRNAprecursor_2284
ctcaaagaagttctccaactacttcaacaggaagtggaagaagaacccccgaagaaggaagtcgaatcatccgagactaatgatgaccaagaagatgatccattctaccagaatgaagatgactattttggtatatcgttagacgacgattaattagttttagtaatcatgaattattgtaactaatttgtcggtacctcttattaatgtaatttgtaaaatttttgtaacagttccggtaaacattaccgacactgtagaaacagtaaaaattgagtctatttaaaggagtcctcgttccctttgtgaggtaccctttcagatagtctcataaccaggttttagagagagaagctctgcctagggaaaaactctttgtaagcttctatgcccatatcaattaagagcttgatgggtacttgtacacaaccgatgtttagatatttatacttacggctatgttcataaattgaattttttgaaagtaaatgaaattcttcccctatatcttgtcctagaggaatattgttttctactgttttgattatgtaatcaaagttgtgtttgtcctttattgtttcaggaacgtatagttgatcctgagggatttctggaatgttccagtcatccatgttttgattgatatattcgaatcggacttcctcatcgaagagattgtgttttggggcgacctcttgggtctggttatcttgatcatttaataaattggagtttcttgaagatgaggaggaggagtttgagcgaaaagagatacgggaaaaagatcgtaatagtctagacatgattataatattctctaatatctttgccctcatttggttccatagaaatatccccgtaagtaaatatgtcacaaaatttttctggatctgaattattttaaagaaaaactcttttttttatatataaaatagtttgaacggcaatcctatagccaccagtatattatgtcttgatattttggttaaacaatacaccttggccttaccgccctttatctatcacaggtcttagtactacaataccattcaactaaaatattagactgctatacttccaggaagtactgttcaaacatttactgtacaacaaatgtttgaacagtacttcctggaagtacagcagtctaatattttag

SEQ ID NO: 9452 - DNA, 1200 bp, Glycine max
  Gm_smallRNAprecursor_2285
attcttgttgagtcaacgattggcttggtttttggttacagacagttttggtctatttggccttttggatttgtttttgcagatctgtttcagaatcatcgtctgattctgaggccatttctgcccaggtctttttggccaattttggtactttggtgaggcctatatcttctaaggcctatatattagttacaataccatattcctacagtaccgtatcaagggcatatctctggtatcagagcctgatggggaagtaggaatatggtccgtaaggacatatgtaaacaaattttatggatctgaaaccttgtacagtatgagtaatattttattttgatctgtatagtagatgtttgaacagtacttcctggaagtacagctgtataatattttagttaaatggtactgtagcagtaagacccgtgatggataaagggcagtaaggctaaggtgtactgtttaaccaaaatatcaagacataatatactggtgcctataggattgtcgttcaaactattttttaaaaaaaagagtttttgcttaaaaatatttcagatccaaaaaattttgttacgtatttacttacggaaatatttctatggaaccaaatgagagcaaagatattagagaattttataatcatgtctagacttatgcattctttttcacgtatttcctttccatctaattcgtcttcatcaacttcttccagaaattccaacttattaagtgatcaagataaccaaacccaagaggtcgcccctaaacacaatctcttcgatgagcaagtccgattcgaagatatcaatcaaaacatggatgactggaacatcccagaaatccctcaggatcaactatacgttcctaaaacaattaaggataaacacaactttgattacataatcaaaacagtagaaaacaatattcctctaggacaagacataggggaagaatttcatttactttcaaaaaattcaatttatgaacatagtcgaaagtataaatatttacacatcggttgtgtacaagtagccatcaagcccttaatagacatgggcatagatgcagcggttttaatgtgtctaagagatattaggcataataaatttgaagactccttaattggaacagtcgaaaccagcctaggacaaggtccagtatattttaattgttatccaaacaaaacaatgagtctga

SEQ ID NO: 9453 - DNA, 1107 bp, Glycine max
  Gm_smallRNAprecursor_2286
aatcatcgtctgattctgaggccatttctgcccaggtctttttggccaattttggtactttggtgaggcctatatcttctaaggcctatatattagttacaataccatattcctacagtaccgtatcaagggcatatctctggtatcagagcctgatggggaagtaggaatatggtccgtaaggacatatgtaaacaaattttatggatctgaaaccttgtacagtatgagtaatattttattttgatctgtatagtagatgtttgaacagtacttcctggaagtacagctgtataatattttagttaaatggtactgtagcagtaagacccgtgatggataaagggcagtaaggctaaggtgtactgtttaaccaaaatatcaagacataatatactggtgcctataggattgtcgttcaaactattttttaaaaaaaagagtttttgcttaaaaatatttcagatccaaaaaattttgttacgtatttacttacggaaatatttctatggaaccaaatgagagcaaagatattagagaattttataatcatgtctagacttatgcattctttttcacgtatttcctttccatctaattcgtcttcatcaacttcttccagaaattccaacttattaagtgatcaagataaccaaacccaagaggtcgcccctaaacacaatctcttcgatgagcaagtccgattcgaagatatcaatcaaaacatggatgactggaacatcccagaaatccctcaggatcaactatacgttcctaaaacaattaaggataaacacaactttgattacataatcaaaacagtagaaaacaatattcctctaggacaagacataggggaagaatttcatttactttcaaaaaattcaatttatgaacatagtcgaaagtataaatatttacacatcggttgtgtacaagtagccatcaagcccttaatagacatgggcatagatgcagcggttttaatgtgtctaagagatattaggcataataaatttgaagactccttaattggaacagtcgaaaccagcctaggacaaggtccagtatattttaattgttatccaaacaaaacaatgagtctga

SEQ ID NO: 9454 - DNA, 1088 bp, Glycine max
  Gm_smallRNAprecursor_2287
ttcaggcccttcaagaaatgggtctaaccaaattcccgaaaataataaaaaaaacatgggcaaatattgcctcaaaatctgacgatgattctcaatcaaacttacaaaccatgatccggactacatcaatgaccaaaaaagctatcaatcctaaagggaaactaccactagccaaaattcaaacaccacccaccaagcaaactaacaattatatttacaaaaataaattttcaactgttttgcagatggaacctgaattctgggacaaacacccatttaaggcaacaaccaaggcattccagtcaggatttcatttcaaaccaaccaccatcatgaagtccaggactttttatgaattgattttggtagactcaaattcagtgtctatcaaacatttcaaagacccaaaagatcaaacattgaacacccactcaacaattcaaatactaaaagttcttcaaccaagaaattttggttcggaattaaacaaaggaaaaagattttcagtatcatttgaccttgtaggttatacctattgggattatattgatgcttggactaagtttttttggcaccaaaatacccgcttcaagcactcatgattaatatatttcaaaaccaacacaatctataatttcccaaattggtttttacaatggtgggatttctttggtccaattccaaagattttcccagaaatagttcaacaacgatttgctcaatttgaaaaacaatacaattctcaagaatcacgaattccaacagatcttaaatatttttccaattttgctatgtcatgatttttttcatggcaatatcgttacagtaaaactgaaaaaacaaaccaatatccatcactacaaaggcatgcatttgtaaaatggtggactcaatttgactcgtccaaagctaatccagaacaagtgaaactctggttccaatcccatccggaatttctcaaagcagctgatccaaaaacttttgtgtttttgaaccaaaagtcccacctggcagtatttttagcaggatcaaaattgaaagagatcctaactaaaaatcttaagaaagttctgcaaatgttatagcaa

SEQ ID NO: 9455 - DNA, 1053 bp, Glycine max
  Gm_smallRNAprecursor_2288
ccgaaaataataaaaaaaacatgggcaaatattgcctcaaaatctgacgatgattctcaatcaaacttacaaaccatgatccggactacatcaatgaccaaaaaagctatcaatcctaaagggaaactaccactagccaaaattcaaacaccacccaccaagcaaactaacaattatatttacaaaaataaattttcaactgttttgcagatggaacctgaattctgggacaaacacccatttaaggcaacaaccaaggcattccagtcaggatttcatttcaaaccaaccaccatcatgaagtccaggactttttatgaattgattttggtagactcaaattcagtgtctatcaaacatttcaaagacccaaaagatcaaacattgaacacccactcaacaattcaaatactaaaagttcttcaaccaagaaattttggttcggaattaaacaaaggaaaaagattttcagtatcatttgaccttgtaggttatacctattgggattatattgatgcttggactaagtttttttggcaccaaaatacccgcttcaagcactcatgattaatatatttcaaaaccaacacaatctataatttcccaaattggtttttacaatggtgggatttctttggtccaattccaaagattttcccagaaatagttcaacaacgatttgctcaatttgaaaaacaatacaattctcaagaatcacgaattccaacagatcttaaatatttttccaattttgctatgtcatgatttttttcatggcaatatcgttacagtaaaactgaaaaaacaaaccaatatccatcactacaaaggcatgcatttgtaaaatggtggactcaatttgactcgtccaaagctaatccagaacaagtgaaactctggttccaatcccatccggaatttctcaaagcagctgatccaaaaacttttgtgtttttgaaccaaaagtcccacctggcagtatttttagcaggatcaaaattgaaagagatcctaactaaaaatcttaagaaagttctgcaaatgttatagcaa

SEQ ID NO: 9456 - DNA, 1079 bp, Glycine max
  Gm_smallRNAprecursor_2289
ccgaaaataataaaaaaaacatgggcaaatattgcctcaaaatctgacgatgattctcaatcaaacttacaaaccatgatccggactacatcaatgaccaaaaaagctatcaatcctaaagggaaactaccactagccaaaattcaaacaccacccaccaagcaaactaacaattatatttacaaaaataaattttcaactgttttgcagatggaacctgaattctgggacaaacacccatttaaggcaacaaccaaggcattccagtcaggatttcatttcaaaccaaccaccatcatgaagtccaggactttttatgaattgattttggtagactcaaattcagtgtctatcaaacatttcaaagacccaaaagatcaaacattgaacacccactcaacaattcaaatactaaaagttcttcaaccaagaaattttggttcggaattaaacaaaggaaaaagattttcagtatcatttgaccttgtaggttatacctattgggattatattgatgcttggactaagtttttttggcaccaaaatacccgcttcaagcactcatgattaatatatttcaaaaccaacacaatctataatttcccaaattggtttttacaatggtgggatttctttggtccaattccaaagattttcccagaaatagttcaacaacgatttgctcaatttgaaaaacaatacaattctcaagaatcacgaattccaacagatcttaaatatttttccaattttgctatgtcatgatttttttcatggcaatatcgttacagtaaaactgaaaaaacaaaccaatatccatcactacaaaggcatgcatttgtaaaatggtggactcaatttgactcgtccaaagctaatccagaacaagtgaaactctggttccaatcccatccggaatttctcaaagcagctgatccaaaaacttttgtgtttttgaaccaaaagtcccacctggcagtatttttagcaggatcaaaattgaaagagatcctaactaaaaatcttaagaaagttctgcaaatgttatagcaagatgaagaaggttcatcctcaaaaaa

SEQ ID NO: 9457 - DNA, 1082 bp, Glycine max
  Gm_smallRNAprecursor_2290
ccgaaaataataaaaaaaacatgggcaaatattgcctcaaaatctgacgatgattctcaatcaaacttacaaaccatgatccggactacatcaatgaccaaaaaagctatcaatcctaaagggaaactaccactagccaaaattcaaacaccacccaccaagcaaactaacaattatatttacaaaaataaattttcaactgttttgcagatggaacctgaattctgggacaaacacccatttaaggcaacaaccaaggcattccagtcaggatttcatttcaaaccaaccaccatcatgaagtccaggactttttatgaattgattttggtagactcaaattcagtgtctatcaaacatttcaaagacccaaaagatcaaacattgaacacccactcaacaattcaaatactaaaagttcttcaaccaagaaattttggttcggaattaaacaaaggaaaaagattttcagtatcatttgaccttgtaggttatacctattgggattatattgatgcttggactaagtttttttggcaccaaaatacccgcttcaagcactcatgattaatatatttcaaaaccaacacaatctataatttcccaaattggtttttacaatggtgggatttctttggtccaattccaaagattttcccagaaatagttcaacaacgatttgctcaatttgaaaaacaatacaattctcaagaatcacgaattccaacagatcttaaatatttttccaattttgctatgtcatgatttttttcatggcaatatcgttacagtaaaactgaaaaaacaaaccaatatccatcactacaaaggcatgcatttgtaaaatggtggactcaatttgactcgtccaaagctaatccagaacaagtgaaactctggttccaatcccatccggaatttctcaaagcagctgatccaaaaacttttgtgtttttgaaccaaaagtcccacctggcagtatttttagcaggatcaaaattgaaagagatcctaactaaaaatcttaagaaagttctgcaaatgttatagcaagatgaagaaggttcatcctcaaaaaagga

SEQ ID NO: 9458 - DNA, 1082 bp, Glycine max; identical to SEQ ID NO: 9457
  Gm_smallRNAprecursor_2291

SEQ ID NO: 9459 - DNA, 1083 bp, Glycine max
  Gm_smallRNAprecursor_2292
ccgaaaataataaaaaaaacatgggcaaatattgcctcaaaatctgacgatgattctcaatcaaacttacaaaccatgatccggactacatcaatgaccaaaaaagctatcaatcctaaagggaaactaccactagccaaaattcaaacaccacccaccaagcaaactaacaattatatttacaaaaataaattttcaactgttttgcagatggaacctgaattctgggacaaacacccatttaaggcaacaaccaaggcattccagtcaggatttcatttcaaaccaaccaccatcatgaagtccaggactttttatgaattgattttggtagactcaaattcagtgtctatcaaacatttcaaagacccaaaagatcaaacattgaacacccactcaacaattcaaatactaaaagttcttcaaccaagaaattttggttcggaattaaacaaaggaaaaagattttcagtatcatttgaccttgtaggttatacctattgggattatattgatgcttggactaagtttttttggcaccaaaatacccgcttcaagcactcatgattaatatatttcaaaaccaacacaatctataatttcccaaattggtttttacaatggtgggatttctttggtccaattccaaagattttcccagaaatagttcaacaacgatttgctcaatttgaaaaacaatacaattctcaagaatcacgaattccaacagatcttaaatatttttccaattttgctatgtcatgatttttttcatggcaatatcgttacagtaaaactgaaaaaacaaaccaatatccatcactacaaaggcatgcatttgtaaaatggtggactcaatttgactcgtccaaagctaatccagaacaagtgaaactctggttccaatcccatccggaatttctcaaagcagctgatccaaaaacttttgtgtttttgaaccaaaagtcccacctggcagtatttttagcaggatcaaaattgaaagagatcctaactaaaaatcttaagaaagttctgcaaatgttatagcaagatgaagaaggttcatcctcaaaaaaggaa

SEQ ID NO: 9460 - DNA, 1138 bp, Glycine max
  Gm_smallRNAprecursor_2293
ccgaaaataataaaaaaaacatgggcaaatattgcctcaaaatctgacgatgattctcaatcaaacttacaaaccatgatccggactacatcaatgaccaaaaaagctatcaatcctaaagggaaactaccactagccaaaattcaaacaccacccaccaagcaaactaacaattatatttacaaaaataaattttcaactgttttgcagatggaacctgaattctgggacaaacacccatttaaggcaacaaccaaggcattccagtcaggatttcatttcaaaccaaccaccatcatgaagtccaggactttttatgaattgattttggtagactcaaattcagtgtctatcaaacatttcaaagacccaaaagatcaaacattgaacacccactcaacaattcaaatactaaaagttcttcaaccaagaaattttggttcggaattaaacaaaggaaaaagattttcagtatcatttgaccttgtaggttatacctattgggattatattgatgcttggactaagtttttttggcaccaaaatacccgcttcaagcactcatgattaatatatttcaaaaccaacacaatctataatttcccaaattggtttttacaatggtgggatttctttggtccaattccaaagattttcccagaaatagttcaacaacgatttgctcaatttgaaaaacaatacaattctcaagaatcacgaattccaacagatcttaaatatttttccaattttgctatgtcatgatttttttcatggcaatatcgttacagtaaaactgaaaaaacaaaccaatatccatcactacaaaggcatgcatttgtaaaatggtggactcaatttgactcgtccaaagctaatccagaacaagtgaaactctggttccaatcccatccggaatttctcaaagcagctgatccaaaaacttttgtgtttttgaaccaaaagtcccacctggcagtatttttagcaggatcaaaattgaaagagatcctaactaaaaatcttaagaaagttctgcaaatgttatagcaagatgaagaaggttcatcctcaaaaaaggaagaaataagctctgttgaagaagaagaagaccttttttaccaaaacgaagatgatt

SEQ ID NO: 9461 - DNA, 1138 bp, Glycine max; identical to SEQ ID NO: 9460
  Gm_smallRNAprecursor_2294

SEQ ID NO: 9462 - DNA, 1139 bp, Glycine max
  Gm_smallRNAprecursor_2295
ccgaaaataataaaaaaaacatgggcaaatattgcctcaaaatctgacgatgattctcaatcaaacttacaaaccatgatccggactacatcaatgaccaaaaaagctatcaatcctaaagggaaactaccactagccaaaattcaaacaccacccaccaagcaaactaacaattatatttacaaaaataaattttcaactgttttgcagatggaacctgaattctgggacaaacacccatttaaggcaacaaccaaggcattccagtcaggatttcatttcaaaccaaccaccatcatgaagtccaggactttttatgaattgattttggtagactcaaattcagtgtctatcaaacatttcaaagacccaaaagatcaaacattgaacacccactcaacaattcaaatactaaaagttcttcaaccaagaaattttggttcggaattaaacaaaggaaaaagattttcagtatcatttgaccttgtaggttatacctattgggattatattgatgcttggactaagtttttttggcaccaaaatacccgcttcaagcactcatgattaatatatttcaaaaccaacacaatctataatttcccaaattggtttttacaatggtgggatttctttggtccaattccaaagattttcccagaaatagttcaacaacgatttgctcaatttgaaaaacaatacaattctcaagaatcacgaattccaacagatcttaaatatttttccaattttgctatgtcatgatttttttcatggcaatatcgttacagtaaaactgaaaaaacaaaccaatatccatcactacaaaggcatgcatttgtaaaatggtggactcaatttgactcgtccaaagctaatccagaacaagtgaaactctggttccaatcccatccggaatttctcaaagcagctgatccaaaaacttttgtgtttttgaaccaaaagtcccacctggcagtatttttagcaggatcaaaattgaaagagatcctaactaaaaatcttaagaaagttctgcaaatgttatagcaagatgaagaaggttcatcctcaaaaaaggaagaaataagctctgttgaagaagaagaagaccttttttaccaaaacgaagatgattg

SEQ ID NO: 9463 - DNA, 1076 bp, Glycine max
  Gm_smallRNAprecursor_2296
aaaataataaaaaaaacatgggcaaatattgcctcaaaatctgacgatgattctcaatcaaacttacaaaccatgatccggactacatcaatgaccaaaaaagctatcaatcctaaagggaaactaccactagccaaaattcaaacaccacccaccaagcaaactaacaattatatttacaaaaataaattttcaactgttttgcagatggaacctgaattctgggacaaacacccatttaaggcaacaaccaaggcattccagtcaggatttcatttcaaaccaaccaccatcatgaagtccaggactttttatgaattgattttggtagactcaaattcagtgtctatcaaacatttcaaagacccaaaagatcaaacattgaacacccactcaacaattcaaatactaaaagttcttcaaccaagaaattttggttcggaattaaacaaaggaaaaagattttcagtatcatttgaccttgtaggttatacctattgggattatattgatgcttggactaagtttttttggcaccaaaatacccgcttcaagcactcatgattaatatatttcaaaaccaacacaatctataatttcccaaattggtttttacaatggtgggatttctttggtccaattccaaagattttcccagaaatagttcaacaacgatttgctcaatttgaaaaacaatacaattctcaagaatcacgaattccaacagatcttaaatatttttccaattttgctatgtcatgatttttttcatggcaatatcgttacagtaaaactgaaaaaacaaaccaatatccatcactacaaaggcatgcatttgtaaaatggtggactcaatttgactcgtccaaagctaatccagaacaagtgaaactctggttccaatcccatccggaatttctcaaagcagctgatccaaaaacttttgtgtttttgaaccaaaagtcccacctggcagtatttttagcaggatcaaaattgaaagagatcctaactaaaaatcttaagaaagttctgcaaatgttatagcaagatgaagaaggttcatcctcaaaaaa

SEQ ID NO: 9464 - DNA, 1181 bp, Glycine max
  Gm_smallRNAprecursor_2297
aaaataataaaaaaaacatgggcaaatattgcctcaaaatctgacgatgattctcaatcaaacttacaaaccatgatccggactacatcaatgaccaaaaaagctatcaatcctaaagggaaactaccactagccaaaattcaaacaccacccaccaagcaaactaacaattatatttacaaaaataaattttcaactgttttgcagatggaacctgaattctgggacaaacacccatttaaggcaacaaccaaggcattccagtcaggatttcatttcaaaccaaccaccatcatgaagtccaggactttttatgaattgattttggtagactcaaattcagtgtctatcaaacatttcaaagacccaaaagatcaaacattgaacacccactcaacaattcaaatactaaaagttcttcaaccaagaaattttggttcggaattaaacaaaggaaaaagattttcagtatcatttgaccttgtaggttatacctattgggattatattgatgcttggactaagtttttttggcaccaaaatacccgcttcaagcactcatgattaatatatttcaaaaccaacacaatctataatttcccaaattggtttttacaatggtgggatttctttggtccaattccaaagattttcccagaaatagttcaacaacgatttgctcaatttgaaaaacaatacaattctcaagaatcacgaattccaacagatcttaaatatttttccaattttgctatgtcatgatttttttcatggcaatatcgttacagtaaaactgaaaaaacaaaccaatatccatcactacaaaggcatgcatttgtaaaatggtggactcaatttgactcgtccaaagctaatccagaacaagtgaaactctggttccaatcccatccggaatttctcaaagcagctgatccaaaaacttttgtgtttttgaaccaaaagtcccacctggcagtatttttagcaggatcaaaattgaaagagatcctaactaaaaatcttaagaaagttctgcaaatgttatagcaagatgaagaaggttcatcctcaaaaaaggaagaaataagctctgttgaagaagaagaagaccttttttaccaaaacgaagatgattgttttggtatttgtttagattaattataatttcagtcacaaaaccg

SEQ ID NO: 9465 - DNA, 1213 bp, Glycine max
  Gm_smallRNAprecursor_2298
aaaataataaaaaaaacatgggcaaatattgcctcaaaatctgacgatgattctcaatcaaacttacaaaccatgatccggactacatcaatgaccaaaaaagctatcaatcctaaagggaaactaccactagccaaaattcaaacaccacccaccaagcaaactaacaattatatttacaaaaataaattttcaactgttttgcagatggaacctgaattctgggacaaacacccatttaaggcaacaaccaaggcattccagtcaggatttcatttcaaaccaaccaccatcatgaagtccaggactttttatgaattgattttggtagactcaaattcagtgtctatcaaacatttcaaagacccaaaagatcaaacattgaacacccactcaacaattcaaatactaaaagttcttcaaccaagaaattttggttcggaattaaacaaaggaaaaagattttcagtatcatttgaccttgtaggttatacctattgggattatattgatgcttggactaagtttttttggcaccaaaatacccgcttcaagcactcatgattaatatatttcaaaaccaacacaatctataatttcccaaattggtttttacaatggtgggatttctttggtccaattccaaagattttcccagaaatagttcaacaacgatttgctcaatttgaaaaacaatacaattctcaagaatcacgaattccaacagatcttaaatatttttccaattttgctatgtcatgatttttttcatggcaatatcgttacagtaaaactgaaaaaacaaaccaatatccatcactacaaaggcatgcatttgtaaaatggtggactcaatttgactcgtccaaagctaatccagaacaagtgaaactctggttccaatcccatccggaatttctcaaagcagctgatccaaaaacttttgtgtttttgaaccaaaagtcccacctggcagtatttttagcaggatcaaaattgaaagagatcctaactaaaaatcttaagaaagttctgcaaatgttatagcaagatgaagaaggttcatcctcaaaaaaggaagaaataagctctgttgaagaagaagaagaccttttttaccaaaacgaagatgattgttttggtatttgtttagattaattataatttcagtcacaaaaccgtttgtacttaattattttgtaattccagacaa

SEQ ID NO: 9466 - DNA, 1216 bp, Glycine max
  Gm_smallRNAprecursor_2299
aaaataataaaaaaaacatgggcaaatattgcctcaaaatctgacgatgattctcaatcaaacttacaaaccatgatccggactacatcaatgaccaaaaaagctatcaatcctaaagggaaactaccactagccaaaattcaaacaccacccaccaagcaaactaacaattatatttacaaaaataaattttcaactgttttgcagatggaacctgaattctgggacaaacacccatttaaggcaacaaccaaggcattccagtcaggatttcatttcaaaccaaccaccatcatgaagtccaggactttttatgaattgattttggtagactcaaattcagtgtctatcaaacatttcaaagacccaaaagatcaaacattgaacacccactcaacaattcaaatactaaaagttcttcaaccaagaaattttggttcggaattaaacaaaggaaaaagattttcagtatcatttgaccttgtaggttatacctattgggattatattgatgcttggactaagtttttttggcaccaaaatacccgcttcaagcactcatgattaatatatttcaaaaccaacacaatctataatttcccaaattggtttttacaatggtgggatttctttggtccaattccaaagattttcccagaaatagttcaacaacgatttgctcaatttgaaaaacaatacaattctcaagaatcacgaattccaacagatcttaaatatttttccaattttgctatgtcatgatttttttcatggcaatatcgttacagtaaaactgaaaaaacaaaccaatatccatcactacaaaggcatgcatttgtaaaatggtggactcaatttgactcgtccaaagctaatccagaacaagtgaaactctggttccaatcccatccggaatttctcaaagcagctgatccaaaaacttttgtgtttttgaaccaaaagtcccacctggcagtatttttagcaggatcaaaattgaaagagatcctaactaaaaatcttaagaaagttctgcaaatgttatagcaagatgaagaaggttcatcctcaaaaaaggaagaaataagctctgttgaagaagaagaagaccttttttaccaaaacgaagatgattgttttggtatttgtttagattaattataatttcagtcacaaaaccgtttgtacttaattattttgtaattccagacaatac

SEQ ID NO: 9467 - DNA, 1096 bp, Glycine max
  Gm_smallRNAprecursor_2300
catcaatgaccaaaaaagctatcaatcctaaagggaaactaccactagccaaaattcaaacaccacccaccaagcaaactaacaattatatttacaaaaataaattttcaactgttttgcagatggaacctgaattctgggacaaacacccatttaaggcaacaaccaaggcattccagtcaggatttcatttcaaaccaaccaccatcatgaagtccaggactttttatgaattgattttggtagactcaaattcagtgtctatcaaacatttcaaagacccaaaagatcaaacattgaacacccactcaacaattcaaatactaaaagttcttcaaccaagaaattttggttcggaattaaacaaaggaaaaagattttcagtatcatttgaccttgtaggttatacctattgggattatattgatgcttggactaagtttttttggcaccaaaatacccgcttcaagcactcatgattaatatatttcaaaaccaacacaatctataatttcccaaattggtttttacaatggtgggatttctttggtccaattccaaagattttcccagaaatagttcaacaacgatttgctcaatttgaaaaacaatacaattctcaagaatcacgaattccaacagatcttaaatatttttccaattttgctatgtcatgatttttttcatggcaatatcgttacagtaaaactgaaaaaacaaaccaatatccatcactacaaaggcatgcatttgtaaaatggtggactcaatttgactcgtccaaagctaatccagaacaagtgaaactctggttccaatcccatccggaatttctcaaagcagctgatccaaaaacttttgtgtttttgaaccaaaagtcccacctggcagtatttttagcaggatcaaaattgaaagagatcctaactaaaaatcttaagaaagttctgcaaatgttatagcaagatgaagaaggttcatcctcaaaaaaggaagaaataagctctgttgaagaagaagaagaccttttttaccaaaacgaagatgattgttttggtatttgtttagattaattataatttcagtcacaaaaccg

SEQ ID NO: 9468 - DNA, 1036 bp, Glycine max
  Gm_smallRNAprecursor_2301
aaaaataaattttcaactgttttgcagatggaacctgaattctgggacaaacacccatttaaggcaacaaccaaggcattccagtcaggatttcatttcaaaccaaccaccatcatgaagtccaggactttttatgaattgattttggtagactcaaattcagtgtctatcaaacatttcaaagacccaaaagatcaaacattgaacacccactcaacaattcaaatactaaaagttcttcaaccaagaaattttggttcggaattaaacaaaggaaaaagattttcagtatcatttgaccttgtaggttatacctattgggattatattgatgcttggactaagtttttttggcaccaaaatacccgcttcaagcactcatgattaatatatttcaaaaccaacacaatctataatttcccaaattggtttttacaatggtgggatttctttggtccaattccaaagattttcccagaaatagttcaacaacgatttgctcaatttgaaaaacaatacaattctcaagaatcacgaattccaacagatcttaaatatttttccaattttgctatgtcatgatttttttcatggcaatatcgttacagtaaaactgaaaaaacaaaccaatatccatcactacaaaggcatgcatttgtaaaatggtggactcaatttgactcgtccaaagctaatccagaacaagtgaaactctggttccaatcccatccggaatttctcaaagcagctgatccaaaaacttttgtgtttttgaaccaaaagtcccacctggcagtatttttagcaggatcaaaattgaaagagatcctaactaaaaatcttaagaaagttctgcaaatgttatagcaagatgaagaaggttcatcctcaaaaaaggaagaaataagctctgttgaagaagaagaagaccttttttaccaaaacgaagatgattgttttggtatttgtttagattaattataatttcagtcacaaaaccgtttgtacttaattattttgtaattccagacaatac

SEQ ID NO: 9469 - DNA, 1167 bp, Glycine max
  Gm_smallRNAprecursor_2302
catcttccttctccctctttaccgatcctgtgctgctctgccgccgcttcggtttctttgtttaagaaaaccttggatttgtaagccatttttcggtgtgcccttgatacttgtttttaaagtttagattttgatttccatttatcatactacattgttacttcctatttgtgcatttgatccctacccgctgatctctcgtatcaacctggtatcagagccggatctctggtaaggacatatgttaactgaattcatgatggggaagtaggaacagtgtccgtaaggataaataggaagtaagatggggatatataacattaagagaacaactcaatgtccgtaaggaaaatagttaacataaattgttgtatttgggtgacatcattgaccaaaacagtagatagatatctattgttgagtgggtgttcaatcgaagcggtggcagagtcgcacaggatcggtaaagagggagaagggagatggatgaaaaatataaatttattaaaacttgaaagaagtgcttacaaaagttgttctttcagagcacctcgtctcaaaaacctgaaaatggctaaatggaagggtgcctcacaagatggttgaggactccttatatagccaaaattctttcataagaccggtagttgccagtagttttgaccggaactatttgactgtttgttacaagacaattagttttgagcagaacttatttgctacaggataggtagtattgtccagaattacaaaataattaagtacaaacggttttgtgaccgaaattacaattaatctaaacaaataccaaaacaatcatcttcgttttggtaaaaagggtcttcttcttcttcaatagagcttgtttcttccttctttgaggatgaaccttcttcatcttgttgtaacatttgcagaacttccttaagatttttagttaggatctctttcgattttgatcctgctaaaaatggtgtcaggtgggacttttggttcaaaaacacagaagtttctggatcagctgctctgagaaattccggataggattggaaccagagtttcacttgttctggatcagctttggacgagtcgaattgagtccaccattttacaaatgcatgcttttgtagtgatggatattggttggttttttcagttttactgtaa

SEQ ID NO: 9470 - DNA, 1112 bp, Glycine max
  Gm_smallRNAprecursor_2303
ccgccgcttcggtttctttgtttaagaaaaccttggatttgtaagccatttttcggtgtgcccttgatacttgtttttaaagtttagattttgatttccatttatcatactacattgttacttcctatttgtgcatttgatccctacccgctgatctctcgtatcaacctggtatcagagccggatctctggtaaggacatatgttaactgaattcatgatggggaagtaggaacagtgtccgtaaggataaataggaagtaagatggggatatataacattaagagaacaactcaatgtccgtaaggaaaatagttaacataaattgttgtatttgggtgacatcattgaccaaaacagtagatagatatctattgttgagtgggtgttcaatcgaagcggtggcagagtcgcacaggatcggtaaagagggagaagggagatggatgaaaaatataaatttattaaaacttgaaagaagtgcttacaaaagttgttctttcagagcacctcgtctcaaaaacctgaaaatggctaaatggaagggtgcctcacaagatggttgaggactccttatatagccaaaattctttcataagaccggtagttgccagtagttttgaccggaactatttgactgtttgttacaagacaattagttttgagcagaacttatttgctacaggataggtagtattgtccagaattacaaaataattaagtacaaacggttttgtgaccgaaattacaattaatctaaacaaataccaaaacaatcatcttcgttttggtaaaaagggtcttcttcttcttcaatagagcttgtttcttccttctttgaggatgaaccttcttcatcttgttgtaacatttgcagaacttccttaagatttttagttaggatctctttcgattttgatcctgctaaaaatggtgtcaggtgggacttttggttcaaaaacacagaagtttctggatcagctgctctgagaaattccggataggattggaaccagagtttcacttgttctggatcagctttggacgagtcgaattgagtccaccattttacaaatgcatgcttttgtagtgatggatattggttggttttt

SEQ ID NO: 9471 - DNA, 1041 bp, Glycine max
  Gm_smallRNAprecursor_2304
gattttgatttccatttatcatactacattgttacttcctatttgtgcatttgatccctacccgctgatctctcgtatcaacctggtatcagagccggatctctggtaaggacatatgttaactgaattcatgatggggaagtaggaacagtgtccgtaaggataaataggaagtaagatggggatatataacattaagagaacaactcaatgtccgtaaggaaaatagttaacataaattgttgtatttgggtgacatcattgaccaaaacagtagatagatatctattgttgagtgggtgttcaatcgaagcggtggcagagtcgcacaggatcggtaaagagggagaagggagatggatgaaaaatataaatttattaaaacttgaaagaagtgcttacaaaagttgttctttcagagcacctcgtctcaaaaacctgaaaatggctaaatggaagggtgcctcacaagatggttgaggactccttatatagccaaaattctttcataagaccggtagttgccagtagttttgaccggaactatttgactgtttgttacaagacaattagttttgagcagaacttatttgctacaggataggtagtattgtccagaattacaaaataattaagtacaaacggttttgtgaccgaaattacaattaatctaaacaaataccaaaacaatcatcttcgttttggtaaaaagggtcttcttcttcttcaatagagcttgtttcttccttctttgaggatgaaccttcttcatcttgttgtaacatttgcagaacttccttaagatttttagttaggatctctttcgattttgatcctgctaaaaatggtgtcaggtgggacttttggttcaaaaacacagaagtttctggatcagctgctctgagaaattccggataggattggaaccagagtttcacttgttctggatcagctttggacgagtcgaattgagtccaccattttacaaatgcatgcttttgtagtgatggatattggttggttttttcagttttactgtaa

SEQ ID NO: 9472 - DNA, 1146 bp, Glycine max
  Gm_smallRNAprecursor_2305
acattgttacttcctatttgtgcatttgatccctacccgctgatctctcgtatcaacctggtatcagagccggatctctggtaaggacatatgttaactgaattcatgatggggaagtaggaacagtgtccgtaaggataaataggaagtaagatggggatatataacattaagagaacaactcaatgtccgtaaggaaaatagttaacataaattgttgtatttgggtgacatcattgaccaaaacagtagatagatatctattgttgagtgggtgttcaatcgaagcggtggcagagtcgcacaggatcggtaaagagggagaagggagatggatgaaaaatataaatttattaaaacttgaaagaagtgcttacaaaagttgttctttcagagcacctcgtctcaaaaacctgaaaatggctaaatggaagggtgcctcacaagatggttgaggactccttatatagccaaaattctttcataagaccggtagttgccagtagttttgaccggaactatttgactgtttgttacaagacaattagttttgagcagaacttatttgctacaggataggtagtattgtccagaattacaaaataattaagtacaaacggttttgtgaccgaaattacaattaatctaaacaaataccaaaacaatcatcttcgttttggtaaaaagggtcttcttcttcttcaatagagcttgtttcttccttctttgaggatgaaccttcttcatcttgttgtaacatttgcagaacttccttaagatttttagttaggatctctttcgattttgatcctgctaaaaatggtgtcaggtgggacttttggttcaaaaacacagaagtttctggatcagctgctctgagaaattccggataggattggaaccagagtttcacttgttctggatcagctttggacgagtcgaattgagtccaccattttacaaatgcatgcttttgtagtgatggatattggttggttttttcagttttactgtaaccatattgccatgaaaaaatccatgacaaagcaaaactggaaaaatatttaagatctgttggaattcgtgattcctaagaattgtattgtttttcaaattgagcaaatccttgttgaactgtttctggga

SEQ ID NO: 9473 - DNA, 1147 bp, Glycine max
  Gm_smallRNAprecursor_2306
tcctatttgtgcatttgatccctacccgctgatctctcgtatcaacctggtatcagagccggatctctggtaaggacatatgttaactgaattcatgatggggaagtaggaacagtgtccgtaaggataaataggaagtaagatggggatatataacattaagagaacaactcaatgtccgtaaggaaaatagttaacataaattgttgtatttgggtgacatcattgaccaaaacagtagatagatatctattgttgagtgggtgttcaatcgaagcggtggcagagtcgcacaggatcggtaaagagggagaagggagatggatgaaaaatataaatttattaaaacttgaaagaagtgcttacaaaagttgttctttcagagcacctcgtctcaaaaacctgaaaatggctaaatggaagggtgcctcacaagatggttgaggactccttatatagccaaaattctttcataagaccggtagttgccagtagttttgaccggaactatttgactgtttgttacaagacaattagttttgagcagaacttatttgctacaggataggtagtattgtccagaattacaaaataattaagtacaaacggttttgtgaccgaaattacaattaatctaaacaaataccaaaacaatcatcttcgttttggtaaaaagggtcttcttcttcttcaatagagcttgtttcttccttctttgaggatgaaccttcttcatcttgttgtaacatttgcagaacttccttaagatttttagttaggatctctttcgattttgatcctgctaaaaatggtgtcaggtgggacttttggttcaaaaacacagaagtttctggatcagctgctctgagaaattccggataggattggaaccagagtttcacttgttctggatcagctttggacgagtcgaattgagtccaccattttacaaatgcatgcttttgtagtgatggatattggttggttttttcagttttactgtaaccatattgccatgaaaaaatccatgacaaagcaaaactggaaaaatatttaagatctgttggaattcgtgattcctaagaattgtattgtttttcaaattgagcaaatccttgttgaactgtttctgggaaaatctctggaa

SEQ ID NO: 9474 - DNA, 1081 bp, Glycine max
  Gm_smallRNAprecursor_2307
aagtgcttacaaaagttgttctttcagagcacctcgtctcaaaaacctgaaaatggctaaatggaagggtgcctcacaagatggttgaggactccttatatagccaaaattctttcataagaccggtagttgccagtagttttgaccggaactatttgactgtttgttacaagacaattagttttgagcagaacttatttgctacaggataggtagtattgtccagaattacaaaataattaagtacaaacggttttgtgaccgaaattacaattaatctaaacaaataccaaaacaatcatcttcgttttggtaaaaagggtcttcttcttcttcaatagagcttgtttcttccttctttgaggatgaaccttcttcatcttgttgtaacatttgcagaacttccttaagatttttagttaggatctctttcgattttgatcctgctaaaaatggtgtcaggtgggacttttggttcaaaaacacagaagtttctggatcagctgctctgagaaattccggataggattggaaccagagtttcacttgttctggatcagctttggacgagtcgaattgagtccaccattttacaaatgcatgcttttgtagtgatggatattggttggttttttcagttttactgtaaccatattgccatgaaaaaatccatgacaaagcaaaactggaaaaatatttaagatctgttggaattcgtgattcctaagaattgtattgtttttcaaattgagcaaatccttgttgaactgtttctgggaaaatctctggaattggaccaaagaaatcccaccattgtaaaaaccaatttgggaaattatagattgtgttggttttgaaatatattaaccatgagtgcttgaagcgggtattttggtgccaaaaaaccttagtccaagcatcaatataatcccaataggtataacctatagggtcaaatgatactgaaaatctttttcctttgtttaagtccgaaccaaaatgtcttggttgaagaacttttagtatttgaattgttgagtgggtgttcaaagtttgatcttttggggctttgaaatgtttt

SEQ ID NO: 9475 - DNA, 1082 bp, Glycine max
  Gm_smallRNAprecursor_2308
ttgaggactccttatatagccaaaattctttcataagaccggtagttgccagtagttttgaccggaactatttgactgtttgttacaagacaattagttttgagcagaacttatttgctacaggataggtagtattgtccagaattacaaaataattaagtacaaacggttttgtgaccgaaattacaattaatctaaacaaataccaaaacaatcatcttcgttttggtaaaaagggtcttcttcttcttcaatagagcttgtttcttccttctttgaggatgaaccttcttcatcttgttgtaacatttgcagaacttccttaagatttttagttaggatctctttcgattttgatcctgctaaaaatggtgtcaggtgggacttttggttcaaaaacacagaagtttctggatcagctgctctgagaaattccggataggattggaaccagagtttcacttgttctggatcagctttggacgagtcgaattgagtccaccattttacaaatgcatgcttttgtagtgatggatattggttggttttttcagttttactgtaaccatattgccatgaaaaaatccatgacaaagcaaaactggaaaaatatttaagatctgttggaattcgtgattcctaagaattgtattgtttttcaaattgagcaaatccttgttgaactgtttctgggaaaatctctggaattggaccaaagaaatcccaccattgtaaaaaccaatttgggaaattatagattgtgttggttttgaaatatattaaccatgagtgcttgaagcgggtattttggtgccaaaaaaccttagtccaagcatcaatataatcccaataggtataacctatagggtcaaatgatactgaaaatctttttcctttgtttaagtccgaaccaaaatgtcttggttgaagaacttttagtatttgaattgttgagtgggtgttcaaagtttgatcttttggggctttgaaatgttttatagacactgaatttgagtctaccaaaatcaattcgtaaaaagtcctggacttcatgatggtggttggtttgaaatgaaatccag

SEQ ID NO: 9476 - DNA, 1092 bp, Glycine max
  Gm_smallRNAprecursor_2309
ttgaggactccttatatagccaaaattctttcataagaccggtagttgccagtagttttgaccggaactatttgactgtttgttacaagacaattagttttgagcagaacttatttgctacaggataggtagtattgtccagaattacaaaataattaagtacaaacggttttgtgaccgaaattacaattaatctaaacaaataccaaaacaatcatcttcgttttggtaaaaagggtcttcttcttcttcaatagagcttgtttcttccttctttgaggatgaaccttcttcatcttgttgtaacatttgcagaacttccttaagatttttagttaggatctctttcgattttgatcctgctaaaaatggtgtcaggtgggacttttggttcaaaaacacagaagtttctggatcagctgctctgagaaattccggataggattggaaccagagtttcacttgttctggatcagctttggacgagtcgaattgagtccaccattttacaaatgcatgcttttgtagtgatggatattggttggttttttcagttttactgtaaccatattgccatgaaaaaatccatgacaaagcaaaactggaaaaatatttaagatctgttggaattcgtgattcctaagaattgtattgtttttcaaattgagcaaatccttgttgaactgtttctgggaaaatctctggaattggaccaaagaaatcccaccattgtaaaaaccaatttgggaaattatagattgtgttggttttgaaatatattaaccatgagtgcttgaagcgggtattttggtgccaaaaaaccttagtccaagcatcaatataatcccaataggtataacctatagggtcaaatgatactgaaaatctttttcctttgtttaagtccgaaccaaaatgtcttggttgaagaacttttagtatttgaattgttgagtgggtgttcaaagtttgatcttttggggctttgaaatgttttatagacactgaatttgagtctaccaaaatcaattcgtaaaaagtcctggacttcatgatggtggttggtttgaaatgaaatccagacgggaatgc

SEQ ID NO: 9477 - DNA, 1053 bp, Glycine max
  Gm_smallRNAprecursor_2310
tgctacaggataggtagtattgtccagaattacaaaataattaagtacaaacggttttgtgaccgaaattacaattaatctaaacaaataccaaaacaatcatcttcgttttggtaaaaagggtcttcttcttcttcaatagagcttgtttcttccttctttgaggatgaaccttcttcatcttgttgtaacatttgcagaacttccttaagatttttagttaggatctctttcgattttgatcctgctaaaaatggtgtcaggtgggacttttggttcaaaaacacagaagtttctggatcagctgctctgagaaattccggataggattggaaccagagtttcacttgttctggatcagctttggacgagtcgaattgagtccaccattttacaaatgcatgcttttgtagtgatggatattggttggttttttcagttttactgtaaccatattgccatgaaaaaatccatgacaaagcaaaactggaaaaatatttaagatctgttggaattcgtgattcctaagaattgtattgtttttcaaattgagcaaatccttgttgaactgtttctgggaaaatctctggaattggaccaaagaaatcccaccattgtaaaaaccaatttgggaaattatagattgtgttggttttgaaatatattaaccatgagtgcttgaagcgggtattttggtgccaaaaaaccttagtccaagcatcaatataatcccaataggtataacctatagggtcaaatgatactgaaaatctttttcctttgtttaagtccgaaccaaaatgtcttggttgaagaacttttagtatttgaattgttgagtgggtgttcaaagtttgatcttttggggctttgaaatgttttatagacactgaatttgagtctaccaaaatcaattcgtaaaaagtcctggacttcatgatggtggttggtttgaaatgaaatccagacgggaatgccttggatgttgcctgaaatgggtttttgtcccagaattcaggttccatctgcaaaacagttgaaaatttatttttg

SEQ ID NO: 9478 - DNA, 1044 bp, Glycine max
  Gm_smallRNAprecursor_2311
ggttttgtgaccgaaattacaattaatctaaacaaataccaaaacaatcatcttcgttttggtaaaaagggtcttcttcttcttcaatagagcttgtttcttccttctttgaggatgaaccttcttcatcttgttgtaacatttgcagaacttccttaagatttttagttaggatctctttcgattttgatcctgctaaaaatggtgtcaggtgggacttttggttcaaaaacacagaagtttctggatcagctgctctgagaaattccggataggattggaaccagagtttcacttgttctggatcagctttggacgagtcgaattgagtccaccattttacaaatgcatgcttttgtagtgatggatattggttggttttttcagttttactgtaaccatattgccatgaaaaaatccatgacaaagcaaaactggaaaaatatttaagatctgttggaattcgtgattcctaagaattgtattgtttttcaaattgagcaaatccttgttgaactgtttctgggaaaatctctggaattggaccaaagaaatcccaccattgtaaaaaccaatttgggaaattatagattgtgttggttttgaaatatattaaccatgagtgcttgaagcgggtattttggtgccaaaaaaccttagtccaagcatcaatataatcccaataggtataacctatagggtcaaatgatactgaaaatctttttcctttgtttaagtccgaaccaaaatgtcttggttgaagaacttttagtatttgaattgttgagtgggtgttcaaagtttgatcttttggggctttgaaatgttttatagacactgaatttgagtctaccaaaatcaattcgtaaaaagtcctggacttcatgatggtggttggtttgaaatgaaatccagacgggaatgccttggatgttgcctgaaatgggtttttgtcccagaattcaggttccatctgcaaaacagttgaaaatttatttttgtaaatataattgttagttttcttggtgggtggtgtttgaattt

SEQ ID NO: 9479 - DNA, 1219 bp, Glycine max
  Gm_smallRNAprecursor_2312
catcttgttgtaacatttgcagaacttccttaagatttttagttaggatctctttcgattttgatcctgctaaaaatggtgtcaggtgggacttttggttcaaaaacacagaagtttctggatcagctgctctgagaaattccggataggattggaaccagagtttcacttgttctggatcagctttggacgagtcgaattgagtccaccattttacaaatgcatgcttttgtagtgatggatattggttggttttttcagttttactgtaaccatattgccatgaaaaaatccatgacaaagcaaaactggaaaaatatttaagatctgttggaattcgtgattcctaagaattgtattgtttttcaaattgagcaaatccttgttgaactgtttctgggaaaatctctggaattggaccaaagaaatcccaccattgtaaaaaccaatttgggaaattatagattgtgttggttttgaaatatattaaccatgagtgcttgaagcgggtattttggtgccaaaaaaccttagtccaagcatcaatataatcccaataggtataacctatagggtcaaatgatactgaaaatctttttcctttgtttaagtccgaaccaaaatgtcttggttgaagaacttttagtatttgaattgttgagtgggtgttcaaagtttgatcttttggggctttgaaatgttttatagacactgaatttgagtctaccaaaatcaattcgtaaaaagtcctggacttcatgatggtggttggtttgaaatgaaatccagacgggaatgccttggatgttgcctgaaatgggtttttgtcccagaattcaggttccatctgcaaaacagttgaaaatttatttttgtaaatataattgttagttttcttggtgggtggtgtttgaattttggctagtggtagtttccttttaggattaatagttgttttgctcattgatgtagtctggatcatggtttgtaagtttgattcagaatcatcgtcagattttgaggcaatatctgcccaagttttttttattattttcgggaatttggttagacccatttcttgaagggcctgaagagtttcaattggccaagcatagtcggccgatgtttgtttggcggttgccggtttgggagattcctaagtggatgactcaggtttaactgagatgatttgggttgatgacccttcaaaattggtttt

SEQ ID NO: 9480 - DNA, 1107 bp, Glycine max
  Gm_smallRNAprecursor_2313
gcagaacttccttaagatttttagttaggatctctttcgattttgatcctgctaaaaatggtgtcaggtgggacttttggttcaaaaacacagaagtttctggatcagctgctctgagaaattccggataggattggaaccagagtttcacttgttctggatcagctttggacgagtcgaattgagtccaccattttacaaatgcatgcttttgtagtgatggatattggttggttttttcagttttactgtaaccatattgccatgaaaaaatccatgacaaagcaaaactggaaaaatatttaagatctgttggaattcgtgattcctaagaattgtattgtttttcaaattgagcaaatccttgttgaactgtttctgggaaaatctctggaattggaccaaagaaatcccaccattgtaaaaaccaatttgggaaattatagattgtgttggttttgaaatatattaaccatgagtgcttgaagcgggtattttggtgccaaaaaaccttagtccaagcatcaatataatcccaataggtataacctatagggtcaaatgatactgaaaatctttttcctttgtttaagtccgaaccaaaatgtcttggttgaagaacttttagtatttgaattgttgagtgggtgttcaaagtttgatcttttggggctttgaaatgttttatagacactgaatttgagtctaccaaaatcaattcgtaaaaagtcctggacttcatgatggtggttggtttgaaatgaaatccagacgggaatgccttggatgttgcctgaaatgggtttttgtcccagaattcaggttccatctgcaaaacagttgaaaatttatttttgtaaatataattgttagttttcttggtgggtggtgtttgaattttggctagtggtagtttccttttaggattaatagttgttttgctcattgatgtagtctggatcatggtttgtaagtttgattcagaatcatcgtcagattttgaggcaatatctgcccaagttttttttattattttcgggaatttggttagacccatttcttgaagggcctgaagagtttcaattggccaagcatagtcggccgatg

SEQ ID NO: 9481 - DNA, 1107 bp, Glycine max; identical to SEQ ID NO: 9480
  Gm_smallRNAprecursor_2314

SEQ ID NO: 9482 - DNA, 1108 bp, Glycine max
  Gm_smallRNAprecursor_2315
gcagaacttccttaagatttttagttaggatctctttcgattttgatcctgctaaaaatggtgtcaggtgggacttttggttcaaaaacacagaagtttctggatcagctgctctgagaaattccggataggattggaaccagagtttcacttgttctggatcagctttggacgagtcgaattgagtccaccattttacaaatgcatgcttttgtagtgatggatattggttggttttttcagttttactgtaaccatattgccatgaaaaaatccatgacaaagcaaaactggaaaaatatttaagatctgttggaattcgtgattcctaagaattgtattgtttttcaaattgagcaaatccttgttgaactgtttctgggaaaatctctggaattggaccaaagaaatcccaccattgtaaaaaccaatttgggaaattatagattgtgttggttttgaaatatattaaccatgagtgcttgaagcgggtattttggtgccaaaaaaccttagtccaagcatcaatataatcccaataggtataacctatagggtcaaatgatactgaaaatctttttcctttgtttaagtccgaaccaaaatgtcttggttgaagaacttttagtatttgaattgttgagtgggtgttcaaagtttgatcttttggggctttgaaatgttttatagacactgaatttgagtctaccaaaatcaattcgtaaaaagtcctggacttcatgatggtggttggtttgaaatgaaatccagacgggaatgccttggatgttgcctgaaatgggtttttgtcccagaattcaggttccatctgcaaaacagttgaaaatttatttttgtaaatataattgttagttttcttggtgggtggtgtttgaattttggctagtggtagtttccttttaggattaatagttgttttgctcattgatgtagtctggatcatggtttgtaagtttgattcagaatcatcgtcagattttgaggcaatatctgcccaagttttttttattattttcgggaatttggttagacccatttcttgaagggcctgaagagtttcaattggccaagcatagtcggccgatgt

SEQ ID NO: 9483 - DNA, 1053 bp, Glycine max
  Gm_smallRNAprecursor_2316
caaaaacacagaagtttctggatcagctgctctgagaaattccggataggattggaaccagagtttcacttgttctggatcagctttggacgagtcgaattgagtccaccattttacaaatgcatgcttttgtagtgatggatattggttggttttttcagttttactgtaaccatattgccatgaaaaaatccatgacaaagcaaaactggaaaaatatttaagatctgttggaattcgtgattcctaagaattgtattgtttttcaaattgagcaaatccttgttgaactgtttctgggaaaatctctggaattggaccaaagaaatcccaccattgtaaaaaccaatttgggaaattatagattgtgttggttttgaaatatattaaccatgagtgcttgaagcgggtattttggtgccaaaaaaccttagtccaagcatcaatataatcccaataggtataacctatagggtcaaatgatactgaaaatctttttcctttgtttaagtccgaaccaaaatgtcttggttgaagaacttttagtatttgaattgttgagtgggtgttcaaagtttgatcttttggggctttgaaatgttttatagacactgaatttgagtctaccaaaatcaattcgtaaaaagtcctggacttcatgatggtggttggtttgaaatgaaatccagacgggaatgccttggatgttgcctgaaatgggtttttgtcccagaattcaggttccatctgcaaaacagttgaaaatttatttttgtaaatataattgttagttttcttggtgggtggtgtttgaattttggctagtggtagtttccttttaggattaatagttgttttgctcattgatgtagtctggatcatggtttgtaagtttgattcagaatcatcgtcagattttgaggcaatatctgcccaagttttttttattattttcgggaatttggttagacccatttcttgaagggcctgaagagtttcaattggccaagcatagtcggccgatgtttgtttggcggttgccggtttgggaga

SEQ ID NO: 9484 - DNA, 1116 bp, Glycine max
  Gm_smallRNAprecursor_2317
caaaaacacagaagtttctggatcagctgctctgagaaattccggataggattggaaccagagtttcacttgttctggatcagctttggacgagtcgaattgagtccaccattttacaaatgcatgcttttgtagtgatggatattggttggttttttcagttttactgtaaccatattgccatgaaaaaatccatgacaaagcaaaactggaaaaatatttaagatctgttggaattcgtgattcctaagaattgtattgtttttcaaattgagcaaatccttgttgaactgtttctgggaaaatctctggaattggaccaaagaaatcccaccattgtaaaaaccaatttgggaaattatagattgtgttggttttgaaatatattaaccatgagtgcttgaagcgggtattttggtgccaaaaaaccttagtccaagcatcaatataatcccaataggtataacctatagggtcaaatgatactgaaaatctttttcctttgtttaagtccgaaccaaaatgtcttggttgaagaacttttagtatttgaattgttgagtgggtgttcaaagtttgatcttttggggctttgaaatgttttatagacactgaatttgagtctaccaaaatcaattcgtaaaaagtcctggacttcatgatggtggttggtttgaaatgaaatccagacgggaatgccttggatgttgcctgaaatgggtttttgtcccagaattcaggttccatctgcaaaacagttgaaaatttatttttgtaaatataattgttagttttcttggtgggtggtgtttgaattttggctagtggtagtttccttttaggattaatagttgttttgctcattgatgtagtctggatcatggtttgtaagtttgattcagaatcatcgtcagattttgaggcaatatctgcccaagttttttttattattttcgggaatttggttagacccatttcttgaagggcctgaagagtttcaattggccaagcatagtcggccgatgtttgtttggcggttgccggtttgggagattcctaagtggatgactcaggtttaactgagatgatttgggttgatgacccttcaaaattggt

SEQ ID NO: 9485 - DNA, 1086 bp, Glycine max
  Gm_smallRNAprecursor_2318
agctgctctgagaaattccggataggattggaaccagagtttcacttgttctggatcagctttggacgagtcgaattgagtccaccattttacaaatgcatgcttttgtagtgatggatattggttggttttttcagttttactgtaaccatattgccatgaaaaaatccatgacaaagcaaaactggaaaaatatttaagatctgttggaattcgtgattcctaagaattgtattgtttttcaaattgagcaaatccttgttgaactgtttctgggaaaatctctggaattggaccaaagaaatcccaccattgtaaaaaccaatttgggaaattatagattgtgttggttttgaaatatattaaccatgagtgcttgaagcgggtattttggtgccaaaaaaccttagtccaagcatcaatataatcccaataggtataacctatagggtcaaatgatactgaaaatctttttcctttgtttaagtccgaaccaaaatgtcttggttgaagaacttttagtatttgaattgttgagtgggtgttcaaagtttgatcttttggggctttgaaatgttttatagacactgaatttgagtctaccaaaatcaattcgtaaaaagtcctggacttcatgatggtggttggtttgaaatgaaatccagacgggaatgccttggatgttgcctgaaatgggtttttgtcccagaattcaggttccatctgcaaaacagttgaaaatttatttttgtaaatataattgttagttttcttggtgggtggtgtttgaattttggctagtggtagtttccttttaggattaatagttgttttgctcattgatgtagtctggatcatggtttgtaagtttgattcagaatcatcgtcagattttgaggcaatatctgcccaagttttttttattattttcgggaatttggttagacccatttcttgaagggcctgaagagtttcaattggccaagcatagtcggccgatgtttgtttggcggttgccggtttgggagattcctaagtggatgactcaggtttaactgagatgatttgggttgatgacccttcaaa

SEQ ID NO: 9486 - DNA, 1085 bp, Glycine max
  Gm_smallRNAprecursor_2319
gctgctctgagaaattccggataggattggaaccagagtttcacttgttctggatcagctttggacgagtcgaattgagtccaccattttacaaatgcatgcttttgtagtgatggatattggttggttttttcagttttactgtaaccatattgccatgaaaaaatccatgacaaagcaaaactggaaaaatatttaagatctgttggaattcgtgattcctaagaattgtattgtttttcaaattgagcaaatccttgttgaactgtttctgggaaaatctctggaattggaccaaagaaatcccaccattgtaaaaaccaatttgggaaattatagattgtgttggttttgaaatatattaaccatgagtgcttgaagcgggtattttggtgccaaaaaaccttagtccaagcatcaatataatcccaataggtataacctatagggtcaaatgatactgaaaatctttttcctttgtttaagtccgaaccaaaatgtcttggttgaagaacttttagtatttgaattgttgagtgggtgttcaaagtttgatcttttggggctttgaaatgttttatagacactgaatttgagtctaccaaaatcaattcgtaaaaagtcctggacttcatgatggtggttggtttgaaatgaaatccagacgggaatgccttggatgttgcctgaaatgggtttttgtcccagaattcaggttccatctgcaaaacagttgaaaatttatttttgtaaatataattgttagttttcttggtgggtggtgtttgaattttggctagtggtagtttccttttaggattaatagttgttttgctcattgatgtagtctggatcatggtttgtaagtttgattcagaatcatcgtcagattttgaggcaatatctgcccaagttttttttattattttcgggaatttggttagacccatttcttgaagggcctgaagagtttcaattggccaagcatagtcggccgatgtttgtttggcggttgccggtttgggagattcctaagtggatgactcaggtttaactgagatgatttgggttgatgacccttcaaa

SEQ ID NO: 9487 - DNA, 1031 bp, Glycine max
  Gm_smallRNAprecursor_2320
tccttttgtaaaatatctttggctgacttgcaatcaaccctgattaaaaattttttatttaataaatctaattgaaatttggaaatgcacaaaacaattgctaaaacttcttttttaacagttgaatattttaattgtgcagaattccaatgttttgatgtatatgcaatgacatgatcttggtcatgcactctttgtttgaggatgccaccataacctatgtctgatgcatcggttttgacaattttaaatgcctgtgaagtgggaagatacagacattttgtagattggactttgagtttgatctctttaactgtttgggtatggagatcaaaccaaggaggcggatttttctttagcttatcatgcaatggtttgacaatattgtttaaatatggacaaattctcctacataatttagacaacctataaatctttgtaactgggttttgtccaagatttggttggggaatttgttagcaaattctattgacctttctattggaatgattgtaccttgatatatattatgaccaaggaatcgaattcgagtttggaaaagattgatttttgatttagagactgccaaaccattttgtttgatgatatggatgaaagtctgaagatgtttgaaatgttggtcaatgttttgggaaaagattaaaatatcatctatgtaaacaatgacaaattttgaataaggattgaaaatatcgttcataattttttgaaattctgaaggggcattcttcagtccaaatggtatcacattccattcatattacccgaaaggtacagtaaatgttgttttgtacctatctgattcttggatttggattttccaaaatccagatttcatatcaaattttgaaaatatttttgcagaatttaatccgttaagtaagtcttttttgtttgggataggatacctaatccattgtaatgcttgattcaatggtttgtaatttatgactaggtggggtgttccacgatcaagctcagattgtttattgacataaaaatccgcacaa

SEQ ID NO: 9488 - DNA, 1159 bp, Glycine max
  Gm_smallRNAprecursor_2321
gacccatttttcggggagagttacttaatcccattttattattctttttaaaaaaacgttggcttttgtcatatcagtgataaataaggttgttctcccttttgtggttgcaacaggactctagatgcacaagtattcatgaccttgtactggatcctataaatcaaagtcgctaggattgatccttctttcatgtcaaggccatgaaagtggatatttaagaacagagagtcaagaatgtttctgtccatcagactcactgttttgtttggataacaattaaaatatattggaccttgtccaaggctagtttcgactgttccaattagggagtcttcaaatttattatgcctaatatctcttagacacattaaaactgttgcatctatgcccatgtcaatcaagggcttgatgactacttgtacacagccaatgtgtagatatttatacttacggctatgttcataaattgaattttttgaaagtaaatgaaactcttcccctatatcttgtcctagaggaatattgttttctactgttttgattatgtaatcaaatttgtgtttgtctttaattgtttcaggaacgtatagttgatcctgagggatttctggaatgttccagtcatccatgttttgattgatatcttcgaattggacttcctcatcgaagagattgtgtttggggcgacctcttgggtatggttttcttgatcacttaataaattggaatttcttgaagaagatgatgatgaagaatttgatcgaaaagagatacgggaaaaagaacgtagaagtctagacatgattataacattctctaatatctttgcctttatttggttccatagaaatatttccgtaagtaaatatgtaacaaaattctttggatctgaaatattttaaacaaaaactcttttttaaaaaaattgtttgaacggcattcctatagccaccagtatattatgtcttaatattttggttaaacagtacaccttagccttactgccctctatccatcacgggtcttactgctacagtaccattcatctaaaatattagactgttgtacttccagaaagtactgttcaaacgtttactgtatagatcaaaataaaacattacgtacactatacaagattttagatccataaaatctg

SEQ ID NO: 9489 - DNA, 1070 bp, Glycine max
  Gm_smallRNAprecursor_2322
tttattccctcctaaagttccccttgcctttatttacaataaacattttttttatcaagctagcagtaccttttatctttgttccttactcgtgcatcttacatcggcataggcctacattaccaatggcaacacaaccactgtcataaaacaaaaatagatttgtttagaacttatatattatattagtttaaaatttaaaaaaaaaatcacaaaacataaaatatttatagaaaaatataaatgcatttctcacgtcattttccatatttttatatgcaagtcaacttgaacccatcatcgtataacatgtgaatccaatccaaacatcctgttttggtccatccaacccaaatatccttaaaagttagaactgcacgattggtttggcccgtcaaaactctgtcatgattttatgggggctattgctaggtgcacccacattattgttggtgtacctagcacttaagatgaaatgatgaaaatattcttgatccgtaaaagacttacggatcaacttgaatctataagccttttacggatcaacttcatccgtagaagccttacgaatcaacttgatctgtaagccttttacggattaagttgatccataagacttctacggatgaagttgatccgtgttgtttcataaaagacttacggatcaagctaattcgtatgcttaatataacatacggatcaacttaatctatatcaaccttatggatcaacttgatccatatgatttacggaccaccttcgcgcacacctatcacaaatgcgaaaaaaatacagaaataattttgatgttttttaaaaatactgggtgcaccagcaataatgctaggtgcacctaacaacacccttccaataagagtggctacttgtctcggacatgctgataagaaaattaatggggagttactcttgatttctacaataattactattgatcctatcaacttttaaaaccccggaaaaatattattttacccctcagataaaatccatccatcacagcctgtctcttttttttttaaagtcaaaacaaatatacaacagaacatgtt

SEQ ID NO: 9490 - DNA, 1070 bp, Glycine max; identical to SEQ ID NO: 9489
  Gm_smallRNAprecursor_2323

SEQ ID NO: 9491 - DNA, 1042 bp, Glycine max
  Gm_smallRNAprecursor_2324
aaaatactttgaacaatgaagaattattgtctaaatcgttttaagaataaaaaataaaataaacatattttgtaagaattaaaatagaaaaaaatataagaataaaaatataaaaaatataaaattacatgaatgaaaaaaatatgtaaatctttatcttttcatttacttacattttcttttatagatacaattacataaaatatatacacaaaaatcaaaggtaacagtgtttttttctcagtttggtgtgtagcataacgcgcctcacggacccacagtgtgatatttgttgttgtgcaaggggccaaaaatgcagctagcagcggcaagttccctattattactattacgttatgagtgcggctgcaactacactaaccacgaaaagacagaaatatcccttatggatcaaattgattcgtaagttaatttttaaaacttactgatcaacttgatccgtaatcttttacggatcaagttgatccgtaaattgatttttaagacttacggatcaagttgatccgtaaattttttacagatcaagttgatccgtaagtcttttacggatcaagctgatccgtaagttgatttttaagatttacggatcaaattgatccgtaaggggagaaattaacagggacaattttgctattttcaaagaatgttgagtgcaccaacaataatgctgggtgtacctagcaacaccctcacgttattattctcttctcttttgttaggtgtacaattattgtttctttttcttctataaaaagcccttgtatcgtgacttcaaacaagcatcaacttctaccgttctacatagcatctcctttaccaccattctagatatcagagaactttgcagctctcttaggtttttaaaaaacaccacgcaaacagcaagatggccacttccgacagtaacatgctactaaattatgttccagtttatgtgatgctcccagtaagtcatgcacataagacatcaaaacaaattaaataacttcacttgtattgtatctacacatgctaataatgt

SEQ ID NO: 9492 - DNA, 1190 bp, Glycine max
  Gm_smallRNAprecursor_2325
ttttcaattgtaaagattgaaaaaaatattgttgacctgcatctatgaatggttgtcggtaatagatttcatccagtagttgatcgttggttagttgaagggtgttgtgcattctaagcttgagtgtatcaaaagaacagttcttaggaactcgcattggtgttgaaatgagactttgaaaataaacaccagtttggttgtaactgattgatccatttggaaaaatgaaagctaatctagaattagtaatggtttgactgcttgtttctcccaaaaatgacatagtaataagattgaatttggtttgtgaaattatgttatatgagattgtgtgtttgtattgtgtttatgttgtgttatttatagttgtatgagtattctgccacgatgtgtattggaatccaatgtttcttttttcctagtaagtgatgtagcagacgtccattataattccagagtgaacaaagagattatgagttgtccatctcatgtcagttttgcacacgtctctaaaaattaaatgtatcacctgtaaaactgacatgaaatggacagctcataatgcagagtgttgttaatttggactgtgatttttcccatgtaattaaagcaataggcgttcatgatgattttcagagtgaataaagagatgatgagctgtccatttcatggcagttttgcaggtgagacatttaatttttagagacgtgtgcaaattacagagtattgtcaatttggattgtgatttttcccttgtaattaaagcagcaaacgtccataattattttcagagtgaataaagagattatgagttgtccatttcatgtcagttttgtcgatgagacatttaatttttaaaagcagtgtagtgtaaatgacaaagtattgtgaattttgacagttatgttaccatgtcaactactacagtaaacgtgggtaaactgaaaattgctaatttaaatttaaaggaaaaattatttcaatatgtaaagtgataactgaaaacagacataagacattacatgaaaatctcaaagaagaaataacttagacatgaatgatccgtagattaccaatcccgtttgaatataggttagtgggatggagacaggttacttccttcgggcccggaagaggagtccgtatcactatcatggtttttgagccagcaagtctcgtattcacctgat

SEQ ID NO: 9493 - DNA, 1146 bp, Glycine max
  Gm_smallRNAprecursor_2326
gcaaagcgatgaccaaaccgatgacgagggtattggcagaccaacgacaccttcgtcacctccgttgcaatatcagcaacctaggtgtctagtagacttgaactttgaccacctaccacactatattgatcgacaccattttgttcatcagcaacacaatgtacaaccaccagtcggtgtactcaaggttggcatgaccttcgatgacaaagcacaatgtattcgagcaatcaaagaatacaacatcagaaatcattttgattgcagaacaatttactctgaccaaagaaggctaaatttcgtctgcaagttacatgaaaatggttgtacatggagcttgggcgcatgcaattcaaagaggcataacaaatggattatcaagagtattagaggtcatcacacttgtctcgtgccgatgctcagacaagatcatcgccaacttgacaaacacgtcataacacagatcattcaaccaattatcaaaacaaacccaactgtctccatcaagacgttgattgcagaaattaaaacgttcatgaattataccccatcctacaagaagacatggttagcaaagcaaaaagcattggagatgattcatggaaactgggaagaatcatatgccaaacttccaaaacttttcagagctttgcaatcttgtgttcccgggactgtggtcactgctcaaacagaatccttgtatgaggggggagaaataatatcgggcaaaagattgtttaaacgtgtcttttggtcatttggtccatgcattaatggttttgcatgttgcaaacccattgtacaagtagatggtacatggctttacggaaagtatactggtacactgtcgatagctaccgcacaagatggagctaaccatatcttcccgattgcctatgccattgtagaaggggagacaacttcagcttgggggttttttctaaagaatttgagaagacatgttactccgcaaattaacatttctcttatttcagactgacacccctcaattataagtgcctacaacaacccaagtaacttatgggtccaggacacatcccatttcttttgcctgcgccacattgcacaaaactttcttcgtggtaactcaaactgcaaacatttaaagaaaccacttatgttggc

SEQ ID NO: 9494 - DNA, 1094 bp, Glycine max
  Gm_smallRNAprecursor_2327
aaaaccagtttaacagatatattttcagggaacaaatcagaatttttttatgactttaagtgattattataaaaatttaaaaatttatcatatataaccatttttaattaaatgatgcatgcattatatattttaagtaaaattgaaaaaataattcatgtcttgtcttcgaataagataattttgtttacttttaagttttttaagtatttagtattgtatatttataaattaaattggagatcattgattaagtgacaataatctgtcaattgatctacactattaatagttattaaattcaatttataaatataaataataaaaagatataggtataattgtatttttggtcctcaattttgtctccaattttggattttgtcccccgataaaattatttacgaattttatccccgtatttaatcaaatcgcacaatgttgatcctctagtccataattggacgttaacggttaacggtcacatgtcacgttcttattggatgatgactgtcacgtgtcatgttttgataggatgtcaattccatgcaagatgaaatgcattgttgttttcattgatcaatcagaacatgacgtgacagtcatcatccaataaaaacgtgacacgtgacagtcaacattactttgtaacagtcaacgtccaattatggactggaggaccaacactgcgtgatttgattagatacgaggacaaaattcgtgaagaattttaccagaagacaaaatctgaaattaaagataaaataagggatcaaatttacaattttaccaaatatatataaagtattgttataattgttaaagtataatgaaattatgtgtttggtaaaaaaaaaagtaatgatttttttttcctacaaatcattctcttattttataaaataatactaaatagttgtttttgttgaattttggtttagtccccagcttattccctcattttcttttaaatgaaatcagaagggttctcattgggggactagtttgggtgtcaacataattcaaatgttttttcccataccgacctatgttctctttaaaaaatatatatataggatatgtttgggtaccaa

SEQ ID NO: 9495 - DNA, 1089 bp, Glycine max
  Gm_smallRNAprecursor_2328
atagtcaataagcaaattaaaatttttgttcttttaaaaactaaattgttactgatttaaatattttagaccaaaatcatcatctttctctaaaaaaaaaaataccaaaatcatcatttatccgttatcataatgttaaacttttaattcagaaaaaaaaattaatgttaaactttttcctcccttttgcccaaataattttaattgatcacatgtaaatctggcataaactgaatgattgcgattaattagccccaccaaacaaagttcataaataggagtgtgcttaagtcttatagaatttttgtaaaattatatttttggtcctcggtctatctttaattttggatttggttccccactaatttaattcacaaattaggttctcctattttataaaattgtgcgaggttggtcctcgagaccacgattggacgtgaaccgttagccaatcacgttgattgtcacgtgtcacgttcttattgaatgattgctacgtgtcatgttctgattggatgtcaactccataaaatatgaaatgcattattattttcattgaccaatcaaaacatgacacgtgataatcatcatctaataagaacgtgacacgtgacactcaacatttttttgtaacgcaagtgtggtctgggaaatcaatattgcacgattttataaaataggaagactcaatttgtgaattaaattattggaggatcaaatccaaaactagatgaccaaatttacaattttagctgaaattttatatatgcacttattttttcactataatacttttttttacctcttctcaattcaatactaacgctactattattctttattatattaatattttttaatgttttagattacaaattatttttcaatataaatctattttttttatatttatttattatttccacttagatttaagttatctagattttcattttagttaagaatacttattactattgtccaagatttattcttattaataattattaacttgttatcgagtgatgtgaaaatattaaagtgaaaaaacattttacagtgttggaaataaaaaaatactaattactt

SEQ ID NO: 9496 - DNA, 1180 bp, Glycine max
  Gm_smallRNAprecursor_2329
ggtttatgggtggaatatgggacaaaactctcgtaatgtcatcaaattttaatagggatgtttataaactgaaaatttaatctaaaaatgaaaaaaaaaaagcaaaacaaaaacctgtaaattgttttttataagattgaatcagatttatatttgattttgagaacagattcaactcagttcaaatcaaaattatacataagtatattttttgttatcattataaggtttacatttttatatatatttatgaaattatcacaaaacttatattttttttttggaaaaaatgtaaattatattaaacccaaaataatacaataataaacgggacataccccgcagttaaagaaaatcaaaagtttccctaatacaagaagacatatatcaagatgctaaaataaatgcaacaggtgcgcttgtctaaaacttaatcttgctaataacctctatgacagaaaattgataatcttcaaaaatcagcttgttcctagacaaccaaatgcagtagactgtaattgctatagcgtaattttccttgaacacctgacgtggatctgcccctaattaaagagtcagtaatgcgctgtaaagaagtgaaacgcttgtggaaaggagccaaatcacgaatgtgagtccaaatttggagagatttcctgcaagaaaagaacaaatgagcatttgactcagactcatttgaacataaagggcagagggaaccgttgttcaaaaaaacaactttgtcaagagtaagcagccgattccttttagcaagccacaaaatgaaagacatcttaggggggattgctgggtttcatataacagaacaccaactaacagtaggcttgacacctctaatgtattcatagactttgtcaacaagcaattgttgattggtgctccaagattgaatcctcttttttgcctcttccgtacttagctctttagagataataaagtcccttatttgaatgattttctttatcaaaactaaatctgatgaagaagaattgtaattccacacatcgctccctctgaaatagtaatggtgaacccaccgaacccatagaaaatctttcttataatgaaagtcccacaggatacgggaaagaagcgcaatgttgagattaaaaaggcctaaacccccttcttttttcagagaacaaactactgaccaagc

SEQ ID NO: 9497 - DNA, 1098 bp, Glycine max
  Gm_smallRNAprecursor_2330
ggagaagttgcagaaatggaaaatgactttgtatcaagtagctctcttgtctggctatcatttcaaatatgggtacccaccttaccgatcttccttacactgtaatttttgttcgattaaagtttcacttgtctaattgaaaaattattaggtcgttctaaacaacaatttgttcatgtttcttaccaattcgttctaaacaacaacttcattaaaacttttttgtttgaaacagagatggatatgagtatgagttcattgggaggattgttgagcgggtctgcatcaagattaatcttactcatttacatgttgcgggttatttggttggactagagtcacaagtgccaagagccatgaagcttttggatgttggatctgatgatggtgtgcacatgatagagatccactgtataggtggaatagggaaaacaacattttagaatttgattgctaactgtttttgtggttcatgttttctttaagatgtgagagaaaaatcaaacaaacatggattacaacatttccagagcatccttctttcagaaataattaaactcataagtttaaaagaacatatgagctgaaagaattgagtaaggatgatgctcttcaattgcttactcaaaaaaagcttttaaaatgaaacaagttgatccaatacatgtggaggtcttaatggtgttgaaacatatgcatgaggccttccattgactttggaagtaataggttccaacttgttttgaaaaagtaagaagaagggaatatgctatcaaacaatatcaagaaattcctaataatcaaatcctagagatacttaaagtaagctttgatgcattggaagaagaagaaaaaagtgtttttcttgacattgcttgttgcttcaaaggatatgcattcatagaggttaaagatatacttgtgctcatcatggtgataacatgaaatatcatgttggcatgttagttgagaaatctctcataaaagttaagactgttacattgcatgacttgactgaggacatgggtaaaaaatttgtcactcaaggatcagcaagagagctgggaagcaaaggaagctataatccaagttttggaa

SEQ ID NO: 9498 - DNA, 1183 bp, Glycine max
  Gm_smallRNAprecursor_2331
cactgtaatttttgttcgattaaagtttcacttgtctaattgaaaaattattaggtcgttctaaacaacaatttgttcatgtttcttaccaattcgttctaaacaacaacttcattaaaacttttttgtttgaaacagagatggatatgagtatgagttcattgggaggattgttgagcgggtctgcatcaagattaatcttactcatttacatgttgcgggttatttggttggactagagtcacaagtgccaagagccatgaagcttttggatgttggatctgatgatggtgtgcacatgatagagatccactgtataggtggaatagggaaaacaacattttagaatttgattgctaactgtttttgtggttcatgttttctttaagatgtgagagaaaaatcaaacaaacatggattacaacatttccagagcatccttctttcagaaataattaaactcataagtttaaaagaacatatgagctgaaagaattgagtaaggatgatgctcttcaattgcttactcaaaaaaagcttttaaaatgaaacaagttgatccaatacatgtggaggtcttaatggtgttgaaacatatgcatgaggccttccattgactttggaagtaataggttccaacttgttttgaaaaagtaagaagaagggaatatgctatcaaacaatatcaagaaattcctaataatcaaatcctagagatacttaaagtaagctttgatgcattggaagaagaagaaaaaagtgtttttcttgacattgcttgttgcttcaaaggatatgcattcatagaggttaaagatatacttgtgctcatcatggtgataacatgaaatatcatgttggcatgttagttgagaaatctctcataaaagttaagactgttacattgcatgacttgactgaggacatgggtaaaaaatttgtcactcaaggatcagcaagagagctgggaagcaaaggaagctataatccaagttttggaagacaacagagtgagagtgagtgagactcatgaatggtttggtttcttacctttatgtatctttttttactatcatatgttaacatcataattgttttttttataatatgtaaatttctctaaacatgtgtattgaagaagttttacactgtggttgatttctgcctttgtattgacagggaa

SEQ ID NO: 9499 - DNA, 1124 bp, Glycine max
  Gm_smallRNAprecursor_2332
actgtaatttttgttcgattaaagtttcacttgtctaattgaaaaattattaggtcgttctaaacaacaatttgttcatgtttcttaccaattcgttctaaacaacaacttcattaaaacttttttgtttgaaacagagatggatatgagtatgagttcattgggaggattgttgagcgggtctgcatcaagattaatcttactcatttacatgttgcgggttatttggttggactagagtcacaagtgccaagagccatgaagcttttggatgttggatctgatgatggtgtgcacatgatagagatccactgtataggtggaatagggaaaacaacattttagaatttgattgctaactgtttttgtggttcatgttttctttaagatgtgagagaaaaatcaaacaaacatggattacaacatttccagagcatccttctttcagaaataattaaactcataagtttaaaagaacatatgagctgaaagaattgagtaaggatgatgctcttcaattgcttactcaaaaaaagcttttaaaatgaaacaagttgatccaatacatgtggaggtcttaatggtgttgaaacatatgcatgaggccttccattgactttggaagtaataggttccaacttgttttgaaaaagtaagaagaagggaatatgctatcaaacaatatcaagaaattcctaataatcaaatcctagagatacttaaagtaagctttgatgcattggaagaagaagaaaaaagtgtttttcttgacattgcttgttgcttcaaaggatatgcattcatagaggttaaagatatacttgtgctcatcatggtgataacatgaaatatcatgttggcatgttagttgagaaatctctcataaaagttaagactgttacattgcatgacttgactgaggacatgggtaaaaaatttgtcactcaaggatcagcaagagagctgggaagcaaaggaagctataatccaagttttggaagacaacagagtgagagtgagtgagactcatgaatggtttggtttcttacctttatgtatctttttttactatcatatgttaacatcataattgttttttttataatatgtaaatttctctaaac

SEQ ID NO: 9500 - DNA, 1216 bp, Glycine max
  Gm_smallRNAprecursor_2333
cgttctaaacaacaatttgttcatgtttcttaccaattcgttctaaacaacaacttcattaaaacttttttgtttgaaacagagatggatatgagtatgagttcattgggaggattgttgagcgggtctgcatcaagattaatcttactcatttacatgttgcgggttatttggttggactagagtcacaagtgccaagagccatgaagcttttggatgttggatctgatgatggtgtgcacatgatagagatccactgtataggtggaatagggaaaacaacattttagaatttgattgctaactgtttttgtggttcatgttttctttaagatgtgagagaaaaatcaaacaaacatggattacaacatttccagagcatccttctttcagaaataattaaactcataagtttaaaagaacatatgagctgaaagaattgagtaaggatgatgctcttcaattgcttactcaaaaaaagcttttaaaatgaaacaagttgatccaatacatgtggaggtcttaatggtgttgaaacatatgcatgaggccttccattgactttggaagtaataggttccaacttgttttgaaaaagtaagaagaagggaatatgctatcaaacaatatcaagaaattcctaataatcaaatcctagagatacttaaagtaagctttgatgcattggaagaagaagaaaaaagtgtttttcttgacattgcttgttgcttcaaaggatatgcattcatagaggttaaagatatacttgtgctcatcatggtgataacatgaaatatcatgttggcatgttagttgagaaatctctcataaaagttaagactgttacattgcatgacttgactgaggacatgggtaaaaaatttgtcactcaaggatcagcaagagagctgggaagcaaaggaagctataatccaagttttggaagacaacagagtgagagtgagtgagactcatgaatggtttggtttcttacctttatgtatctttttttactatcatatgttaacatcataattgttttttttataatatgtaaatttctctaaacatgtgtattgaagaagttttacactgtggttgatttctgcctttgtattgacagggaattggtgaacttgaaatcatatgtcttgatttctccatatttaccaaagaaatagtagaatggagtagaggacatgggtaaaaaaattgt

SEQ ID NO: 9501 - DNA, 1229 bp, Glycine max
  Gm_smallRNAprecursor_2334
tttgtttgaaacagagatggatatgagtatgagttcattgggaggattgttgagcgggtctgcatcaagattaatcttactcatttacatgttgcgggttatttggttggactagagtcacaagtgccaagagccatgaagcttttggatgttggatctgatgatggtgtgcacatgatagagatccactgtataggtggaatagggaaaacaacattttagaatttgattgctaactgtttttgtggttcatgttttctttaagatgtgagagaaaaatcaaacaaacatggattacaacatttccagagcatccttctttcagaaataattaaactcataagtttaaaagaacatatgagctgaaagaattgagtaaggatgatgctcttcaattgcttactcaaaaaaagcttttaaaatgaaacaagttgatccaatacatgtggaggtcttaatggtgttgaaacatatgcatgaggccttccattgactttggaagtaataggttccaacttgttttgaaaaagtaagaagaagggaatatgctatcaaacaatatcaagaaattcctaataatcaaatcctagagatacttaaagtaagctttgatgcattggaagaagaagaaaaaagtgtttttcttgacattgcttgttgcttcaaaggatatgcattcatagaggttaaagatatacttgtgctcatcatggtgataacatgaaatatcatgttggcatgttagttgagaaatctctcataaaagttaagactgttacattgcatgacttgactgaggacatgggtaaaaaatttgtcactcaaggatcagcaagagagctgggaagcaaaggaagctataatccaagttttggaagacaacagagtgagagtgagtgagactcatgaatggtttggtttcttacctttatgtatctttttttactatcatatgttaacatcataattgttttttttataatatgtaaatttctctaaacatgtgtattgaagaagttttacactgtggttgatttctgcctttgtattgacagggaattggtgaacttgaaatcatatgtcttgatttctccatatttaccaaagaaatagtagaatggagtagaggacatgggtaaaaaaattgtcactcaagaatcaccaagagagctggggaagcaagtagattacagttagtggaagctataatccaagttttggaagacaac

SEQ ID NO: 9502 - DNA, 1073 bp, Glycine max
  Gm_smallRNAprecursor_2335
catgttgcgggttatttggttggactagagtcacaagtgccaagagccatgaagcttttggatgttggatctgatgatggtgtgcacatgatagagatccactgtataggtggaatagggaaaacaacattttagaatttgattgctaactgtttttgtggttcatgttttctttaagatgtgagagaaaaatcaaacaaacatggattacaacatttccagagcatccttctttcagaaataattaaactcataagtttaaaagaacatatgagctgaaagaattgagtaaggatgatgctcttcaattgcttactcaaaaaaagcttttaaaatgaaacaagttgatccaatacatgtggaggtcttaatggtgttgaaacatatgcatgaggccttccattgactttggaagtaataggttccaacttgttttgaaaaagtaagaagaagggaatatgctatcaaacaatatcaagaaattcctaataatcaaatcctagagatacttaaagtaagctttgatgcattggaagaagaagaaaaaagtgtttttcttgacattgcttgttgcttcaaaggatatgcattcatagaggttaaagatatacttgtgctcatcatggtgataacatgaaatatcatgttggcatgttagttgagaaatctctcataaaagttaagactgttacattgcatgacttgactgaggacatgggtaaaaaatttgtcactcaaggatcagcaagagagctgggaagcaaaggaagctataatccaagttttggaagacaacagagtgagagtgagtgagactcatgaatggtttggtttcttacctttatgtatctttttttactatcatatgttaacatcataattgttttttttataatatgtaaatttctctaaacatgtgtattgaagaagttttacactgtggttgatttctgcctttgtattgacagggaattggtgaacttgaaatcatatgtcttgatttctccatatttaccaaagaaatagtagaatggagtagaggacatgggtaaaaaaattgtcactcaagaatc

SEQ ID NO: 9503 - DNA, 1044 bp, Glycine max
  Gm_smallRNAprecursor_2336
ataaaataaaaaatataattttaaataaaacataaaattcaattcaacactaacataaaattcaatctaatagtttcatatttcaatgtgttatatatattaattattagcgggacaggttcagggacggattcgggacgagtattgagaatttcatccccgaccccgaacccgaatttggctatcggggaaaacctgaccccgacctcggtcaactcgaattttccccgtcaaaattggggcgggccccacgggttcgggcctcgttgccatgcctacctaccatgtctttagcactagtggctaaaccattcaaaagatcaattttgctgaaacaatttataaagagatttataaaactaggggaccaaatgtgttaattaaactatagggggaccaaaatcgatattggagtaaaactgaaggacaaaaagtgcaattttaccttaaaaaaatgaagcttttacggggaaccactcagactttgacacgcggcaatcaacgtctgaggttaacggtcaacgtctaaatcgagcttctaggaccaattttgcagggatttataaaattgggagaccaaatttgtgaattaaattataaggggactaaattcgtaattagaaataaagtgggggaccaattttgcaattttaccttcttattattgcactaaaaaatagacatttaataataccaccgttcttatgtaaaagaaataaatgagaatattttttcctaaatattagaaatatatgataatctttaaatgcatcaattgttaattttcttttttatttttatttattgtaaagactactaatgaaataaatcatacttattggtgaaaaaaattatccgttgaataataagtaatgacattaaatataattaccacttaatccatttgagtcaacgggtatttttgaaataaaatttaaatttattatactattaattaaaattaaccaaattaattatttttattggttttgatgaattgtgtatttatttcttatatataaaaatagagacaatatatattag

SEQ ID NO: 9504 - DNA, 1119 bp, Glycine max
  Gm_smallRNAprecursor_2337
acgcttcccctcatcaaagcattgtacccatttttgtttgggtaattgatcaagccattcagctgcacttggcttattcgcacgaatatccccaagatgtcgccagtgcatcttctctgtgtatgcgtaccctgtaaatatttaatcaatgtattatgttataaaatttgattgaaagaaaattataacgaataaataaaatagattctcaccagccaacataagtggtttctttaaatgtttgcagtttgagttaccacgaagaaagttttgtgcaatgtggcgcaggcaaaagaaatgggatgtgtcctggacccataagttacttgggttgttgtaggcacttataattgaggggtgtcggtctgaaataagagaaatgttaatttgcggagtaacatgtcttctcaaattctttagaaaaaacccccaagctgaagttgtctccccttctacaatggcataggcaatcgggaagatatggttagctccatcttgtgcggtagctatcaacagtgtgccagtatactttccgtaaagccatgtaccgtctacttgtacaatgggtttgcaaaatgcaaaaccattaatgcatggaccaaatgaccaaaagacacgtttaaacaatcttttgcccggtactatttctcccccctcatacaaggattctgtttgagcagcgaccacagtcccgggaacacaagattgcaaagctccgaaaagttttggcagtttggcatatgattcttcccagtttccatgaatcatctccaatgctttttgctttgctaaccatgtcttcttgtaggatggggtataattcatgaacgttttaatctctgcaatcaatgtcttgatggagacagttgggtttgttttgacaattggttggatgatctgtgctatgacgtgtttgtcgagttggcgatgatcttgtgtaagcatcggcacgagacaagtgtgatgacctctgatactcttgataatccatttgttatgcctctttgaattgcatgcgcccaagctccatgtacaaccattttcatgtaacttgcagacgaagtgtagccttctttggtcagagtaaattgttctgcaatcaaaatgatttctgatgtt

SEQ ID NO: 9505 - DNA, 1200 bp, Glycine max
  Gm_smallRNAprecursor_2338
acgcttcccctcatcaaagcattgtacccatttttgtttgggtaattgatcaagccattcagctgcacttggcttattcgcacgaatatccccaagatgtcgccagtgcatcttctctgtgtatgcgtaccctgtaaatatttaatcaatgtattatgttataaaatttgattgaaagaaaattataacgaataaataaaatagattctcaccagccaacataagtggtttctttaaatgtttgcagtttgagttaccacgaagaaagttttgtgcaatgtggcgcaggcaaaagaaatgggatgtgtcctggacccataagttacttgggttgttgtaggcacttataattgaggggtgtcggtctgaaataagagaaatgttaatttgcggagtaacatgtcttctcaaattctttagaaaaaacccccaagctgaagttgtctccccttctacaatggcataggcaatcgggaagatatggttagctccatcttgtgcggtagctatcaacagtgtgccagtatactttccgtaaagccatgtaccgtctacttgtacaatgggtttgcaaaatgcaaaaccattaatgcatggaccaaatgaccaaaagacacgtttaaacaatcttttgcccggtactatttctcccccctcatacaaggattctgtttgagcagcgaccacagtcccgggaacacaagattgcaaagctccgaaaagttttggcagtttggcatatgattcttcccagtttccatgaatcatctccaatgctttttgctttgctaaccatgtcttcttgtaggatggggtataattcatgaacgttttaatctctgcaatcaatgtcttgatggagacagttgggtttgttttgacaattggttggatgatctgtgctatgacgtgtttgtcgagttggcgatgatcttgtgtaagcatcggcacgagacaagtgtgatgacctctgatactcttgataatccatttgttatgcctctttgaattgcatgcgcccaagctccatgtacaaccattttcatgtaacttgcagacgaagtgtagccttctttggtcagagtaaattgttctgcaatcaaaatgatttctgatgttgtattctttgattgctcgaatacattgtgatttgtcatcgaaggtcatgccaacctcgagtacaccgactgatggttgtac

SEQ ID NO: 9506 - DNA, 1075 bp, Glycine max
  Gm_smallRNAprecursor_2339
gtgtatgcgtaccctgtaaatatttaatcaatgtattatgttataaaatttgattgaaagaaaattataacgaataaataaaatagattctcaccagccaacataagtggtttctttaaatgtttgcagtttgagttaccacgaagaaagttttgtgcaatgtggcgcaggcaaaagaaatgggatgtgtcctggacccataagttacttgggttgttgtaggcacttataattgaggggtgtcggtctgaaataagagaaatgttaatttgcggagtaacatgtcttctcaaattctttagaaaaaacccccaagctgaagttgtctccccttctacaatggcataggcaatcgggaagatatggttagctccatcttgtgcggtagctatcaacagtgtgccagtatactttccgtaaagccatgtaccgtctacttgtacaatgggtttgcaaaatgcaaaaccattaatgcatggaccaaatgaccaaaagacacgtttaaacaatcttttgcccggtactatttctcccccctcatacaaggattctgtttgagcagcgaccacagtcccgggaacacaagattgcaaagctccgaaaagttttggcagtttggcatatgattcttcccagtttccatgaatcatctccaatgctttttgctttgctaaccatgtcttcttgtaggatggggtataattcatgaacgttttaatctctgcaatcaatgtcttgatggagacagttgggtttgttttgacaattggttggatgatctgtgctatgacgtgtttgtcgagttggcgatgatcttgtgtaagcatcggcacgagacaagtgtgatgacctctgatactcttgataatccatttgttatgcctctttgaattgcatgcgcccaagctccatgtacaaccattttcatgtaacttgcagacgaagtgtagccttctttggtcagagtaaattgttctgcaatcaaaatgatttctgatgttgtattctttgattgctcgaatacattgtgatttgtcatcgaaggtcatgccaacctcgagtacaccgactgatg

SEQ ID NO: 9507 - DNA, 1077 bp, Glycine max
  Gm_smallRNAprecursor_2340
gtgtatgcgtaccctgtaaatatttaatcaatgtattatgttataaaatttgattgaaagaaaattataacgaataaataaaatagattctcaccagccaacataagtggtttctttaaatgtttgcagtttgagttaccacgaagaaagttttgtgcaatgtggcgcaggcaaaagaaatgggatgtgtcctggacccataagttacttgggttgttgtaggcacttataattgaggggtgtcggtctgaaataagagaaatgttaatttgcggagtaacatgtcttctcaaattctttagaaaaaacccccaagctgaagttgtctccccttctacaatggcataggcaatcgggaagatatggttagctccatcttgtgcggtagctatcaacagtgtgccagtatactttccgtaaagccatgtaccgtctacttgtacaatgggtttgcaaaatgcaaaaccattaatgcatggaccaaatgaccaaaagacacgtttaaacaatcttttgcccggtactatttctcccccctcatacaaggattctgtttgagcagcgaccacagtcccgggaacacaagattgcaaagctccgaaaagttttggcagtttggcatatgattcttcccagtttccatgaatcatctccaatgctttttgctttgctaaccatgtcttcttgtaggatggggtataattcatgaacgttttaatctctgcaatcaatgtcttgatggagacagttgggtttgttttgacaattggttggatgatctgtgctatgacgtgtttgtcgagttggcgatgatcttgtgtaagcatcggcacgagacaagtgtgatgacctctgatactcttgataatccatttgttatgcctctttgaattgcatgcgcccaagctccatgtacaaccattttcatgtaacttgcagacgaagtgtagccttctttggtcagagtaaattgttctgcaatcaaaatgatttctgatgttgtattctttgattgctcgaatacattgtgatttgtcatcgaaggtcatgccaacctcgagtacaccgactgatggt

SEQ ID NO: 9508 - DNA, 1078 bp, Glycine max
  Gm_smallRNAprecursor_2341
gtgtatgcgtaccctgtaaatatttaatcaatgtattatgttataaaatttgattgaaagaaaattataacgaataaataaaatagattctcaccagccaacataagtggtttctttaaatgtttgcagtttgagttaccacgaagaaagttttgtgcaatgtggcgcaggcaaaagaaatgggatgtgtcctggacccataagttacttgggttgttgtaggcacttataattgaggggtgtcggtctgaaataagagaaatgttaatttgcggagtaacatgtcttctcaaattctttagaaaaaacccccaagctgaagttgtctccccttctacaatggcataggcaatcgggaagatatggttagctccatcttgtgcggtagctatcaacagtgtgccagtatactttccgtaaagccatgtaccgtctacttgtacaatgggtttgcaaaatgcaaaaccattaatgcatggaccaaatgaccaaaagacacgtttaaacaatcttttgcccggtactatttctcccccctcatacaaggattctgtttgagcagcgaccacagtcccgggaacacaagattgcaaagctccgaaaagttttggcagtttggcatatgattcttcccagtttccatgaatcatctccaatgctttttgctttgctaaccatgtcttcttgtaggatggggtataattcatgaacgttttaatctctgcaatcaatgtcttgatggagacagttgggtttgttttgacaattggttggatgatctgtgctatgacgtgtttgtcgagttggcgatgatcttgtgtaagcatcggcacgagacaagtgtgatgacctctgatactcttgataatccatttgttatgcctctttgaattgcatgcgcccaagctccatgtacaaccattttcatgtaacttgcagacgaagtgtagccttctttggtcagagtaaattgttctgcaatcaaaatgatttctgatgttgtattctttgattgctcgaatacattgtgatttgtcatcgaaggtcatgccaacctcgagtacaccgactgatggtt

SEQ ID NO: 9509 - DNA, 1063 bp, Glycine max
  Gm_smallRNAprecursor_2342
cgtaccctgtaaatatttaatcaatgtattatgttataaaatttgattgaaagaaaattataacgaataaataaaatagattctcaccagccaacataagtggtttctttaaatgtttgcagtttgagttaccacgaagaaagttttgtgcaatgtggcgcaggcaaaagaaatgggatgtgtcctggacccataagttacttgggttgttgtaggcacttataattgaggggtgtcggtctgaaataagagaaatgttaatttgcggagtaacatgtcttctcaaattctttagaaaaaacccccaagctgaagttgtctccccttctacaatggcataggcaatcgggaagatatggttagctccatcttgtgcggtagctatcaacagtgtgccagtatactttccgtaaagccatgtaccgtctacttgtacaatgggtttgcaaaatgcaaaaccattaatgcatggaccaaatgaccaaaagacacgtttaaacaatcttttgcccggtactatttctcccccctcatacaaggattctgtttgagcagcgaccacagtcccgggaacacaagattgcaaagctccgaaaagttttggcagtttggcatatgattcttcccagtttccatgaatcatctccaatgctttttgctttgctaaccatgtcttcttgtaggatggggtataattcatgaacgttttaatctctgcaatcaatgtcttgatggagacagttgggtttgttttgacaattggttggatgatctgtgctatgacgtgtttgtcgagttggcgatgatcttgtgtaagcatcggcacgagacaagtgtgatgacctctgatactcttgataatccatttgttatgcctctttgaattgcatgcgcccaagctccatgtacaaccattttcatgtaacttgcagacgaagtgtagccttctttggtcagagtaaattgttctgcaatcaaaatgatttctgatgttgtattctttgattgctcgaatacattgtgatttgtcatcgaaggtcatgccaacctcgagtacaccgac

SEQ ID NO: 9510 - DNA, 1065 bp, Glycine max
  Gm_smallRNAprecursor_2343
cgtaccctgtaaatatttaatcaatgtattatgttataaaatttgattgaaagaaaattataacgaataaataaaatagattctcaccagccaacataagtggtttctttaaatgtttgcagtttgagttaccacgaagaaagttttgtgcaatgtggcgcaggcaaaagaaatgggatgtgtcctggacccataagttacttgggttgttgtaggcacttataattgaggggtgtcggtctgaaataagagaaatgttaatttgcggagtaacatgtcttctcaaattctttagaaaaaacccccaagctgaagttgtctccccttctacaatggcataggcaatcgggaagatatggttagctccatcttgtgcggtagctatcaacagtgtgccagtatactttccgtaaagccatgtaccgtctacttgtacaatgggtttgcaaaatgcaaaaccattaatgcatggaccaaatgaccaaaagacacgtttaaacaatcttttgcccggtactatttctcccccctcatacaaggattctgtttgagcagcgaccacagtcccgggaacacaagattgcaaagctccgaaaagttttggcagtttggcatatgattcttcccagtttccatgaatcatctccaatgctttttgctttgctaaccatgtcttcttgtaggatggggtataattcatgaacgttttaatctctgcaatcaatgtcttgatggagacagttgggtttgttttgacaattggttggatgatctgtgctatgacgtgtttgtcgagttggcgatgatcttgtgtaagcatcggcacgagacaagtgtgatgacctctgatactcttgataatccatttgttatgcctctttgaattgcatgcgcccaagctccatgtacaaccattttcatgtaacttgcagacgaagtgtagccttctttggtcagagtaaattgttctgcaatcaaaatgatttctgatgttgtattctttgattgctcgaatacattgtgatttgtcatcgaaggtcatgccaacctcgagtacaccgactg

SEQ ID NO: 9511 - DNA, 1212 bp, Glycine max
  Gm_smallRNAprecursor_2344
atgaaaccaaatcaaatagcaatccttactgttagttttgacaagtatcgaaatttgctaataaagcattgaaattagaattttttgttattaccaaccgataaaatcggtgattaacaccaaaaatccatatataggtaattcaattttaccagtggatttatcacagaagaaaacccaatgaaaatatgccgataggtaattttatcaacaaatattaggcaaatttctcaaactaggttacttttagaaactaattctcaaaaatgggttgttttgaaacttttttcgggggggtccgtttttgaaggggactcgccagtggggctggcgagttggacacgtggcggcgcctggtggactcgccagtggagttggcgagttgttgtccacgtggcaggtcccgccactcgtactggcgaaatgcttttttacggaaattttttttttaacttcaaacgggtataacttttgataagaatgtccgtttgaggcccataatatgtcaaaatgctcgaaattgaatgaagaatcccttggcaaatacccatagtggatctggtcaactcattttcccaaaaaatgcctctaagtagcttaaaaataggatttaagattaaaaaaatgggtggttgaatcttaaatccattttttgggaaaatgagttgaccaaatcccctatgggtatttgccaagggattcttcattcaatttcgagcattttgacatattatgtgcctcaaacggacattcctatcaaaagttatacccgtttgaagttaaaaatttttttcccgtaaaaaagcattttgccagtacgagtggcgggatccgccacgtggacaacaactcgccaactccactggtgagtcccccaggcgccgccacgtgtccaactcgtcagccccactggcgagtccccttcaaaaacggaccacccctagaaaaagtttcaaaacaacccctttttgagaattagtttctaaaagtaacctagtctgaaaaatttaccaccaaaataccaaattcatgggaaattatccataaaataatctgttagttagtaattatatgtacagacagattatcttgtgggcaagtatagatgaattattccatgggtaactttccatgaatttttccatgaataatttgaaaaattatctacagattattatgtcgacactaataaaaaaaactcctttttataac

SEQ ID NO: 9512 - DNA, 1212 bp, Glycine max; identical to SEQ ID NO: 9511
  Gm_smallRNAprecursor_2345

SEQ ID NO: 9513 - DNA, 1213 bp, Glycine max
  Gm_smallRNAprecursor_2346
atgaaaccaaatcaaatagcaatccttactgttagttttgacaagtatcgaaatttgctaataaagcattgaaattagaattttttgttattaccaaccgataaaatcggtgattaacaccaaaaatccatatataggtaattcaattttaccagtggatttatcacagaagaaaacccaatgaaaatatgccgataggtaattttatcaacaaatattaggcaaatttctcaaactaggttacttttagaaactaattctcaaaaatgggttgttttgaaacttttttcgggggggtccgtttttgaaggggactcgccagtggggctggcgagttggacacgtggcggcgcctggtggactcgccagtggagttggcgagttgttgtccacgtggcaggtcccgccactcgtactggcgaaatgcttttttacggaaattttttttttaacttcaaacgggtataacttttgataagaatgtccgtttgaggcccataatatgtcaaaatgctcgaaattgaatgaagaatcccttggcaaatacccatagtggatctggtcaactcattttcccaaaaaatgcctctaagtagcttaaaaataggatttaagattaaaaaaatgggtggttgaatcttaaatccattttttgggaaaatgagttgaccaaatcccctatgggtatttgccaagggattcttcattcaatttcgagcattttgacatattatgtgcctcaaacggacattcctatcaaaagttatacccgtttgaagttaaaaatttttttcccgtaaaaaagcattttgccagtacgagtggcgggatccgccacgtggacaacaactcgccaactccactggtgagtcccccaggcgccgccacgtgtccaactcgtcagccccactggcgagtccccttcaaaaacggaccacccctagaaaaagtttcaaaacaacccctttttgagaattagtttctaaaagtaacctagtctgaaaaatttaccaccaaaataccaaattcatgggaaattatccataaaataatctgttagttagtaattatatgtacagacagattatcttgtgggcaagtatagatgaattattccatgggtaactttccatgaatttttccatgaataatttgaaaaattatctacagattattatgtcgacactaataaaaaaaactcctttttataact

SEQ ID NO: 9514 - DNA, 1213 bp, Glycine max; identical to SEQ ID NO: 9513
  Gm_smallRNAprecursor_2347

SEQ ID NO: 9515 - DNA, 1188 bp, Glycine max
  Gm_smallRNAprecursor_2348
agccgtctttgcattttctgggtcaacaaacatctttgtctttcgcctataccagaccatgtagtccgagttaaaactcaataggccttcttgtcggggataagcgtcgaccctaaatgcatgtcgattattccactgttgaatcattggggcgaataattgcccccaattttcgtcatgtttcccctttaatgttatgccatgaatgtttaggggttgtgaaggagactctggaactggttgctgcatcccgaattgtctcaagactctgtctggttggtgccactcaataacttggaaacaaattagtggcaccaccacgtaccacgcgatacttccgactaaacaaacgggaggcaacaatgatataacggttgatgggtaaggctcccacacaaactgcatataacaacatagttgtgaacactgtagtaaaataagacataattttttattttacaaatacaatagcatgcttcttacctcatgacgtttcataatatccaacttgcgacgaaaaactttcacatcatcattgccgatatgttggtttccacgtcgcagccacctacaaagaataaaatttaatataccctaaaaccatttattctattgaaatgaaagacgctgttaaaaatgactcacctgtgccctagtggtgtattttctatttgggaaggagtcctctttggagccaaggttggacatcgttcccatgcccacaattgtagtaagatgcacatacctccgattgatttagttttataatcggtggcactgcacatctctctatatagaaaaccaagtacggcagctccccatgcatatctgccacattcttcaaagtcacgtaaaaattgaaggtaccttaccgaaactctgttactggttttgtcaacgaacaagacacctccaataaatctcagtatccatgcacgggcaaaccttcgtacttgttcttcgtcgtcatcattatttatttgatcaaaatggtgagccagccaacttaatttaaccacactacctttaatttcaccttcttgtggtctgactcccaataattcctcacagaaatcagcccaatcaagatttgttggaccgattaatggtaaaccatccacacttatacctaacaacacagagacgtcttgtagagtgatagtacactctccgcatctcatgtgaaac

SEQ ID NO: 9516 - DNA, 1044 bp, Glycine max
  Gm_smallRNAprecursor_2349
cgcaatttttcactcacttggaatccagagaaaaatcactctttgtctctctcccacttccggggttgttcaacttggaaaagtggcacatgaatcttaaccttggtctgaaattttcagatctcttactttaataggttcggtaataacccccttattttttttctttttttgctctcccatgcggtattatgtgtatacgactgcttaagtggcctatgtatgacaatgatatttttgtttgaaatttgaaatacaatttctccaataataaaatttggctgaatttataaagggatttataaaactgggggaccaaatgtgcgaattaaattataaggggactaaaatcgaaattagagtaaaactgggagactaaaagtataagtttacctaaaaaaaatgaagtctttacagggaatcacgcaaacgttgacatgtggcattgatacatgacattgacatgtggcagtcacacgtggcattgacacgtgacagtcaacgtctgaggttaacggtcaacattcaaatcggacttccaggaccaattttgcagggatttataaaattgggggatcaaatttatgaattaaattatagggggaccaaatccaaaattggagataaattgggggaccaaaagtacaattttgcttaaaatctttttccttatatttttttaaactaatgtcttaatttgttatgcatatatattactcctataatttgtgtttattactttgatactttattttcattcattattttttataagcttttcccaatttcaacccattaaaaaaacactacaataaaattaggtccaagaaacaatccagctattaattatcgacaacaattaatcagcataccaacagggattggatctagcggaagagactaatttttcacatgctaaaccaaggttcgaattccagttgagagaggtgtttatatctagtgtctaacagtacttccaacatgagatacctttatatgcactccttttttgctaagtacactttccttctccttttttaaaat

SEQ ID NO: 9517 - DNA, 1045 bp, Glycine max
  Gm_smallRNAprecursor_2350
cgtcaacaccaatgggcgaggtctgcataatcattctcttttcctcttttttttttcttcaattaccatcaatgtatcattccgggttctgatttttttgtgtgtgttctgaataggaagagaaaaaaccagagaaaaacaaagtggaggataataaagcagaggaagaagaaaagaaagaagaagagaaaaaatcaaaggaatcaaaagatgacaagaaatccaaggaggaatctacaccgtcaaaaatcgtgcaaggcacaaccttcgcaatgcatggacattttaagcacgatttctgacatctttttaagttagggactattttgcaacacttatgcaaaagatatggactattgtgaatttttcattaagttatggactaatatgcaacaggagtacaaagtcagggactaaattgcctatttactcgttttgctatcatcaaatgatgtgacatcttttaagaggcacgtccatgtgtcatgccacgtcatcctttagtgccacgttggatagttcacgtggcactaaaattgacctcactaacggcgttactttaaaatttaacggaatgactattttgcaacacttatgcaaagatagaaactattttgaatttaatattaagttagagactaatatgcaaaatgagtacaatctcagggactaaattgactattcactcaaattttaatgttcagatttatggtcttatctttacttatatggtgtttaaccttttcatttatatcaaatgtgaaactttacctcatacttatatttcaacaatttcttcctcaaatgtgagtctttttcacatgatagtctcatcctcaagtgaaaatcattttcattcactggtatttcatggtggcccttaaagcttaaatgtggtagtttcttccacatggttgcccacgaagaactacctaattgaagcatgaattgattccttttacttttagaccatttatcattttttttgtttaaatatttttttcttgcaatttagtattttttttattttcgtccttgtaaaaaa

SEQ ID NO: 9518 - DNA, 1045 bp, Glycine max; identical to SEQ ID NO: 9517
  Gm_smallRNAprecursor_2351

SEQ ID NO: 9519 - DNA, 1046 bp, Glycine max
  Gm_smallRNAprecursor_2352
cgtcaacaccaatgggcgaggtctgcataatcattctcttttcctcttttttttttcttcaattaccatcaatgtatcattccgggttctgatttttttgtgtgtgttctgaataggaagagaaaaaaccagagaaaaacaaagtggaggataataaagcagaggaagaagaaaagaaagaagaagagaaaaaatcaaaggaatcaaaagatgacaagaaatccaaggaggaatctacaccgtcaaaaatcgtgcaaggcacaaccttcgcaatgcatggacattttaagcacgatttctgacatctttttaagttagggactattttgcaacacttatgcaaaagatatggactattgtgaatttttcattaagttatggactaatatgcaacaggagtacaaagtcagggactaaattgcctatttactcgttttgctatcatcaaatgatgtgacatcttttaagaggcacgtccatgtgtcatgccacgtcatcctttagtgccacgttggatagttcacgtggcactaaaattgacctcactaacggcgttactttaaaatttaacggaatgactattttgcaacacttatgcaaagatagaaactattttgaatttaatattaagttagagactaatatgcaaaatgagtacaatctcagggactaaattgactattcactcaaattttaatgttcagatttatggtcttatctttacttatatggtgtttaaccttttcatttatatcaaatgtgaaactttacctcatacttatatttcaacaatttcttcctcaaatgtgagtctttttcacatgatagtctcatcctcaagtgaaaatcattttcattcactggtatttcatggtggcccttaaagcttaaatgtggtagtttcttccacatggttgcccacgaagaactacctaattgaagcatgaattgattccttttacttttagaccatttatcattttttttgtttaaatatttttttcttgcaatttagtattttttttattttcgtccttgtaaaaaaa

SEQ ID NO: 9520 - DNA, 1046 bp, Glycine max; identical to SEQ ID NO: 9519
  Gm_smallRNAprecursor_2353

SEQ ID NO: 9521 - DNA, 1046 bp, Glycine max; identical to SEQ ID NO: 9519
  Gm_smallRNAprecursor_2354

SEQ ID NO: 9522 - DNA, 1046 bp, Glycine max; identical to SEQ ID NO: 9519
  Gm_smallRNAprecursor_2355

SEQ ID NO: 9523 - DNA, 1044 bp, Glycine max
  Gm_smallRNAprecursor_2356
gtcaacaccaatgggcgaggtctgcataatcattctcttttcctcttttttttttcttcaattaccatcaatgtatcattccgggttctgatttttttgtgtgtgttctgaataggaagagaaaaaaccagagaaaaacaaagtggaggataataaagcagaggaagaagaaaagaaagaagaagagaaaaaatcaaaggaatcaaaagatgacaagaaatccaaggaggaatctacaccgtcaaaaatcgtgcaaggcacaaccttcgcaatgcatggacattttaagcacgatttctgacatctttttaagttagggactattttgcaacacttatgcaaaagatatggactattgtgaatttttcattaagttatggactaatatgcaacaggagtacaaagtcagggactaaattgcctatttactcgttttgctatcatcaaatgatgtgacatcttttaagaggcacgtccatgtgtcatgccacgtcatcctttagtgccacgttggatagttcacgtggcactaaaattgacctcactaacggcgttactttaaaatttaacggaatgactattttgcaacacttatgcaaagatagaaactattttgaatttaatattaagttagagactaatatgcaaaatgagtacaatctcagggactaaattgactattcactcaaattttaatgttcagatttatggtcttatctttacttatatggtgtttaaccttttcatttatatcaaatgtgaaactttacctcatacttatatttcaacaatttcttcctcaaatgtgagtctttttcacatgatagtctcatcctcaagtgaaaatcattttcattcactggtatttcatggtggcccttaaagcttaaatgtggtagtttcttccacatggttgcccacgaagaactacctaattgaagcatgaattgattccttttacttttagaccatttatcattttttttgtttaaatatttttttcttgcaatttagtattttttttattttcgtccttgtaaaaaa

SEQ ID NO: 9524 - DNA, 1044 bp, Glycine max; identical to SEQ ID NO: 9523
  Gm_smallRNAprecursor_2357

SEQ ID NO: 9525 - DNA, 1036 bp, Glycine max
  Gm_smallRNAprecursor_2358
gaaatgcagctggaagatatctttacaaaaggattaaaggtgaatagctttgtagtgttgagagacaagcttggtgtttcacctatggagattttgaattaagggggtgtgttagttgtaattcagaatattagttgtaaagtttggtagtttgtttagttagttgagtgtgataaggcagtgattgaggctgaacttgagccttataaatagtctctgtgtaattcaattcataatgcaattcatctcattttagtatatgttttttcttggctttctctctttctccccaacagatttggtatcaagagcactaagtcttgggactaggtgggataagagagttgtgaactgagaaagagtggtgagagattcaaacagtgggctttttaacccgcgagttaagagtgctgctaggtgcacccaacatattgctagtgcacccagcactaaccacgaaaagacaaaaatactccttatggatcaagttgatccataagttaatttttaagacttacggatcaacttcatccgtaagtcttttacggatcaagttacagatcaacttgatccgtaagtcttttacggatcaagttgatccgtaagttttttacggatcaagttgatccgtaagttttttacggatcaagttgatccataagtattaaaaatcaacttacggatcaacttgatccgtaaggggagaaattagcagggacagtttttccattttaaaagaatgttgggtgcaccagcaataatgctgggtgcacctagcaacactcgggagttaattggtatacccatggcttccacaaactttgtatttcttcaaaaaatctatatctctataataaatgaacaaccaaaacgcacactctgttcccaattttgcgcaatttcccaattttgtttcctctatttttcttccgctaatttcacagtttttttcaaaattccaaatttcaaaattcacaaattatggtttcttcctctagccgaggtacctacatctgcacctccgagctagcataga

SEQ ID NO: 9526 - DNA, 1076 bp, Glycine max
  Gm_smallRNAprecursor_2359
gaaatgcagctggaagatatctttacaaaaggattaaaggtgaatagctttgtagtgttgagagacaagcttggtgtttcacctatggagattttgaattaagggggtgtgttagttgtaattcagaatattagttgtaaagtttggtagtttgtttagttagttgagtgtgataaggcagtgattgaggctgaacttgagccttataaatagtctctgtgtaattcaattcataatgcaattcatctcattttagtatatgttttttcttggctttctctctttctccccaacagatttggtatcaagagcactaagtcttgggactaggtgggataagagagttgtgaactgagaaagagtggtgagagattcaaacagtgggctttttaacccgcgagttaagagtgctgctaggtgcacccaacatattgctagtgcacccagcactaaccacgaaaagacaaaaatactccttatggatcaagttgatccataagttaatttttaagacttacggatcaacttcatccgtaagtcttttacggatcaagttacagatcaacttgatccgtaagtcttttacggatcaagttgatccgtaagttttttacggatcaagttgatccgtaagttttttacggatcaagttgatccataagtattaaaaatcaacttacggatcaacttgatccgtaaggggagaaattagcagggacagtttttccattttaaaagaatgttgggtgcaccagcaataatgctgggtgcacctagcaacactcgggagttaattggtatacccatggcttccacaaactttgtatttcttcaaaaaatctatatctctataataaatgaacaaccaaaacgcacactctgttcccaattttgcgcaatttcccaattttgtttcctctatttttcttccgctaatttcacagtttttttcaaaattccaaatttcaaaattcacaaattatggtttcttcctctagccgaggtacctacatctgcacctccgagctagcatagatgtggaagtacactacccaaacctatgaggtcacgccgcc

SEQ ID NO: 9527 - DNA, 1041 bp, Glycine max
  Gm_smallRNAprecursor_2360
atataaatctaaataggaggctctgccacctttgctgatttatattatattattgtactactatttttacttttattgtactactattttcactttttcgttgtttaaaatacaagcttgatattattgcacaatgaactattacaaactttttcctctctatttctctcacttgtttttctagtgttttctggcgtgtctacaactgagtccgaagaccctttatatagagaaaacagaaagaaaaagacaaaagccctttcagtcaagaacagtaaagttactcttcatttactttgtcgtagggctctttttactataaaattttatagatagaccaagtgtcagagtctttgcaatagtaaagattcccgccttgaatttacaactgtattttggcaggatacttctgtcttcagttctttgttgattttgtaatagtaacatcttcttcttcttggatatttccagaatcagaaaatgtctgatgagtcttccattgagagatcagtggatggaaaaggaggagtctattgtccatgacatccactggcttcgtaaatctctttatctttcttctctttttggaagaattggaccaattttttgttgtgatcaactgggaagggaatgaagaacttcccatagtatgatggttggaagagctttgtgtcataagtttctcttattaggtcaaactctcgtttgtctgattctgagaagaaccattggtacccttgtatttgtgccctcatgaggctgtattggtactgtgtgttaccctgtacatcccaactttcatattcatcattgaacagacagggaaaatttctatgatcctctggtaggagtttcatgacatggcaagggtaattttgtgcagaaaaattgttcgggtaggttgttattttgatggcaatgtaatccatcatttctgcttgtattaggtttatagcttcattaattgaggggttaaatccttcaaatctatccgatggaggaatcaagattgattccaaacatccataatccagtaggctc

SEQ ID NO: 9528 - DNA, 1119 bp, Glycine max
  Gm_smallRNAprecursor_2361
tccccttatcgaagcattgtacccatttttgtttgggtaattgatcaagccattcagctgcacttggcttattcgcacggatatccccaagatgtcgtcggtgcatcttcttcgtgtatgcgtaacctgtaaatattcaatgaatgtattatgttataaaatttgattgaaagaaaattttaacgaataaataaaatagattctcatcaaccaacatgagtgatttctttaaatgtttgcagtttgagttaccgcgaacaaagttttgtgcaatgtggcgcaggcaaaagaaatgaaatgagatgtgtcctggacccataagttactagggttgttgtaggcacttataattgaggggtgttggtctaaaatgagagaaatgttaatttgcggagtaacatgtcttctcaaattctttagataaaaccccaagctgaagttatctccctttctacaatggcgtagggcaattgggaagatatgattagctccatcttgtgcggtagctatcaacagtgtgccagtatacttcccgtaaagccatgtaccatctacttgtactatgggtttgcaatatgcaaaaccattaatgcatgaaccaaatgaccaaaagacacgtttaaacaatcttttgcccggtactatttgtcccccctcatacaaggattctgtttgagcagcgaccacagttccgggaatacaagattgcaaagctccgaaaagttttggcagtttggcgtatgattcttcccagtttccatgaatcatctccaacgctctttgctttgctaaccatgtcttcttgtaggatgggatataattcatgaatattttttgatggagacaattgggtttgttttgacaattggttggataatttgtgctatcacatgtttgtcaagttggcgatgatcttatctgagcattggcatgagacaagtgtgatgacctctgatactcttgataattcatttgttatgcctctttgaattacatgcgcccaagctccatgtacaaccattttcatgtaacttacaaacgaagtttagccttctctggttagagtaaactgttgtgcaatcaaaatgatttctgatgttgtattttttgattgctcga

SEQ ID NO: 9529 - DNA, 1200 bp, Glycine max
  Gm_smallRNAprecursor_2362
tccccttatcgaagcattgtacccatttttgtttgggtaattgatcaagccattcagctgcacttggcttattcgcacggatatccccaagatgtcgtcggtgcatcttcttcgtgtatgcgtaacctgtaaatattcaatgaatgtattatgttataaaatttgattgaaagaaaattttaacgaataaataaaatagattctcatcaaccaacatgagtgatttctttaaatgtttgcagtttgagttaccgcgaacaaagttttgtgcaatgtggcgcaggcaaaagaaatgaaatgagatgtgtcctggacccataagttactagggttgttgtaggcacttataattgaggggtgttggtctaaaatgagagaaatgttaatttgcggagtaacatgtcttctcaaattctttagataaaaccccaagctgaagttatctccctttctacaatggcgtagggcaattgggaagatatgattagctccatcttgtgcggtagctatcaacagtgtgccagtatacttcccgtaaagccatgtaccatctacttgtactatgggtttgcaatatgcaaaaccattaatgcatgaaccaaatgaccaaaagacacgtttaaacaatcttttgcccggtactatttgtcccccctcatacaaggattctgtttgagcagcgaccacagttccgggaatacaagattgcaaagctccgaaaagttttggcagtttggcgtatgattcttcccagtttccatgaatcatctccaacgctctttgctttgctaaccatgtcttcttgtaggatgggatataattcatgaatattttttgatggagacaattgggtttgttttgacaattggttggataatttgtgctatcacatgtttgtcaagttggcgatgatcttatctgagcattggcatgagacaagtgtgatgacctctgatactcttgataattcatttgttatgcctctttgaattacatgcgcccaagctccatgtacaaccattttcatgtaacttacaaacgaagtttagccttctctggttagagtaaactgttgtgcaatcaaaatgatttctgatgttgtattttttgattgctcgaatacattgtgctttgtcatcgaaggtcatgccaacctcgagtataccgattggtgattgtacattgtgttgctgatgaaaa

SEQ ID NO: 9530 - DNA, 1160 bp, Glycine max
  Gm_smallRNAprecursor_2363
catggtcttgtgccgctttttatgtcaataaacaatctgagcttgagcgaggaacacctcgcttagtcataaattacaaaccactgaatcaggcattacaatggattaggtatcctattccaaacacaaaagatttacttcacagattaaattctacaaaaatattttcaaaatttgatatgaaatctggattttggcaaatccaaattcaagaatcagataggtacaaaacaacttttactgtacctttcgggcaatatgaatggaatgtgatgccattcggactgaagaatgcccctttagaatttcaaaaattatgaatgatatttttaatccctattcaaaatttgtcattgtctacatagatgatgttttaatcttttcccaaaacattgaccaacatttcaaacatctccagactttcatccatatcattaaacaaaatggtttggcagtctccaaatcaaaaatcaatcttttccaaactcgaattcgattccttggtcacaatatatatcaaggtacaatcattccaatagaaaggtcatgctagcaaatttcccaaccaaatcttagacaaaatccagttacaaagatttctaggttgtctaaattatgtaggagaatttgtcccctatttaaacaatattgttaagccattgcatgataggctgaagaaaaatccgcctccttggtctgatctccatacccaaacagttaatgagatcaaactcaaagtccaatctataaaatgtctatatcttcctattcctcaggcatttaaaattgtcgaaatcgatgcatcagacataggttatggtggcatcctcaaacaaagagtacatggtcaagatcatgtcattgcatatacatcaaaacattggaatcctgcacaattaaaatattcaattgttaaaaaggaagttttagcaattgttttgtgcatttccaaatttcaatctgatttactaaatcaaaattttttaataagggttgattggaaatcagccaaagacattcttcaaaaagatgttaaaaatcttgcatcaaaacaaatttttgctagatggcaagcaatcttgagtgtctttgattttgaaatagaatacttcaagggcacctcaaattctctacctgactacctcacacatgaattttta

SEQ ID NO: 9531 - DNA, 1037 bp, Glycine max
  Gm_smallRNAprecursor_2364
ttttcccaaaacattgaccaacatttcaaacatctccagactttcatccatatcattaaacaaaatggtttggcagtctccaaatcaaaaatcaatcttttccaaactcgaattcgattccttggtcacaatatatatcaaggtacaatcattccaatagaaaggtcatgctagcaaatttcccaaccaaatcttagacaaaatccagttacaaagatttctaggttgtctaaattatgtaggagaatttgtcccctatttaaacaatattgttaagccattgcatgataggctgaagaaaaatccgcctccttggtctgatctccatacccaaacagttaatgagatcaaactcaaagtccaatctataaaatgtctatatcttcctattcctcaggcatttaaaattgtcgaaatcgatgcatcagacataggttatggtggcatcctcaaacaaagagtacatggtcaagatcatgtcattgcatatacatcaaaacattggaatcctgcacaattaaaatattcaattgttaaaaaggaagttttagcaattgttttgtgcatttccaaatttcaatctgatttactaaatcaaaattttttaataagggttgattggaaatcagccaaagacattcttcaaaaagatgttaaaaatcttgcatcaaaacaaatttttgctagatggcaagcaatcttgagtgtctttgattttgaaatagaatacttcaagggcacctcaaattctctacctgactacctcacacatgaatttttacagaaaaatattgatgcctcctaaggtgtcaagctcctccgggagagaaggaagatcgagtagtaaaggaaagaagttctttttagctctactagagccaataataaaaaagacaacttcatcatcctctgggtcacctacctagactgggtcatcaacccaaaaaacaaaaattgaagggtcattgacccaaatagctaccattaaacctgagtcatccactcaggactcccccaaactagtaatagcaaaacag

SEQ ID NO: 9532 - DNA, 1070 bp, Glycine max
  Gm_smallRNAprecursor_2365
agttttatttttatattttatttataactttttttttaaaaaaagtgtagaacaataccaactttattttgttctatacataatcgacttaagataatcactatataagaaagcagcgaaattatttttctattcttccttttcacaaaaaatctctaaaaccttaattatgaagtacttttaatttttaaattaaataaaattaataaaaaataagtagttattagttttatttttaaggcaaaattacatttttggtccccagattatctccagtttcgaatttagtcccctagtaatttaattcacgaattgggtcctcatatcttataaaatcgtgcaatgttggtcccacaagccacaattagatgttgaccgttagcaagtgacgttgactgccacgtgtcatgttttttattggatgatgactgtcacgtgtcatgttctgattggatgttaattccatgaaagatgaaaatacattgttgttttcattgaccaatcagaacatgacacgtgacaaccatcatccaataaaaacgtgacacgtggtagtcaacattcctttgtaacggtcaacgtccaattgtggcctgggggaccaacattgtacgataataagaggaccaatttgtgaattaaattactgagagaccaaattcgaaactaaagataaatggaggaaccaaatttataattttacctatttttaagtcgttatgagaccaaatgataaattgactataaggcacaagcatcgttgaatatcctcttgttactggtaaagtttcatattgcaattatctgacatgttttatgcatttcatgtttactagtataatcgaaattatacataataattattaataaaatttggtcaaataataaaattcctccctgctcttgaatttctcttgtgtacgtactatttaatttctgcctggttatagtattaccaatgtagtaaaacaaattaaaaatggttgaaaattatattttctattttaacaaggagaatatttgaaatttcttagcacccaacgaattttcatcccattttggagtaaagc

SEQ ID NO: 9533 - DNA, 1183 bp, Glycine max
  Gm_smallRNAprecursor_2366
tagcctctttgttaaaagattcaacaaatttattagaatgagaggaaatcaaagaagacaaaacttcaaacctaaaagaagaactgaaaagtcatctcaaattccaaaattctttgagatcaatcaacccggacatctgagggctgattgtccaatttttaagagaaaaatagagaagtctgaaaagaagactattggagataagaaggcaaagaaggcctatatcacatgggatgataacgacttagaatcgtctgatgattttgaaaaagaaatgattaatctatgtctaatgggcaaaaattatgaaagcaacgaagaggtgtctttgaagaagaaatggtacatagatagtggttgtttaaagcatatgacgggagattcatcaaagttcacacatatctctcccaagaaaagtgggcatgttacttatggtgataacaacaaaggtagaattcttggagttggaaaaatagatgatgttgcagaatatttagaacaaatgcatattcatggacaagactctaaaggaaaagggaaaggaagcaatgaagatcctccagaagaagccaccaaatcaaatgatgaacttccaaaagaatggaaagcttcaaaagatcatccccttgacagcattattggtgatatttcaaaaggggtaactagacattctcttaaatatttatgcaataatatgacttttgtgtctatgattgaaccaaaaaatataaatgaagccataatagatgatcattggattgttgctatgcaagaagaactaaaacagtttgaaagaaacaatgtgtgggaactagtagagaaacctgaaaactaccccatcataggaacaaaatgggtatttaggaataagttagatgaacatggcataatcattagaaataaggctaaattagttgcaaaaggatacaatcaagaagaaggtatagattatgaagaaacatatgcttcagttgcaagattagaagccattagaatgctcttagcttatgcatccataatgaattttaagctttatcaaatggatgttaaaagtgcttttataaatggcttaattcaggaagaattatatgttgaacaacctccaggttttgaaatatcagataagccaaatcatgtttatagattgaaaaaggctttatatggtttgaaacaagcctccagg

SEQ ID NO: 9534 - DNA, 1131 bp, Glycine max
  Gm_smallRNAprecursor_2367
aaaatgacggatgtcatggcggacaaaaaaaaaatacatatatataaactcattgaaattgaaaaaaacaatggattacattcaaataaactaaaaaagtttcatgagctcatacaataatcaattaccaacaccaaataaactcattaaagagttcaaaataagaaaatgataaaaacataatgtaaagtgcaaagtgaaggttgaggctctaatcatcttctccaatcctaacataatcatcttcgttgttatcatattgtaatggagcatctccctctccctcttccccatcagacgcctcaaaattgaccatgatttcttctttttcatattcaagatcaatattctcctcaaaatctagatcctcatcattttcttggactgctttttgcttccttgatgaagatccaacaatcattgcctgttttttagaagtttgggcagcaacaacacttgttgttttttgctttttccgcctagtatacatcctacactctccaacccccgaagcctgatacacagttgcccaatttagagcatcatcatcttcaaataccaaatcatttccagcatcattatcatcatcttgatccatctctcccacgagccattcattgcacacatcaatatcattaagagaaattggatcaatttcatctcttgcattatatctttgcttcaattgttggttgtatttgacaaacacaaaatcatgcaacctcttgtgctcaaacctatttcttttattgggaatgaatctacaacataacaaataaatgttgatttcaatctcaaatatactccaaataaaacttgatcatcaaaattaaataaaattaaaaagtatagttagagttttgccacaattacttactcaaacacactccaatttctttcacatcctgaagcactgcaagtcaaactcaaaattttaatagctagcttctgcaaatttggagtttgtgatccaaacattcgccaccaatatactgcaataccaattaccaaccaagagcataacttagaattctaaattataacactaatacataaaaaaatagtatagtatttgtatttgttatatggtaaaagtttcttactaggagaatgagttttcctttgagccat

SEQ ID NO: 9535 - DNA, 1187 bp, Glycine max
  Gm_smallRNAprecursor_2368
ggtagaatgacgaccatttgccagtgtccactgcagtagagacgaatatagtttattgtagtagtatagattatttaaattcaattattgtgtttgacttacctattcagataggctccaaggtaaacatctcgttttgaactctgtatccaactcttgatgtaactttcggattcaaattgtgattgtccagatctctgaatgaactgtggctcgaggaatccatacacatcagaattccccgctcgcacacttgtctcagtcagatggctgtgttgttaagtcaaagttaattatgtatgaatttaaaacaattactttggtaattaatagtaatctaaaatgacttacagaatccacaactgtataactgatatgctgagacattgaccaccatgtgcaatttcagagagatcttcgtgctttatatacaacgggaagttttgattaaacaccccgaatatggtagcatcccacataacctggagcggcttcaaaaacagttgtgggatggtcaatgtcatcaggtacaggggatcatcgacctcttcatccgggctttctggaggttttgctggagacacagctgcctattgataaaacatagttaattagcaagttttgattacagtgaacaaattaattgaaaaaaataaacatataatcagagtaaaatacctgttctgataaacgcttcacaagatgtgttggccaagcaaggaaagtgttaagtgcctgccccactaaggtaacctcggtagtgggtacaggaacgagagcctctgtatctttaacctcctcaacaccaaccttgacttggccatgcaacaacgggatgttgtgaactgttgtggatccctcgtaaagtcttcctagggcaaccaagcgggaaggattttcttcaatatataggccgcatttgtctgagtcacccatccctggattgttccctgagggagcaacacaactctcctttgtactgacacgaggacctgagggaccaacctctgactctggaggtagtgcaattccctgtgattgcatctgagactgaaactgcgactgcatctggctgaaggattccatcatctttcgagtcactttttctgtgattgactcctccagttggtctctgatttgttgggtcagctgttctaggtcttcaagaggcatggaggaagaactgc

SEQ ID NO: 9536 - DNA, 1116 bp, Glycine max
  Gm_smallRNAprecursor_2369
ttcataacccccacgagacaatacgtggggggcagtgttttgcttctgggaggcctgtgccttttttcgtacatcctgcaaaagtttaacattaatgaaaatgattattacaataaattataagaaatgattttgttgtggaaaacaactaaaatgacaaagtacatacctcccatgaggggtctctacgggtctgacaaaactgagtccatttctccttgctaatgccatatttttcacagacaatgtcgtccgcaccgtccttgtcgactgcaagtgctcatttcctagtcaagtcagatttaaattgcctccagcgctcgccgacaatctgaagaattttcttctttgtcctattgtcagaagcttcagggatttgaaattccgcctgacaaacaataaattaggttttgttgtaagtaaataacaaatttagactattaaagaaaatcaacgaagaaaactcaaatacctgaatatcctcccatatcaaatccttctgagcagtagggacttccttccaggtgtcatatgtcacgtcgaccttatcacgagcgacaatccccaaatatgttcttaatttcttcttgtagggaccgtcggccttgccggtagcaggatcgacgttgaccacaggtctttctgccccaggtggtctagtggccaatgatcgtagccgtgtcgccttgcgtgtccgcttcaacgtagatggagacgcatcagcgtttgcaggaggaggaggaagaggaggaggaggcgaggcaggtggagtattcatggtcctttaaagaaaaaaagttgagttagttaatattatcaaaaaacactgtatgagttatgtaaatgaatgtaccgaaatgaaatattatattagaaaattacgttagacgatgttaattaattctccttcatcatgatcattacgattagcatgaacatcgtcagcttcttcttctccaacgttgttagaagtcatttgtgtagacaaaggactaacataagtgtccatgtatgaatcatcatcttctacattaacaccaattgttttcccgtttagaaccacagaccacctttcatcacaagggtcttgcacataaaatacttgcttagcttgtt

SEQ ID NO: 9537 - DNA, 1132 bp, Glycine max
  Gm_smallRNAprecursor_2370
ttctgactttgcaatggctcaaaggaaaactcattctcctagtaagaaacttttaccatatgacaaatacaaataccatactattttttaatgtattagtgttataattcagaattctaactttgaagttatgctcttggttggtaattggtattgcagcatattggtggcgaatgtttgggtcacaaactccaaatttgcagaagctagcaattaaaattttgagtttgacttgcagtgcttcaagatgtgaaagaaattggagtgtgtttgagcaagtaattgtgacaaaactctaactatactttttaattttatttaattttgatgatcaagttttatttggagtatatttgagattgaaatcaacatttatttgttatgttgtagattcattccaaaaaaagaaataggcttgagcacaagaggttgcatgatttggtgtttgtcaaatacaaccaacaattgaagcaaagatataatgcaagagatgaaattgatccaatttctcttaatgatattgatgtgtgcaatgaatggcttgtgggagagatggatcaagatgatgataatgatgctggaaatgatttggtatttgaagatgatgatgctctaaattgggcaactgtgtatcaggcttcgggggttggagagtgtaggatgtatactaggcggaaaaagcaaaaaacaagtgttgctgctgcccaaacttctaaaaaacaggcaatggttgttggatcttcatcaaggaagcaaaaagcagtccaagaaaatgatgaggatctagattttgaggaaatattgatgttgaatctgaagaagaagaagtcatggtcaattttgaggcgtctgatggggaagaaggagagggagatgctccattagcatatgataacaacgaagatgattatgttgggattagagaagatgattagagcctcaaccttcactttgcactttgcattatatttttatcattttcttattttgaactctttaatgagtttatttggtgttggtacttaattattgtatgaactcatgaaactttcttagtttattagaatgcaatcctttgtttgtttcaatttcaatgagtttatatatatgttttttttttgtccgccatgac

SEQ ID NO: 9538 - DNA, 1032 bp, Glycine max
  Gm_smallRNAprecursor_2371
agaatgccatttcagaatttttaaaacttaaggtcccattaagggttgttgctagttttctggttatgtttttaaaatacattttaaaaacaaaacatgttcggatgaaataaagttgggtttgtttttttacctattttgaaaacacttttcctatcattttgaaaataataaaaattggtttcccaagttttggttttagtttcataactttaacttctttgtcatctctcttcacgctcacccaccaccaccaccaccacctacccatagagtggtggctacttgtacgatctctctacccctcatgttgctctccggatccctctcatattggttattgtcgctcgcttgttgcctcttccctcgttctctctgtctctcctttaccaggcctggtctctctccccctatgaagcaccgacaccgacacagacaccggacacgacactgatatgaacacgtaagcacttataatgtccaaaatatagaacgtaatacgagtgtcgtgtcggtgtcggacactgacacggacgcgtgtcggacaccggacacggcaaagggggagagtctcccccttacgttgctcttcctttctctttttccctcgtacgtgtgtctggatcttaaggtgacatgaaaaattatatgaagaaaggattatagttgaatctaattcataatagaggaattgtgctactgtagaggcatgctgatggtagcctattgcggtggagctgagaggatgagagaaaatcaataatttggaattagttttgggaaatttcttttttctattttgcaacaaggttatgaagttaaagttaaaaattaacaaatcaactttgatttgataaaatattaaaactaaaaacagacaactaccccaagggggcgtaagggacaaatttaaacccaaaaaataaggtaagagagcattaatatattttaacctataaattatcaattaatatattattggcgtttttgcacattacctctggtgcaaattattaattagtactattacct

SEQ ID NO: 9539 - DNA, 1033 bp, Glycine max
  Gm_smallRNAprecursor_2372
agaatgccatttcagaatttttaaaacttaaggtcccattaagggttgttgctagttttctggttatgtttttaaaatacattttaaaaacaaaacatgttcggatgaaataaagttgggtttgtttttttacctattttgaaaacacttttcctatcattttgaaaataataaaaattggtttcccaagttttggttttagtttcataactttaacttctttgtcatctctcttcacgctcacccaccaccaccaccaccacctacccatagagtggtggctacttgtacgatctctctacccctcatgttgctctccggatccctctcatattggttattgtcgctcgcttgttgcctcttccctcgttctctctgtctctcctttaccaggcctggtctctctccccctatgaagcaccgacaccgacacagacaccggacacgacactgatatgaacacgtaagcacttataatgtccaaaatatagaacgtaatacgagtgtcgtgtcggtgtcggacactgacacggacgcgtgtcggacaccggacacggcaaagggggagagtctcccccttacgttgctcttcctttctctttttccctcgtacgtgtgtctggatcttaaggtgacatgaaaaattatatgaagaaaggattatagttgaatctaattcataatagaggaattgtgctactgtagaggcatgctgatggtagcctattgcggtggagctgagaggatgagagaaaatcaataatttggaattagttttgggaaatttcttttttctattttgcaacaaggttatgaagttaaagttaaaaattaacaaatcaactttgatttgataaaatattaaaactaaaaacagacaactaccccaagggggcgtaagggacaaatttaaacccaaaaaataaggtaagagagcattaatatattttaacctataaattatcaattaatatattattggcgtttttgcacattacctctggtgcaaattattaattagtactattacctt

SEQ ID NO: 9540 - DNA, 1038 bp, Glycine max
  Gm_smallRNAprecursor_2373
tgccatttcagaatttttaaaacttaaggtcccattaagggttgttgctagttttctggttatgtttttaaaatacattttaaaaacaaaacatgttcggatgaaataaagttgggtttgtttttttacctattttgaaaacacttttcctatcattttgaaaataataaaaattggtttcccaagttttggttttagtttcataactttaacttctttgtcatctctcttcacgctcacccaccaccaccaccaccacctacccatagagtggtggctacttgtacgatctctctacccctcatgttgctctccggatccctctcatattggttattgtcgctcgcttgttgcctcttccctcgttctctctgtctctcctttaccaggcctggtctctctccccctatgaagcaccgacaccgacacagacaccggacacgacactgatatgaacacgtaagcacttataatgtccaaaatatagaacgtaatacgagtgtcgtgtcggtgtcggacactgacacggacgcgtgtcggacaccggacacggcaaagggggagagtctcccccttacgttgctcttcctttctctttttccctcgtacgtgtgtctggatcttaaggtgacatgaaaaattatatgaagaaaggattatagttgaatctaattcataatagaggaattgtgctactgtagaggcatgctgatggtagcctattgcggtggagctgagaggatgagagaaaatcaataatttggaattagttttgggaaatttcttttttctattttgcaacaaggttatgaagttaaagttaaaaattaacaaatcaactttgatttgataaaatattaaaactaaaaacagacaactaccccaagggggcgtaagggacaaatttaaacccaaaaaataaggtaagagagcattaatatattttaacctataaattatcaattaatatattattggcgtttttgcacattacctctggtgcaaattattaattagtactattaccttaaatataaa

SEQ ID NO: 9541 - DNA, 1034 bp, Glycine max
  Gm_smallRNAprecursor_2374
gccatttcagaatttttaaaacttaaggtcccattaagggttgttgctagttttctggttatgtttttaaaatacattttaaaaacaaaacatgttcggatgaaataaagttgggtttgtttttttacctattttgaaaacacttttcctatcattttgaaaataataaaaattggtttcccaagttttggttttagtttcataactttaacttctttgtcatctctcttcacgctcacccaccaccaccaccaccacctacccatagagtggtggctacttgtacgatctctctacccctcatgttgctctccggatccctctcatattggttattgtcgctcgcttgttgcctcttccctcgttctctctgtctctcctttaccaggcctggtctctctccccctatgaagcaccgacaccgacacagacaccggacacgacactgatatgaacacgtaagcacttataatgtccaaaatatagaacgtaatacgagtgtcgtgtcggtgtcggacactgacacggacgcgtgtcggacaccggacacggcaaagggggagagtctcccccttacgttgctcttcctttctctttttccctcgtacgtgtgtctggatcttaaggtgacatgaaaaattatatgaagaaaggattatagttgaatctaattcataatagaggaattgtgctactgtagaggcatgctgatggtagcctattgcggtggagctgagaggatgagagaaaatcaataatttggaattagttttgggaaatttcttttttctattttgcaacaaggttatgaagttaaagttaaaaattaacaaatcaactttgatttgataaaatattaaaactaaaaacagacaactaccccaagggggcgtaagggacaaatttaaacccaaaaaataaggtaagagagcattaatatattttaacctataaattatcaattaatatattattggcgtttttgcacattacctctggtgcaaattattaattagtactattaccttaaatat

SEQ ID NO: 9542 - DNA, 1036 bp, Glycine max
  Gm_smallRNAprecursor_2375
gccatttcagaatttttaaaacttaaggtcccattaagggttgttgctagttttctggttatgtttttaaaatacattttaaaaacaaaacatgttcggatgaaataaagttgggtttgtttttttacctattttgaaaacacttttcctatcattttgaaaataataaaaattggtttcccaagttttggttttagtttcataactttaacttctttgtcatctctcttcacgctcacccaccaccaccaccaccacctacccatagagtggtggctacttgtacgatctctctacccctcatgttgctctccggatccctctcatattggttattgtcgctcgcttgttgcctcttccctcgttctctctgtctctcctttaccaggcctggtctctctccccctatgaagcaccgacaccgacacagacaccggacacgacactgatatgaacacgtaagcacttataatgtccaaaatatagaacgtaatacgagtgtcgtgtcggtgtcggacactgacacggacgcgtgtcggacaccggacacggcaaagggggagagtctcccccttacgttgctcttcctttctctttttccctcgtacgtgtgtctggatcttaaggtgacatgaaaaattatatgaagaaaggattatagttgaatctaattcataatagaggaattgtgctactgtagaggcatgctgatggtagcctattgcggtggagctgagaggatgagagaaaatcaataatttggaattagttttgggaaatttcttttttctattttgcaacaaggttatgaagttaaagttaaaaattaacaaatcaactttgatttgataaaatattaaaactaaaaacagacaactaccccaagggggcgtaagggacaaatttaaacccaaaaaataaggtaagagagcattaatatattttaacctataaattatcaattaatatattattggcgtttttgcacattacctctggtgcaaattattaattagtactattaccttaaatataa

SEQ ID NO: 9543 - DNA, 1037 bp, Glycine max
  Gm_smallRNAprecursor_2376
gccatttcagaatttttaaaacttaaggtcccattaagggttgttgctagttttctggttatgtttttaaaatacattttaaaaacaaaacatgttcggatgaaataaagttgggtttgtttttttacctattttgaaaacacttttcctatcattttgaaaataataaaaattggtttcccaagttttggttttagtttcataactttaacttctttgtcatctctcttcacgctcacccaccaccaccaccaccacctacccatagagtggtggctacttgtacgatctctctacccctcatgttgctctccggatccctctcatattggttattgtcgctcgcttgttgcctcttccctcgttctctctgtctctcctttaccaggcctggtctctctccccctatgaagcaccgacaccgacacagacaccggacacgacactgatatgaacacgtaagcacttataatgtccaaaatatagaacgtaatacgagtgtcgtgtcggtgtcggacactgacacggacgcgtgtcggacaccggacacggcaaagggggagagtctcccccttacgttgctcttcctttctctttttccctcgtacgtgtgtctggatcttaaggtgacatgaaaaattatatgaagaaaggattatagttgaatctaattcataatagaggaattgtgctactgtagaggcatgctgatggtagcctattgcggtggagctgagaggatgagagaaaatcaataatttggaattagttttgggaaatttcttttttctattttgcaacaaggttatgaagttaaagttaaaaattaacaaatcaactttgatttgataaaatattaaaactaaaaacagacaactaccccaagggggcgtaagggacaaatttaaacccaaaaaataaggtaagagagcattaatatattttaacctataaattatcaattaatatattattggcgtttttgcacattacctctggtgcaaattattaattagtactattaccttaaatataaa

SEQ ID NO: 9544 - DNA, 1155 bp, Glycine max
  Gm_smallRNAprecursor_2377
aaaattgatatggcatggtgagttaccacaaatgtcgtcaacccctccgactggtccagttgacgaagaagtcggtgatcgtatagaagacatgctacgtgatcttggacaagagggttttaggcaagcacatgcaccttattatgaaaagttagataatgattctaagaaaccatagtatatgggatgcaccaagtacacaaggttatcggtggtgttagcttggtgaatttgaaagcaagatttggatggagtgacaaaaacttcaacgaattacttttgttattgaagaatatacttcctgtagataacaagttaccaaagaatcattacgaggcaaagatattatgccatattggtatggaataccaaaaaatacatgcttgccctaatgattgtattttgtatagacatgagtttgctgaattgcgcaactgtcctacatgtggggtgtcacactacaaagtgaattctgacgaatgcagtcaagatgcaagcacatacaaagatcgtccatcaaaagtgtgttggtatcttccagtcataccaaggtttaagcgattgtttgctaatgcatgagacgcaaaaaatctaacatggcatgctgatggcaggatcaaaagatggattgctccgtcatcctgttgagtctcctcaatggaagacaattgattagttgtattcggaatttggacaagatccccgaagtctaagggttggtctcgcttccgatggaatgaatccgtatggaaacttgagctgcaaccatagtttgtggcctgttttgttgatcatttacaaccttcctccttagttgtgcatccagtggaagtacataatgatatgtatgatgattgacgatccaagacagttaggaaatgacattgatgtctatcttgctcccttaattgaagacctcagaaaattgtgagtagaagggattgatgtgtatgatgggaatactcaggataccttcaggttgcatgccttgatattttgcaccattaatgacttcccagcatatgggaatttgagtggatatagtgtcaaaggccatcacgcatgtccaatatgtgagaaagatacaagttacatccaattaaagcatgacaaaaagatcgtggatacaagacatcgaagattcttgaaaccttt

SEQ ID NO: 9545 - DNA, 1150 bp, Glycine max
  Gm_smallRNAprecursor_2378
gagggttttaggcaagcacatgcaccttattatgaaaagttagataatgattctaagaaaccatagtatatgggatgcaccaagtacacaaggttatcggtggtgttagcttggtgaatttgaaagcaagatttggatggagtgacaaaaacttcaacgaattacttttgttattgaagaatatacttcctgtagataacaagttaccaaagaatcattacgaggcaaagatattatgccatattggtatggaataccaaaaaatacatgcttgccctaatgattgtattttgtatagacatgagtttgctgaattgcgcaactgtcctacatgtggggtgtcacactacaaagtgaattctgacgaatgcagtcaagatgcaagcacatacaaagatcgtccatcaaaagtgtgttggtatcttccagtcataccaaggtttaagcgattgtttgctaatgcatgagacgcaaaaaatctaacatggcatgctgatggcaggatcaaaagatggattgctccgtcatcctgttgagtctcctcaatggaagacaattgattagttgtattcggaatttggacaagatccccgaagtctaagggttggtctcgcttccgatggaatgaatccgtatggaaacttgagctgcaaccatagtttgtggcctgttttgttgatcatttacaaccttcctccttagttgtgcatccagtggaagtacataatgatatgtatgatgattgacgatccaagacagttaggaaatgacattgatgtctatcttgctcccttaattgaagacctcagaaaattgtgagtagaagggattgatgtgtatgatgggaatactcaggataccttcaggttgcatgccttgatattttgcaccattaatgacttcccagcatatgggaatttgagtggatatagtgtcaaaggccatcacgcatgtccaatatgtgagaaagatacaagttacatccaattaaagcatgacaaaaagatcgtggatacaagacatcgaagattcttgaaaccttttcacccatataggcgaatgaagaaagcatttaatgggacatctgagattgacagttcaccaattcctttgtcaggtcttgacgtttttgattgggtgaagaatatca

SEQ ID NO: 9546 - DNA, 1120 bp, Glycine max
  Gm_smallRNAprecursor_2379
aagaatcattacgaggcaaagatattatgccatattggtatggaataccaaaaaatacatgcttgccctaatgattgtattttgtatagacatgagtttgctgaattgcgcaactgtcctacatgtggggtgtcacactacaaagtgaattctgacgaatgcagtcaagatgcaagcacatacaaagatcgtccatcaaaagtgtgttggtatcttccagtcataccaaggtttaagcgattgtttgctaatgcatgagacgcaaaaaatctaacatggcatgctgatggcaggatcaaaagatggattgctccgtcatcctgttgagtctcctcaatggaagacaattgattagttgtattcggaatttggacaagatccccgaagtctaagggttggtctcgcttccgatggaatgaatccgtatggaaacttgagctgcaaccatagtttgtggcctgttttgttgatcatttacaaccttcctccttagttgtgcatccagtggaagtacataatgatatgtatgatgattgacgatccaagacagttaggaaatgacattgatgtctatcttgctcccttaattgaagacctcagaaaattgtgagtagaagggattgatgtgtatgatgggaatactcaggataccttcaggttgcatgccttgatattttgcaccattaatgacttcccagcatatgggaatttgagtggatatagtgtcaaaggccatcacgcatgtccaatatgtgagaaagatacaagttacatccaattaaagcatgacaaaaagatcgtggatacaagacatcgaagattcttgaaaccttttcacccatataggcgaatgaagaaagcatttaatgggacatctgagattgacagttcaccaattcctttgtcaggtcttgacgtttttgattgggtgaagaatatcagcagtatgtatgggaagacacaaaaaaaggatggctcccacaacaacatttggaagaaaaggtctatcttttttgatctgccttactggtgcgatttacatgtgagacattgtttagatgttatgcatgttgaaaaaaatgtctgtgatagtttggttggcacgctgcttaacattaaa

SEQ ID NO: 9547 - DNA, 1106 bp, Glycine max
  Gm_smallRNAprecursor_2380
tgatggcaggatcaaaagatggattgctccgtcatcctgttgagtctcctcaatggaagacaattgattagttgtattcggaatttggacaagatccccgaagtctaagggttggtctcgcttccgatggaatgaatccgtatggaaacttgagctgcaaccatagtttgtggcctgttttgttgatcatttacaaccttcctccttagttgtgcatccagtggaagtacataatgatatgtatgatgattgacgatccaagacagttaggaaatgacattgatgtctatcttgctcccttaattgaagacctcagaaaattgtgagtagaagggattgatgtgtatgatgggaatactcaggataccttcaggttgcatgccttgatattttgcaccattaatgacttcccagcatatgggaatttgagtggatatagtgtcaaaggccatcacgcatgtccaatatgtgagaaagatacaagttacatccaattaaagcatgacaaaaagatcgtggatacaagacatcgaagattcttgaaaccttttcacccatataggcgaatgaagaaagcatttaatgggacatctgagattgacagttcaccaattcctttgtcaggtcttgacgtttttgattgggtgaagaatatcagcagtatgtatgggaagacacaaaaaaaggatggctcccacaacaacatttggaagaaaaggtctatcttttttgatctgccttactggtgcgatttacatgtgagacattgtttagatgttatgcatgttgaaaaaaatgtctgtgatagtttggttggcacgctgcttaacattaaaggcaagacaaaagatggtttgaaatgttgtcaagatctagtagaaatggacatacgacaacagttgcatccagtgtcaaaaggtcttcgaacatatttgctattagaatgtcatacgatgtcaatgacttagaatttttttttcattgtcttagaaatgtaaaagtctcacaaggatactcttcaaacatcaagagtcttgtatctgtgactgatataaaattggttgggttgaagtcccatgattgtcacgttttaatacaacaattat

SEQ ID NO: 9548 - DNA, 1068 bp, Glycine max
  Gm_smallRNAprecursor_2381
ataccttcaggttgcatgccttgatattttgcaccattaatgacttcccagcatatgggaatttgagtggatatagtgtcaaaggccatcacgcatgtccaatatgtgagaaagatacaagttacatccaattaaagcatgacaaaaagatcgtggatacaagacatcgaagattcttgaaaccttttcacccatataggcgaatgaagaaagcatttaatgggacatctgagattgacagttcaccaattcctttgtcaggtcttgacgtttttgattgggtgaagaatatcagcagtatgtatgggaagacacaaaaaaaggatggctcccacaacaacatttggaagaaaaggtctatcttttttgatctgccttactggtgcgatttacatgtgagacattgtttagatgttatgcatgttgaaaaaaatgtctgtgatagtttggttggcacgctgcttaacattaaaggcaagacaaaagatggtttgaaatgttgtcaagatctagtagaaatggacatacgacaacagttgcatccagtgtcaaaaggtcttcgaacatatttgctattagaatgtcatacgatgtcaatgacttagaatttttttttcattgtcttagaaatgtaaaagtctcacaaggatactcttcaaacatcaagagtcttgtatctgtgactgatataaaattggttgggttgaagtcccatgattgtcacgttttaatacaacaattattgtctgtagccattcggggtatattgcctgacaaagttagggttgcaataactcgattgtgttttttcttcaatgcgatctgcaagaaagtaatcgaccccaaatagttggatgatttggaaaatgagacttccattatcatttgttagttggagatgtattttctatcaacattttttgacattatgattcgcttagttgtccaccttgtacgagaaatacggttgttcgggcctgtatatcttcgtggatgtatccggttgagcgttatatgaaggtgttaaaaagttatacgaagaatcaatattggccgaaagcaagcatg

SEQ ID NO: 9549 - DNA, 1069 bp, Glycine max
  Gm_smallRNAprecursor_2382
atgaagaaagcatttaatgggacatctgagattgacagttcaccaattcctttgtcaggtcttgacgtttttgattgggtgaagaatatcagcagtatgtatgggaagacacaaaaaaaggatggctcccacaacaacatttggaagaaaaggtctatcttttttgatctgccttactggtgcgatttacatgtgagacattgtttagatgttatgcatgttgaaaaaaatgtctgtgatagtttggttggcacgctgcttaacattaaaggcaagacaaaagatggtttgaaatgttgtcaagatctagtagaaatggacatacgacaacagttgcatccagtgtcaaaaggtcttcgaacatatttgctattagaatgtcatacgatgtcaatgacttagaatttttttttcattgtcttagaaatgtaaaagtctcacaaggatactcttcaaacatcaagagtcttgtatctgtgactgatataaaattggttgggttgaagtcccatgattgtcacgttttaatacaacaattattgtctgtagccattcggggtatattgcctgacaaagttagggttgcaataactcgattgtgttttttcttcaatgcgatctgcaagaaagtaatcgaccccaaatagttggatgatttggaaaatgagacttccattatcatttgttagttggagatgtattttctatcaacattttttgacattatgattcgcttagttgtccaccttgtacgagaaatacggttgttcgggcctgtatatcttcgtggatgtatccggttgagcgttatatgaaggtgttaaaaagttatacgaagaatcaatattggccgaaagcaagcatggttgaaaggtacgtcgccgaagaagctattgagttttgttctgagtacattgaaaatgatgcacctgttggacttcctaaaacccgccatgagtctacacagcaagttagaggcacacgaggattcaatgttgtaatcgtggattgccagcaggtctcacaagcgcatctatatgtactaagcaacactgctgaggtaatacca

SEQ ID NO: 9550 - DNA, 1078 bp, Glycine max
  Gm_smallRNAprecursor_2383
tagcataattacaacaatttccttcacaaacaactaccctagtaaaactacccattatagctcccaagaacccaacacccacagatttcaagtgaggagaagtccacccttacctgaaattgaaggtcccacgaggtagaggtgggctcctagactccaaaaatagctttatcttgcaatttggtgtggaaatgaagggggatttgaagcttgaagagagacaacaatggtggtgaagaaaatgaaaaagaaacgtggaggaagaaagagagagttgtgctggaagtttttggagaaagagagagaagatttggcttttaaaatggtttttcttttctttttcatttcctttttaaaagcaattccacatgtcatttttttaattggagcaaaaagggtccacctttacctttgacttgaccacatacttagccataaaagaagaaaaaaactggaccttttgggatgctaaaatcctgcctcagtttgtgtgccgcctctccggtttcagttcttcgcgtttctctgcacctgtcgggacccgttttcaaaggtaggcaatatatatatatcaaaacgctcagaatgagaccttgagcgtggttcagaggttggttttgtttaattataagttgcacgcaaaacggtaatttttagactaattaattgcgaattaatctataactgtccagttatgtgttactcttcattaattagtctaacccgtgtatttctcccccaatatacatatttctaccaagaatatatatatatatatatataattatttaaatgtaatacttacaaaattccgggtagaaattccagaatgtgacaactctcactaagtaatatcataggaagaccagtcagggtcagtgttttgcgagaatgcttcaaccatatgggatcaacataggcttaaaggagcactcaaatcgggtgacccccaaggcctacactccgaagagaccgtcagggcttctccctcctgatttaggtccaacccagaaaacattttagcacacaaactctatctataaactgtacaaaacgcatgactccccaattattctca

SEQ ID NO: 9551 - DNA, 1187 bp, Glycine max
  Gm_smallRNAprecursor_2384
ttccttaggcagaatgacgaccatttgccaatgtccgctgcagtagagacgaatatgggttattgtagtagtataaattatttaaattcaattattgtgtttgacttacccattcaggtaggctccaaggtaaacatctcgttttgaactctgtatccaactcttgatgtaactttcatattcaaattgtgattgtccagatctctgaatggactgtggctcaaggaatccatagaattcctcgctcgcacacttgtctcagtcagatgactgtgttgttaagtcaaagttaattatgtatgaatttaaaacaattactttggtaattaatagtaatctaaaatgacttacagaatccacaactgtataacagatatgctgagacattgaccaccgtgtgcaatttcagagagatcttcgtgctttatatacaacgggaagttttgattaaacaccccgaatatggtagcatcccacataacctggagcggcttcaaaaacagttgtgggatggtcaatgtcatcaggtacaggggatcatcgacctcttcatccgggctttctggaggttttgctggagacacagctgcctgttgataaaacatagttaattagcaagttttgattacagtgaacaaattaattgaaaaaaataaacatataatcagagtaaaatacctgttctgataaacgcttcacaagatgtgttggccaagcaaggaaagtgttaagtgtctgccccactaaggtaacctcgttagtgggtacaggaacgagagcctctgcatctttaacctcctcaacaccaaccttgacttgaacatgcaacaaagggatgttgtgaattgttgtggatccctcgtaaagtcttcctagggcaaccaagcgggaaggattttcctcgtaaagtccgtccagcttattatttactcacaaacatgttatctcatgatgcatcacaagctgtacctggtcattggaagcaactatgatccttaaaaatttctcccaagatcaagcaccttctatggaggatcctttgcaactgttttccaacaatagtgaggcttcgagacaaaggagtgcagtgccctttaacgtgtgcttattgcaacaacaatcaggaaaataacgggcatttttaaacttcaccaaaagtatatattctatttttcggttgtaaaaaa

SEQ ID NO: 9552 - DNA, 1182 bp, Glycine max
  Gm_smallRNAprecursor_2385
tcttgtttcagagcacctctcttccgaaacctgaaaaaatggctaaatgaaagggtgcctcacaacatacttgaggactccttatatagccaaaaatctaagaccggtagttgccggtagttttgaccgggactatttgactgtttgttacaagacaagtagttttgaccgggactttaatggctacaggacaggtagtattgtccagcattaattacacataaattacaaacagacggttttgtgaccgaaattaaatttaatctaaacagataccaaaacaatcatcttcgttttggtaaaagggatcttcttcgtcttcagtagaacttgtttcttccttctttgaggatgaagcttcttcttcctgttgtaacatttgtagaacttccttcagatttttagctaagacctcctttgatgtcgatcctgctaaaaatgctgccagatgagacttttggttcaaaaacacagaagtctctggatcagctgttttgaggaattctggatgggattggaaccatagttttacttgttctggatccgctttggatgagtcaaattgtgtccaccattttacaaatgcgtgtctttgtggtgatggatattggtttgtcttttcagtcttgctgtaacgatattgccatgagaatatccatgacagtgcaaagcttgaaaagtatttaagatctgctggaattcgtgattcctgcgaattgtactgtttcttaaattaggaaaatccttgttggaccgtttttgggaatatctctgggattggtccaaagaagtcccaccattgcaaaaaccaattgggaaaattgtaaattgtgttggtcttgaaatatatcagccatgaatgcttgaagcgggtattttggtgccaaaacaccttagtccaagcatcaacgtaatcccaataggtataacctaccggatcaaatggaactgaaaatctctttcctttgttcaagtccgaaccaaagtgtcttggttgaagaacttttagtatttggatggttgaatgggtgtttaaggtttggtcttttggatctttgaaatgtttgatagatactgagtttgaatctaccaaaatcaattcataaaaagttcttgtcttcaggatggtggttggtttgtagtgaaatcctggtgggaaagccttggccgtcgccttgaagg

SEQ ID NO: 9553 - DNA, 1031 bp, Glycine max
  Gm_smallRNAprecursor_2386
aagacaagtagttttgaccgggactttaatggctacaggacaggtagtattgtccagcattaattacacataaattacaaacagacggttttgtgaccgaaattaaatttaatctaaacagataccaaaacaatcatcttcgttttggtaaaagggatcttcttcgtcttcagtagaacttgtttcttccttctttgaggatgaagcttcttcttcctgttgtaacatttgtagaacttccttcagatttttagctaagacctcctttgatgtcgatcctgctaaaaatgctgccagatgagacttttggttcaaaaacacagaagtctctggatcagctgttttgaggaattctggatgggattggaaccatagttttacttgttctggatccgctttggatgagtcaaattgtgtccaccattttacaaatgcgtgtctttgtggtgatggatattggtttgtcttttcagtcttgctgtaacgatattgccatgagaatatccatgacagtgcaaagcttgaaaagtatttaagatctgctggaattcgtgattcctgcgaattgtactgtttcttaaattaggaaaatccttgttggaccgtttttgggaatatctctgggattggtccaaagaagtcccaccattgcaaaaaccaattgggaaaattgtaaattgtgttggtcttgaaatatatcagccatgaatgcttgaagcgggtattttggtgccaaaacaccttagtccaagcatcaacgtaatcccaataggtataacctaccggatcaaatggaactgaaaatctctttcctttgttcaagtccgaaccaaagtgtcttggttgaagaacttttagtatttggatggttgaatgggtgtttaaggtttggtcttttggatctttgaaatgtttgatagatactgagtttgaatctaccaaaatcaattcataaaaagttcttgtcttcaggatggtggttggtttgtagtgaaatcctggtgggaaagccttggccgtcgccttgaagg

SEQ ID NO: 9554 - DNA, 1031 bp, Glycine max; identical to SEQ ID NO: 9553
  Gm_smallRNAprecursor_2387

SEQ ID NO: 9555 - DNA, 1114 bp, Glycine max
  Gm_smallRNAprecursor_2388
ccgggactttaatggctacaggacaggtagtattgtccagcattaattacacataaattacaaacagacggttttgtgaccgaaattaaatttaatctaaacagataccaaaacaatcatcttcgttttggtaaaagggatcttcttcgtcttcagtagaacttgtttcttccttctttgaggatgaagcttcttcttcctgttgtaacatttgtagaacttccttcagatttttagctaagacctcctttgatgtcgatcctgctaaaaatgctgccagatgagacttttggttcaaaaacacagaagtctctggatcagctgttttgaggaattctggatgggattggaaccatagttttacttgttctggatccgctttggatgagtcaaattgtgtccaccattttacaaatgcgtgtctttgtggtgatggatattggtttgtcttttcagtcttgctgtaacgatattgccatgagaatatccatgacagtgcaaagcttgaaaagtatttaagatctgctggaattcgtgattcctgcgaattgtactgtttcttaaattaggaaaatccttgttggaccgtttttgggaatatctctgggattggtccaaagaagtcccaccattgcaaaaaccaattgggaaaattgtaaattgtgttggtcttgaaatatatcagccatgaatgcttgaagcgggtattttggtgccaaaacaccttagtccaagcatcaacgtaatcccaataggtataacctaccggatcaaatggaactgaaaatctctttcctttgttcaagtccgaaccaaagtgtcttggttgaagaacttttagtatttggatggttgaatgggtgtttaaggtttggtcttttggatctttgaaatgtttgatagatactgagtttgaatctaccaaaatcaattcataaaaagttcttgtcttcaggatggtggttggtttgtagtgaaatcctggtgggaaagccttggccgtcgccttgaagggatttttgtcccaaaattcaggttccatatgcaaaacagttaacaatttatttttataaatataattgttagtttgtttggtaggtggtgtttgagcttt

SEQ ID NO: 9556 - DNA, 1146 bp, Glycine max
  Gm_smallRNAprecursor_2389
ggctacaggacaggtagtattgtccagcattaattacacataaattacaaacagacggttttgtgaccgaaattaaatttaatctaaacagataccaaaacaatcatcttcgttttggtaaaagggatcttcttcgtcttcagtagaacttgtttcttccttctttgaggatgaagcttcttcttcctgttgtaacatttgtagaacttccttcagatttttagctaagacctcctttgatgtcgatcctgctaaaaatgctgccagatgagacttttggttcaaaaacacagaagtctctggatcagctgttttgaggaattctggatgggattggaaccatagttttacttgttctggatccgctttggatgagtcaaattgtgtccaccattttacaaatgcgtgtctttgtggtgatggatattggtttgtcttttcagtcttgctgtaacgatattgccatgagaatatccatgacagtgcaaagcttgaaaagtatttaagatctgctggaattcgtgattcctgcgaattgtactgtttcttaaattaggaaaatccttgttggaccgtttttgggaatatctctgggattggtccaaagaagtcccaccattgcaaaaaccaattgggaaaattgtaaattgtgttggtcttgaaatatatcagccatgaatgcttgaagcgggtattttggtgccaaaacaccttagtccaagcatcaacgtaatcccaataggtataacctaccggatcaaatggaactgaaaatctctttcctttgttcaagtccgaaccaaagtgtcttggttgaagaacttttagtatttggatggttgaatgggtgtttaaggtttggtcttttggatctttgaaatgtttgatagatactgagtttgaatctaccaaaatcaattcataaaaagttcttgtcttcaggatggtggttggtttgtagtgaaatcctggtgggaaagccttggccgtcgccttgaagggatttttgtcccaaaattcaggttccatatgcaaaacagttaacaatttatttttataaatataattgttagtttgtttggtaggtggtgtttgagctttggctaaaggtagttttcctttagtattggtggttgttttggtcat

SEQ ID NO: 9557 - DNA, 1146 bp, Glycine max; identical to SEQ ID NO: 9556
  Gm_smallRNAprecursor_2390

SEQ ID NO: 9558 - DNA, 1147 bp, Glycine max
  Gm_smallRNAprecursor_2391
ggctacaggacaggtagtattgtccagcattaattacacataaattacaaacagacggttttgtgaccgaaattaaatttaatctaaacagataccaaaacaatcatcttcgttttggtaaaagggatcttcttcgtcttcagtagaacttgtttcttccttctttgaggatgaagcttcttcttcctgttgtaacatttgtagaacttccttcagatttttagctaagacctcctttgatgtcgatcctgctaaaaatgctgccagatgagacttttggttcaaaaacacagaagtctctggatcagctgttttgaggaattctggatgggattggaaccatagttttacttgttctggatccgctttggatgagtcaaattgtgtccaccattttacaaatgcgtgtctttgtggtgatggatattggtttgtcttttcagtcttgctgtaacgatattgccatgagaatatccatgacagtgcaaagcttgaaaagtatttaagatctgctggaattcgtgattcctgcgaattgtactgtttcttaaattaggaaaatccttgttggaccgtttttgggaatatctctgggattggtccaaagaagtcccaccattgcaaaaaccaattgggaaaattgtaaattgtgttggtcttgaaatatatcagccatgaatgcttgaagcgggtattttggtgccaaaacaccttagtccaagcatcaacgtaatcccaataggtataacctaccggatcaaatggaactgaaaatctctttcctttgttcaagtccgaaccaaagtgtcttggttgaagaacttttagtatttggatggttgaatgggtgtttaaggtttggtcttttggatctttgaaatgtttgatagatactgagtttgaatctaccaaaatcaattcataaaaagttcttgtcttcaggatggtggttggtttgtagtgaaatcctggtgggaaagccttggccgtcgccttgaagggatttttgtcccaaaattcaggttccatatgcaaaacagttaacaatttatttttataaatataattgttagtttgtttggtaggtggtgtttgagctttggctaaaggtagttttcctttagtattggtggttgttttggtcatt

SEQ ID NO: 9559 - DNA, 1147 bp, Glycine max; identical to SEQ ID NO: 9558
  Gm_smallRNAprecursor_2392

SEQ ID NO: 9560 - DNA, 1247 bp, Glycine max
  Gm_smallRNAprecursor_2393
ggctacaggacaggtagtattgtccagcattaattacacataaattacaaacagacggttttgtgaccgaaattaaatttaatctaaacagataccaaaacaatcatcttcgttttggtaaaagggatcttcttcgtcttcagtagaacttgtttcttccttctttgaggatgaagcttcttcttcctgttgtaacatttgtagaacttccttcagatttttagctaagacctcctttgatgtcgatcctgctaaaaatgctgccagatgagacttttggttcaaaaacacagaagtctctggatcagctgttttgaggaattctggatgggattggaaccatagttttacttgttctggatccgctttggatgagtcaaattgtgtccaccattttacaaatgcgtgtctttgtggtgatggatattggtttgtcttttcagtcttgctgtaacgatattgccatgagaatatccatgacagtgcaaagcttgaaaagtatttaagatctgctggaattcgtgattcctgcgaattgtactgtttcttaaattaggaaaatccttgttggaccgtttttgggaatatctctgggattggtccaaagaagtcccaccattgcaaaaaccaattgggaaaattgtaaattgtgttggtcttgaaatatatcagccatgaatgcttgaagcgggtattttggtgccaaaacaccttagtccaagcatcaacgtaatcccaataggtataacctaccggatcaaatggaactgaaaatctctttcctttgttcaagtccgaaccaaagtgtcttggttgaagaacttttagtatttggatggttgaatgggtgtttaaggtttggtcttttggatctttgaaatgtttgatagatactgagtttgaatctaccaaaatcaattcataaaaagttcttgtcttcaggatggtggttggtttgtagtgaaatcctggtgggaaagccttggccgtcgccttgaagggatttttgtcccaaaattcaggttccatatgcaaaacagttaacaatttatttttataaatataattgttagtttgtttggtaggtggtgtttgagctttggctaaaggtagttttcctttagtattggtggttgttttggtcattgacgcattttggatcattgtttgtaaatttgattcagattcatcatcagattctgaggcaatgtctgcccaagattttttgattatttttggaaatttgg

SEQ ID NO: 9561 - DNA, 1247 bp, Glycine max; identical to SEQ ID NO: 9560
  Gm_smallRNAprecursor_2394

SEQ ID NO: 9562 - DNA, 1072 bp, Glycine max
  Gm_smallRNAprecursor_2395
gcttcttcttcctgttgtaacatttgtagaacttccttcagatttttagctaagacctcctttgatgtcgatcctgctaaaaatgctgccagatgagacttttggttcaaaaacacagaagtctctggatcagctgttttgaggaattctggatgggattggaaccatagttttacttgttctggatccgctttggatgagtcaaattgtgtccaccattttacaaatgcgtgtctttgtggtgatggatattggtttgtcttttcagtcttgctgtaacgatattgccatgagaatatccatgacagtgcaaagcttgaaaagtatttaagatctgctggaattcgtgattcctgcgaattgtactgtttcttaaattaggaaaatccttgttggaccgtttttgggaatatctctgggattggtccaaagaagtcccaccattgcaaaaaccaattgggaaaattgtaaattgtgttggtcttgaaatatatcagccatgaatgcttgaagcgggtattttggtgccaaaacaccttagtccaagcatcaacgtaatcccaataggtataacctaccggatcaaatggaactgaaaatctctttcctttgttcaagtccgaaccaaagtgtcttggttgaagaacttttagtatttggatggttgaatgggtgtttaaggtttggtcttttggatctttgaaatgtttgatagatactgagtttgaatctaccaaaatcaattcataaaaagttcttgtcttcaggatggtggttggtttgtagtgaaatcctggtgggaaagccttggccgtcgccttgaagggatttttgtcccaaaattcaggttccatatgcaaaacagttaacaatttatttttataaatataattgttagtttgtttggtaggtggtgtttgagctttggctaaaggtagttttcctttagtattggtggttgttttggtcattgacgcattttggatcattgtttgtaaatttgattcagattcatcatcagattctgaggcaatgtctgcccaagattttttgattatttttggaaatttgg

SEQ ID NO: 9563 - DNA, 1174 bp, Glycine max
  Gm_smallRNAprecursor_2396
cgggtattttggtgccaaaacaccttagtccaagcatcaacgtaatcccaataggtataacctaccggatcaaatggaactgaaaatctctttcctttgttcaagtccgaaccaaagtgtcttggttgaagaacttttagtatttggatggttgaatgggtgtttaaggtttggtcttttggatctttgaaatgtttgatagatactgagtttgaatctaccaaaatcaattcataaaaagttcttgtcttcaggatggtggttggtttgtagtgaaatcctggtgggaaagccttggccgtcgccttgaagggatttttgtcccaaaattcaggttccatatgcaaaacagttaacaatttatttttataaatataattgttagtttgtttggtaggtggtgtttgagctttggctaaaggtagttttcctttagtattggtggttgttttggtcattgacgcattttggatcattgtttgtaaatttgattcagattcatcatcagattctgaggcaatgtctgcccaagattttttgattatttttggaaatttggtcagacccatgtcttgaagggcctgaagggtttcaattggccatgcatagtcggctgatgtttgtttggcggttgccggtttgggagattcctgagtggatggctcaggtttgattgaggcaatctgggttgatgacccttctaaattggttttctgggtagatgacccagcctgggttggtgacccagaagaggtagatgatttcttgatggttagctctggaagagccagcctggctcctttgcctatactccttcctccccgtagggagattcccgatgccttaggaggcattaccacttttctgtaagaattcacgggtaaggtagtcaggtagtgaatttgaggtgcccttgatgtattctatgtcaaaatcaaagacaattaaaattgcttgccatcgtgcaaaaatttgttttgaggcaaagtttttaacatctttttgtaaaatatctttggctgatttataatcaaccctgattaaaaatttttggtttaataaatccgattgaaatttggaaatgcacaaaacaattgctaaaacctcttttttaacagttgaatattttaattgtgcaggattccaatgttttgatgtatatgcaatgacatga

SEQ ID NO: 9564 - DNA, 1173 bp, Glycine max
  Gm_smallRNAprecursor_2397
gggtattttggtgccaaaacaccttagtccaagcatcaacgtaatcccaataggtataacctaccggatcaaatggaactgaaaatctctttcctttgttcaagtccgaaccaaagtgtcttggttgaagaacttttagtatttggatggttgaatgggtgtttaaggtttggtcttttggatctttgaaatgtttgatagatactgagtttgaatctaccaaaatcaattcataaaaagttcttgtcttcaggatggtggttggtttgtagtgaaatcctggtgggaaagccttggccgtcgccttgaagggatttttgtcccaaaattcaggttccatatgcaaaacagttaacaatttatttttataaatataattgttagtttgtttggtaggtggtgtttgagctttggctaaaggtagttttcctttagtattggtggttgttttggtcattgacgcattttggatcattgtttgtaaatttgattcagattcatcatcagattctgaggcaatgtctgcccaagattttttgattatttttggaaatttggtcagacccatgtcttgaagggcctgaagggtttcaattggccatgcatagtcggctgatgtttgtttggcggttgccggtttgggagattcctgagtggatggctcaggtttgattgaggcaatctgggttgatgacccttctaaattggttttctgggtagatgacccagcctgggttggtgacccagaagaggtagatgatttcttgatggttagctctggaagagccagcctggctcctttgcctatactccttcctccccgtagggagattcccgatgccttaggaggcattaccacttttctgtaagaattcacgggtaaggtagtcaggtagtgaatttgaggtgcccttgatgtattctatgtcaaaatcaaagacaattaaaattgcttgccatcgtgcaaaaatttgttttgaggcaaagtttttaacatctttttgtaaaatatctttggctgatttataatcaaccctgattaaaaatttttggtttaataaatccgattgaaatttggaaatgcacaaaacaattgctaaaacctcttttttaacagttgaatattttaattgtgcaggattccaatgttttgatgtatatgcaatgacatga

SEQ ID NO: 9565 - DNA, 1176 bp, Glycine max
  Gm_smallRNAprecursor_2398
gggtattttggtgccaaaacaccttagtccaagcatcaacgtaatcccaataggtataacctaccggatcaaatggaactgaaaatctctttcctttgttcaagtccgaaccaaagtgtcttggttgaagaacttttagtatttggatggttgaatgggtgtttaaggtttggtcttttggatctttgaaatgtttgatagatactgagtttgaatctaccaaaatcaattcataaaaagttcttgtcttcaggatggtggttggtttgtagtgaaatcctggtgggaaagccttggccgtcgccttgaagggatttttgtcccaaaattcaggttccatatgcaaaacagttaacaatttatttttataaatataattgttagtttgtttggtaggtggtgtttgagctttggctaaaggtagttttcctttagtattggtggttgttttggtcattgacgcattttggatcattgtttgtaaatttgattcagattcatcatcagattctgaggcaatgtctgcccaagattttttgattatttttggaaatttggtcagacccatgtcttgaagggcctgaagggtttcaattggccatgcatagtcggctgatgtttgtttggcggttgccggtttgggagattcctgagtggatggctcaggtttgattgaggcaatctgggttgatgacccttctaaattggttttctgggtagatgacccagcctgggttggtgacccagaagaggtagatgatttcttgatggttagctctggaagagccagcctggctcctttgcctatactccttcctccccgtagggagattcccgatgccttaggaggcattaccacttttctgtaagaattcacgggtaaggtagtcaggtagtgaatttgaggtgcccttgatgtattctatgtcaaaatcaaagacaattaaaattgcttgccatcgtgcaaaaatttgttttgaggcaaagtttttaacatctttttgtaaaatatctttggctgatttataatcaaccctgattaaaaatttttggtttaataaatccgattgaaatttggaaatgcacaaaacaattgctaaaacctcttttttaacagttgaatattttaattgtgcaggattccaatgttttgatgtatatgcaatgacatgatct

SEQ ID NO: 9566 - DNA, 1071 bp, Glycine max
  Gm_smallRNAprecursor_2399
taaattggttttctgggtagatgacccagcctgggttggtgacccagaagaggtagatgatttcttgatggttagctctggaagagccagcctggctcctttgcctatactccttcctccccgtagggagattcccgatgccttaggaggcattaccacttttctgtaagaattcacgggtaaggtagtcaggtagtgaatttgaggtgcccttgatgtattctatgtcaaaatcaaagacaattaaaattgcttgccatcgtgcaaaaatttgttttgaggcaaagtttttaacatctttttgtaaaatatctttggctgatttataatcaaccctgattaaaaatttttggtttaataaatccgattgaaatttggaaatgcacaaaacaattgctaaaacctcttttttaacagttgaatattttaattgtgcaggattccaatgttttgatgtatatgcaatgacatgatcttggccatggactctttgtttgaggatgccaccataacctatgtctgaagcatcagtttcgacaattttaaatgcctgtggaataggaagatacagacatttaatggattggactttgactttgatttctttaaccgtttgtgtatggaggtcagaccaaggaggcggatttttcttcagcctatcatgtaatggcttgacaatattatttaaataggggacaaattctcctacgtaatttagacaacctagaaatctttgtaactgggttttgtctaagatttggttggggaatttgctagcaaactctattgacctttcgattggaatgattgtaccttgatatatattgtgaccaaggaatcgaattcgagtttggaaaagattgatttttgatttggagactgccaaaccattttgtttgatgatatgtatgaaggtttggagatgtttgaaatgttggtcaatgttttgtgaaaagattaaaacatcatctatgtagacaatgacaaattttgaataaggattaaaaatatcgttcataattttttgaaattctgaaggggcattcttcagtccgaatggcatcacgttcc

SEQ ID NO: 9567 - DNA, 1073 bp, Glycine max
  Gm_smallRNAprecursor_2400
taaattggttttctgggtagatgacccagcctgggttggtgacccagaagaggtagatgatttcttgatggttagctctggaagagccagcctggctcctttgcctatactccttcctccccgtagggagattcccgatgccttaggaggcattaccacttttctgtaagaattcacgggtaaggtagtcaggtagtgaatttgaggtgcccttgatgtattctatgtcaaaatcaaagacaattaaaattgcttgccatcgtgcaaaaatttgttttgaggcaaagtttttaacatctttttgtaaaatatctttggctgatttataatcaaccctgattaaaaatttttggtttaataaatccgattgaaatttggaaatgcacaaaacaattgctaaaacctcttttttaacagttgaatattttaattgtgcaggattccaatgttttgatgtatatgcaatgacatgatcttggccatggactctttgtttgaggatgccaccataacctatgtctgaagcatcagtttcgacaattttaaatgcctgtggaataggaagatacagacatttaatggattggactttgactttgatttctttaaccgtttgtgtatggaggtcagaccaaggaggcggatttttcttcagcctatcatgtaatggcttgacaatattatttaaataggggacaaattctcctacgtaatttagacaacctagaaatctttgtaactgggttttgtctaagatttggttggggaatttgctagcaaactctattgacctttcgattggaatgattgtaccttgatatatattgtgaccaaggaatcgaattcgagtttggaaaagattgatttttgatttggagactgccaaaccattttgtttgatgatatgtatgaaggtttggagatgtttgaaatgttggtcaatgttttgtgaaaagattaaaacatcatctatgtagacaatgacaaattttgaataaggattaaaaatatcgttcataattttttgaaattctgaaggggcattcttcagtccgaatggcatcacgttccat

SEQ ID NO: 9568 - DNA, 1178 bp, Glycine max
  Gm_smallRNAprecursor_2401
tggttagctctggaagagccagcctggctcctttgcctatactccttcctccccgtagggagattcccgatgccttaggaggcattaccacttttctgtaagaattcacgggtaaggtagtcaggtagtgaatttgaggtgcccttgatgtattctatgtcaaaatcaaagacaattaaaattgcttgccatcgtgcaaaaatttgttttgaggcaaagtttttaacatctttttgtaaaatatctttggctgatttataatcaaccctgattaaaaatttttggtttaataaatccgattgaaatttggaaatgcacaaaacaattgctaaaacctcttttttaacagttgaatattttaattgtgcaggattccaatgttttgatgtatatgcaatgacatgatcttggccatggactctttgtttgaggatgccaccataacctatgtctgaagcatcagtttcgacaattttaaatgcctgtggaataggaagatacagacatttaatggattggactttgactttgatttctttaaccgtttgtgtatggaggtcagaccaaggaggcggatttttcttcagcctatcatgtaatggcttgacaatattatttaaataggggacaaattctcctacgtaatttagacaacctagaaatctttgtaactgggttttgtctaagatttggttggggaatttgctagcaaactctattgacctttcgattggaatgattgtaccttgatatatattgtgaccaaggaatcgaattcgagtttggaaaagattgatttttgatttggagactgccaaaccattttgtttgatgatatgtatgaaggtttggagatgtttgaaatgttggtcaatgttttgtgaaaagattaaaacatcatctatgtagacaatgacaaattttgaataaggattaaaaatatcgttcataattttttgaaattctgaaggggcattcttcagtccgaatggcatcacgttccattcatattgcccgaaaggtacagtaaacgctgttttgtacctatctgattcttggatttgccaaaatccagatttcatatcaaattttgaaaatatctttgcagaatttaatctgttaagcaaatcttttttgttcggaataggatatttaatccattgtaatgcttgatttaa

SEQ ID NO: 9569 - DNA, 1080 bp, Glycine max
  Gm_smallRNAprecursor_2402
tttggagatgtttgaaatgttggtcaatgttttgtgaaaagattaaaacatcatctatgtagacaatgacaaattttgaataaggattaaaaatatcgttcataattttttgaaattctgaaggggcattcttcagtccgaatggcatcacgttccattcatattgcccgaaaggtacagtaaacgctgttttgtacctatctgattcttggatttgccaaaatccagatttcatatcaaattttgaaaatatctttgcagaatttaatctgttaagcaaatcttttttgttcggaataggatatttaatccattgtaatgcttgatttaatggtttgtaatttatgactaagcggggtgttccacgctcaatctcagattgtttgttaacataaaaagccgcacaagaccatgggcttttgcttttccggattaggcctttatcaagcaaatccttgatttccttttgacagtattgaagaagttcttcattcatttggattggtctggcttttgtgggaatttgtttttccctaaagtctttctcataagggagatcgacaatatgtttctttctgtcccaaaatgcatgtggcaattcagaacaaacggtcgattcaatatgatttaataaagattgaattctttcttttacttggggttttcctagttgtatctgaatattattaaaagatacttcttcttttaagttaattcgattaatcttattttctataagatttatatttctggaaattggtttagtagaaaaattaaatataatttttcttcctaaataatttgtggttattccttcattagatatttggatgggaaacagggctctaatgaagggcgttcctaagattacttcattcttaaggttttttaccagaagaaaatttgtgttaatcttaagaccttggttttcaattattgcatttgatagcttaaaattaatttttaattttgagccgtttgccgtacttaatttttctgaggttttctcaaagaattttgtaggaattaatccttctaaaatgcagtttgaatcagcccctgtatcaaatagggccattg

SEQ ID NO: 9570 - DNA, 1076 bp, Glycine max
  Gm_smallRNAprecursor_2403
ccatctttcgggaagagttacttcatcccattttatttttcttgggagagacacgttagcctttgtcatattagtgataaacaaggttgtttctcctttttgaggttttaacaggactctagatgcacaagtattcatgaccttgtactggatcctataaattaaggctgctgggattgatccttctttcatgtcaaggccatgaaagtggatgtttaagaacagagagtcaagaatgtttctgtccatcagactcactgtcttgtttggataacaattaaaatatattggaccttgtcctaggctggtttcgactgttccaattagggagtcttcaaattgattatgcctaatatctcttagacacattaaaactgctgcatctatgcccatatcaattaagggcttgatggctacttgtacacaaccgatgtgtagatatttatacttacgtatatgttcataaattgaattttttgaaagtagatgaaattcttcccctatatcttgtcctagaggaatattgttttctactgttttgattatgtaatcaaagttgtgtttgtctttaattgtttcaggaacgtatagttgatcctgagggatttctggaatgttccagtcatccatgttttgattaatatcttcgaatcggacttcctcatcgaagagattgtgttttggggcgacctcttgggtctggttatcttgatcatttaagagattggtgtttcttgaagaagatgaagaggaggaattcgagcgaaaagaaatacgggaaaacgatcgcaataatctagacatgattaaaacattctctaatatctttgccttcatttggttccataggaatcttcccataaggctatatgttacggaacttcttggatctggataaatgaaaaagaagattttttttttttttttttttacagacaatgtagtttgaacattactcctatagccaccagtatataatgtctcaataatttatttgaataatacaccttagccttactgccctttctcatccacgggacttactgctacagtatcattcaactaaaatatcagac

SEQ ID NO: 9571 - DNA, 1159 bp, Glycine max
  Gm_smallRNAprecursor_2404
ccatctttcgggaagagttacttcatcccattttatttttcttgggagagacacgttagcctttgtcatattagtgataaacaaggttgtttctcctttttgaggttttaacaggactctagatgcacaagtattcatgaccttgtactggatcctataaattaaggctgctgggattgatccttctttcatgtcaaggccatgaaagtggatgtttaagaacagagagtcaagaatgtttctgtccatcagactcactgtcttgtttggataacaattaaaatatattggaccttgtcctaggctggtttcgactgttccaattagggagtcttcaaattgattatgcctaatatctcttagacacattaaaactgctgcatctatgcccatatcaattaagggcttgatggctacttgtacacaaccgatgtgtagatatttatacttacgtatatgttcataaattgaattttttgaaagtagatgaaattcttcccctatatcttgtcctagaggaatattgttttctactgttttgattatgtaatcaaagttgtgtttgtctttaattgtttcaggaacgtatagttgatcctgagggatttctggaatgttccagtcatccatgttttgattaatatcttcgaatcggacttcctcatcgaagagattgtgttttggggcgacctcttgggtctggttatcttgatcatttaagagattggtgtttcttgaagaagatgaagaggaggaattcgagcgaaaagaaatacgggaaaacgatcgcaataatctagacatgattaaaacattctctaatatctttgccttcatttggttccataggaatcttcccataaggctatatgttacggaacttcttggatctggataaatgaaaaagaagattttttttttttttttttttacagacaatgtagtttgaacattactcctatagccaccagtatataatgtctcaataatttatttgaataatacaccttagccttactgccctttctcatccacgggacttactgctacagtatcattcaactaaaatatcagactgctgtgcttccagaaaatactgttcaaacacatactgtttaaattaaaattactgtacatgcttcagatccataagttcagt

SEQ ID NO: 9572 - DNA, 1056 bp, Glycine max
  Gm_smallRNAprecursor_2405
gatcctgagggatttctggaatgttccagtcatccatgttttgattaatatcttcgaatcggacttcctcatcgaagagattgtgttttggggcgacctcttgggtctggttatcttgatcatttaagagattggtgtttcttgaagaagatgaagaggaggaattcgagcgaaaagaaatacgggaaaacgatcgcaataatctagacatgattaaaacattctctaatatctttgccttcatttggttccataggaatcttcccataaggctatatgttacggaacttcttggatctggataaatgaaaaagaagattttttttttttttttttttacagacaatgtagtttgaacattactcctatagccaccagtatataatgtctcaataatttatttgaataatacaccttagccttactgccctttctcatccacgggacttactgctacagtatcattcaactaaaatatcagactgctgtgcttccagaaaatactgttcaaacacatactgtttaaattaaaattactgtacatgcttcagatccataagttcagttaacatatgcccttacggacactattcctacttccccatcaggctctgataccagaggtcagcggagtaggatcacacggacaaataggaagtaagaatgcagtatgattgatgaaatgaaaatataaacttgaaaacagatatcacagaggtcagcggagtaggatcacacggacaaataggaagtaagaatgcagtatgattgatgaaatgaaaatataaacttgaaaacagatatcaagggcacaccggagaccggcttacaaatcccaggttttcataaacaaagaaaccgaagcggcggcagagccgcacaggatcggtgaagggagaagagagaaagatgaaaaatagaaatttattgaatctagaaagaagcgcttacaaaaatcttgtttcagagcacctctcttccgaaacctgaaaaatggctaaaatgaaagggtgcctcacaacatgcttgaggactccttatatagccaaaaatcta

SEQ ID NO: 9573 - DNA, 1153 bp, Glycine max
  Gm_smallRNAprecursor_2406
gatcctgagggatttctggaatgttccagtcatccatgttttgattaatatcttcgaatcggacttcctcatcgaagagattgtgttttggggcgacctcttgggtctggttatcttgatcatttaagagattggtgtttcttgaagaagatgaagaggaggaattcgagcgaaaagaaatacgggaaaacgatcgcaataatctagacatgattaaaacattctctaatatctttgccttcatttggttccataggaatcttcccataaggctatatgttacggaacttcttggatctggataaatgaaaaagaagattttttttttttttttttttacagacaatgtagtttgaacattactcctatagccaccagtatataatgtctcaataatttatttgaataatacaccttagccttactgccctttctcatccacgggacttactgctacagtatcattcaactaaaatatcagactgctgtgcttccagaaaatactgttcaaacacatactgtttaaattaaaattactgtacatgcttcagatccataagttcagttaacatatgcccttacggacactattcctacttccccatcaggctctgataccagaggtcagcggagtaggatcacacggacaaataggaagtaagaatgcagtatgattgatgaaatgaaaatataaacttgaaaacagatatcacagaggtcagcggagtaggatcacacggacaaataggaagtaagaatgcagtatgattgatgaaatgaaaatataaacttgaaaacagatatcaagggcacaccggagaccggcttacaaatcccaggttttcataaacaaagaaaccgaagcggcggcagagccgcacaggatcggtgaagggagaagagagaaagatgaaaaatagaaatttattgaatctagaaagaagcgcttacaaaaatcttgtttcagagcacctctcttccgaaacctgaaaaatggctaaaatgaaagggtgcctcacaacatgcttgaggactccttatatagccaaaaatctaagaccggtagttgccggtagttttgaccgggactatttgactgtttgttacaagacaagtagttttgaccgggactttaatggctacaggacaggta

SEQ ID NO: 9574 - DNA, 1247 bp, Glycine max
  Gm_smallRNAprecursor_2407
gatcctgagggatttctggaatgttccagtcatccatgttttgattaatatcttcgaatcggacttcctcatcgaagagattgtgttttggggcgacctcttgggtctggttatcttgatcatttaagagattggtgtttcttgaagaagatgaagaggaggaattcgagcgaaaagaaatacgggaaaacgatcgcaataatctagacatgattaaaacattctctaatatctttgccttcatttggttccataggaatcttcccataaggctatatgttacggaacttcttggatctggataaatgaaaaagaagattttttttttttttttttttacagacaatgtagtttgaacattactcctatagccaccagtatataatgtctcaataatttatttgaataatacaccttagccttactgccctttctcatccacgggacttactgctacagtatcattcaactaaaatatcagactgctgtgcttccagaaaatactgttcaaacacatactgtttaaattaaaattactgtacatgcttcagatccataagttcagttaacatatgcccttacggacactattcctacttccccatcaggctctgataccagaggtcagcggagtaggatcacacggacaaataggaagtaagaatgcagtatgattgatgaaatgaaaatataaacttgaaaacagatatcacagaggtcagcggagtaggatcacacggacaaataggaagtaagaatgcagtatgattgatgaaatgaaaatataaacttgaaaacagatatcaagggcacaccggagaccggcttacaaatcccaggttttcataaacaaagaaaccgaagcggcggcagagccgcacaggatcggtgaagggagaagagagaaagatgaaaaatagaaatttattgaatctagaaagaagcgcttacaaaaatcttgtttcagagcacctctcttccgaaacctgaaaaatggctaaaatgaaagggtgcctcacaacatgcttgaggactccttatatagccaaaaatctaagaccggtagttgccggtagttttgaccgggactatttgactgtttgttacaagacaagtagttttgaccgggactttaatggctacaggacaggtagtattgtccagcattaattacacattaattacaaacagacggttttgtgaccgaaattaaatttaatctaaacagataccaaaacaatcatctt

SEQ ID NO: 9575 - DNA, 1049 bp, Glycine max
  Gm_smallRNAprecursor_2408
ctgagggatttctggaatgttccagtcatccatgttttgattaatatcttcgaatcggacttcctcatcgaagagattgtgttttggggcgacctcttgggtctggttatcttgatcatttaagagattggtgtttcttgaagaagatgaagaggaggaattcgagcgaaaagaaatacgggaaaacgatcgcaataatctagacatgattaaaacattctctaatatctttgccttcatttggttccataggaatcttcccataaggctatatgttacggaacttcttggatctggataaatgaaaaagaagattttttttttttttttttttacagacaatgtagtttgaacattactcctatagccaccagtatataatgtctcaataatttatttgaataatacaccttagccttactgccctttctcatccacgggacttactgctacagtatcattcaactaaaatatcagactgctgtgcttccagaaaatactgttcaaacacatactgtttaaattaaaattactgtacatgcttcagatccataagttcagttaacatatgcccttacggacactattcctacttccccatcaggctctgataccagaggtcagcggagtaggatcacacggacaaataggaagtaagaatgcagtatgattgatgaaatgaaaatataaacttgaaaacagatatcacagaggtcagcggagtaggatcacacggacaaataggaagtaagaatgcagtatgattgatgaaatgaaaatataaacttgaaaacagatatcaagggcacaccggagaccggcttacaaatcccaggttttcataaacaaagaaaccgaagcggcggcagagccgcacaggatcggtgaagggagaagagagaaagatgaaaaatagaaatttattgaatctagaaagaagcgcttacaaaaatcttgtttcagagcacctctcttccgaaacctgaaaaatggctaaaatgaaagggtgcctcacaacatgcttgaggactccttatatagccaaaaat

SEQ ID NO: 9576 - DNA, 1052 bp, Glycine max
  Gm_smallRNAprecursor_2409
ctgagggatttctggaatgttccagtcatccatgttttgattaatatcttcgaatcggacttcctcatcgaagagattgtgttttggggcgacctcttgggtctggttatcttgatcatttaagagattggtgtttcttgaagaagatgaagaggaggaattcgagcgaaaagaaatacgggaaaacgatcgcaataatctagacatgattaaaacattctctaatatctttgccttcatttggttccataggaatcttcccataaggctatatgttacggaacttcttggatctggataaatgaaaaagaagattttttttttttttttttttacagacaatgtagtttgaacattactcctatagccaccagtatataatgtctcaataatttatttgaataatacaccttagccttactgccctttctcatccacgggacttactgctacagtatcattcaactaaaatatcagactgctgtgcttccagaaaatactgttcaaacacatactgtttaaattaaaattactgtacatgcttcagatccataagttcagttaacatatgcccttacggacactattcctacttccccatcaggctctgataccagaggtcagcggagtaggatcacacggacaaataggaagtaagaatgcagtatgattgatgaaatgaaaatataaacttgaaaacagatatcacagaggtcagcggagtaggatcacacggacaaataggaagtaagaatgcagtatgattgatgaaatgaaaatataaacttgaaaacagatatcaagggcacaccggagaccggcttacaaatcccaggttttcataaacaaagaaaccgaagcggcggcagagccgcacaggatcggtgaagggagaagagagaaagatgaaaaatagaaatttattgaatctagaaagaagcgcttacaaaaatcttgtttcagagcacctctcttccgaaacctgaaaaatggctaaaatgaaagggtgcctcacaacatgcttgaggactccttatatagccaaaaatcta

SEQ ID NO: 9577 - DNA, 1064 bp, Glycine max
  Gm_smallRNAprecursor_2410
ctgagggatttctggaatgttccagtcatccatgttttgattaatatcttcgaatcggacttcctcatcgaagagattgtgttttggggcgacctcttgggtctggttatcttgatcatttaagagattggtgtttcttgaagaagatgaagaggaggaattcgagcgaaaagaaatacgggaaaacgatcgcaataatctagacatgattaaaacattctctaatatctttgccttcatttggttccataggaatcttcccataaggctatatgttacggaacttcttggatctggataaatgaaaaagaagattttttttttttttttttttacagacaatgtagtttgaacattactcctatagccaccagtatataatgtctcaataatttatttgaataatacaccttagccttactgccctttctcatccacgggacttactgctacagtatcattcaactaaaatatcagactgctgtgcttccagaaaatactgttcaaacacatactgtttaaattaaaattactgtacatgcttcagatccataagttcagttaacatatgcccttacggacactattcctacttccccatcaggctctgataccagaggtcagcggagtaggatcacacggacaaataggaagtaagaatgcagtatgattgatgaaatgaaaatataaacttgaaaacagatatcacagaggtcagcggagtaggatcacacggacaaataggaagtaagaatgcagtatgattgatgaaatgaaaatataaacttgaaaacagatatcaagggcacaccggagaccggcttacaaatcccaggttttcataaacaaagaaaccgaagcggcggcagagccgcacaggatcggtgaagggagaagagagaaagatgaaaaatagaaatttattgaatctagaaagaagcgcttacaaaaatcttgtttcagagcacctctcttccgaaacctgaaaaatggctaaaatgaaagggtgcctcacaacatgcttgaggactccttatatagccaaaaatctaagaccggtagtt

SEQ ID NO: 9578 - DNA, 1046 bp, Glycine max
  Gm_smallRNAprecursor_2411
cacggacaaataggaagtaagaatgcagtatgattgatgaaatgaaaatataaacttgaaaacagatatcaagggcacaccggagaccggcttacaaatcccaggttttcataaacaaagaaaccgaagcggcggcagagccgcacaggatcggtgaagggagaagagagaaagatgaaaaatagaaatttattgaatctagaaagaagcgcttacaaaaatcttgtttcagagcacctctcttccgaaacctgaaaaatggctaaaatgaaagggtgcctcacaacatgcttgaggactccttatatagccaaaaatctaagaccggtagttgccggtagttttgaccgggactatttgactgtttgttacaagacaagtagttttgaccgggactttaatggctacaggacaggtagtattgtccagcattaattacacattaattacaaacagacggttttgtgaccgaaattaaatttaatctaaacagataccaaaacaatcatcttcgttttggtaaaagggatcttcttcgtcttcttcagcagaacttgtttcttccttctttgaggatgaagcttcttcttcctgttgtaacacttgtagaacttccttcagatttttagctaagacctcctttgatgtcgatcctgctaaaaatgctgccagatgagacttttggttcaagaacacagaagtctctggatcagctgctttgaggaattctggatgggattggaaccatagttttacttgttctggatccgctttggatgagtcaaattgtgtccaccattttacaaatgcgtgtctttgtagtgatggatattggtttgtcttttcagtcttgctgtaacgatattgccatgagaatatccatgacagtgcaaagcttgaaaagtatttaagatctgctggaattcgtgattcctgcgaattgtattgtttcttaaattgggaaaatccttgttggaccatttctgggaatatctctgggattggtccaaagaagtcccaccattgcaaaaaccaattgggaaaat

SEQ ID NO: 9579 - DNA, 1173 bp, Glycine max
  Gm_smallRNAprecursor_2412
gcagtatgattgatgaaatgaaaatataaacttgaaaacagatatcaagggcacaccggagaccggcttacaaatcccaggttttcataaacaaagaaaccgaagcggcggcagagccgcacaggatcggtgaagggagaagagagaaagatgaaaaatagaaatttattgaatctagaaagaagcgcttacaaaaatcttgtttcagagcacctctcttccgaaacctgaaaaatggctaaaatgaaagggtgcctcacaacatgcttgaggactccttatatagccaaaaatctaagaccggtagttgccggtagttttgaccgggactatttgactgtttgttacaagacaagtagttttgaccgggactttaatggctacaggacaggtagtattgtccagcattaattacacattaattacaaacagacggttttgtgaccgaaattaaatttaatctaaacagataccaaaacaatcatcttcgttttggtaaaagggatcttcttcgtcttcttcagcagaacttgtttcttccttctttgaggatgaagcttcttcttcctgttgtaacacttgtagaacttccttcagatttttagctaagacctcctttgatgtcgatcctgctaaaaatgctgccagatgagacttttggttcaagaacacagaagtctctggatcagctgctttgaggaattctggatgggattggaaccatagttttacttgttctggatccgctttggatgagtcaaattgtgtccaccattttacaaatgcgtgtctttgtagtgatggatattggtttgtcttttcagtcttgctgtaacgatattgccatgagaatatccatgacagtgcaaagcttgaaaagtatttaagatctgctggaattcgtgattcctgcgaattgtattgtttcttaaattgggaaaatccttgttggaccatttctgggaatatctctgggattggtccaaagaagtcccaccattgcaaaaaccaattgggaaaattgaaaattgtgttggtcttgaaatatatcagccatgagtgtttgaagcgggtattttggtgccaaaacaccttagtccaagcatcaacgtaatcccaataggtataacctaccggatcaaatggaactgaaaatctctttcctttgttcaa

SEQ ID NO: 9580 - DNA, 1158 bp, Glycine max
  Gm_smallRNAprecursor_2413
aaatgaaaatataaacttgaaaacagatatcaagggcacaccggagaccggcttacaaatcccaggttttcataaacaaagaaaccgaagcggcggcagagccgcacaggatcggtgaagggagaagagagaaagatgaaaaatagaaatttattgaatctagaaagaagcgcttacaaaaatcttgtttcagagcacctctcttccgaaacctgaaaaatggctaaaatgaaagggtgcctcacaacatgcttgaggactccttatatagccaaaaatctaagaccggtagttgccggtagttttgaccgggactatttgactgtttgttacaagacaagtagttttgaccgggactttaatggctacaggacaggtagtattgtccagcattaattacacattaattacaaacagacggttttgtgaccgaaattaaatttaatctaaacagataccaaaacaatcatcttcgttttggtaaaagggatcttcttcgtcttcttcagcagaacttgtttcttccttctttgaggatgaagcttcttcttcctgttgtaacacttgtagaacttccttcagatttttagctaagacctcctttgatgtcgatcctgctaaaaatgctgccagatgagacttttggttcaagaacacagaagtctctggatcagctgctttgaggaattctggatgggattggaaccatagttttacttgttctggatccgctttggatgagtcaaattgtgtccaccattttacaaatgcgtgtctttgtagtgatggatattggtttgtcttttcagtcttgctgtaacgatattgccatgagaatatccatgacagtgcaaagcttgaaaagtatttaagatctgctggaattcgtgattcctgcgaattgtattgtttcttaaattgggaaaatccttgttggaccatttctgggaatatctctgggattggtccaaagaagtcccaccattgcaaaaaccaattgggaaaattgaaaattgtgttggtcttgaaatatatcagccatgagtgtttgaagcgggtattttggtgccaaaacaccttagtccaagcatcaacgtaatcccaataggtataacctaccggatcaaatggaactgaaaatctctttcctttgttcaa

SEQ ID NO: 9581 - DNA, 1182 bp, Glycine max
  Gm_smallRNAprecursor_2414
tgtttcagagcacctctcttccgaaacctgaaaaatggctaaaatgaaagggtgcctcacaacatgcttgaggactccttatatagccaaaaatctaagaccggtagttgccggtagttttgaccgggactatttgactgtttgttacaagacaagtagttttgaccgggactttaatggctacaggacaggtagtattgtccagcattaattacacattaattacaaacagacggttttgtgaccgaaattaaatttaatctaaacagataccaaaacaatcatcttcgttttggtaaaagggatcttcttcgtcttcttcagcagaacttgtttcttccttctttgaggatgaagcttcttcttcctgttgtaacacttgtagaacttccttcagatttttagctaagacctcctttgatgtcgatcctgctaaaaatgctgccagatgagacttttggttcaagaacacagaagtctctggatcagctgctttgaggaattctggatgggattggaaccatagttttacttgttctggatccgctttggatgagtcaaattgtgtccaccattttacaaatgcgtgtctttgtagtgatggatattggtttgtcttttcagtcttgctgtaacgatattgccatgagaatatccatgacagtgcaaagcttgaaaagtatttaagatctgctggaattcgtgattcctgcgaattgtattgtttcttaaattgggaaaatccttgttggaccatttctgggaatatctctgggattggtccaaagaagtcccaccattgcaaaaaccaattgggaaaattgaaaattgtgttggtcttgaaatatatcagccatgagtgtttgaagcgggtattttggtgccaaaacaccttagtccaagcatcaacgtaatcccaataggtataacctaccggatcaaatggaactgaaaatctctttcctttgttcaagtccgaaccaaagtgtcttggttgaagaacttttagtatttggatggttgagtgggtgtttaaggtttggtcttttggatctttgaaatgtttgatagatactgagtttgaatctaccaaaatcaattcataaaaagttcttgtcttcaggatggtggttggtttgtagtgaaatcctggtgggaaagccttggctgtcgccttgaagg

SEQ ID NO: 9582 - DNA, 1031 bp, Glycine max
  Gm_smallRNAprecursor_2415
acaagtagttttgaccgggactttaatggctacaggacaggtagtattgtccagcattaattacacattaattacaaacagacggttttgtgaccgaaattaaatttaatctaaacagataccaaaacaatcatcttcgttttggtaaaagggatcttcttcgtcttcttcagcagaacttgtttcttccttctttgaggatgaagcttcttcttcctgttgtaacacttgtagaacttccttcagatttttagctaagacctcctttgatgtcgatcctgctaaaaatgctgccagatgagacttttggttcaagaacacagaagtctctggatcagctgctttgaggaattctggatgggattggaaccatagttttacttgttctggatccgctttggatgagtcaaattgtgtccaccattttacaaatgcgtgtctttgtagtgatggatattggtttgtcttttcagtcttgctgtaacgatattgccatgagaatatccatgacagtgcaaagcttgaaaagtatttaagatctgctggaattcgtgattcctgcgaattgtattgtttcttaaattgggaaaatccttgttggaccatttctgggaatatctctgggattggtccaaagaagtcccaccattgcaaaaaccaattgggaaaattgaaaattgtgttggtcttgaaatatatcagccatgagtgtttgaagcgggtattttggtgccaaaacaccttagtccaagcatcaacgtaatcccaataggtataacctaccggatcaaatggaactgaaaatctctttcctttgttcaagtccgaaccaaagtgtcttggttgaagaacttttagtatttggatggttgagtgggtgtttaaggtttggtcttttggatctttgaaatgtttgatagatactgagtttgaatctaccaaaatcaattcataaaaagttcttgtcttcaggatggtggttggtttgtagtgaaatcctggtgggaaagccttggctgtcgccttgaagg

SEQ ID NO: 9583 - DNA, 1031 bp, Glycine max; identical to SEQ ID NO: 9582
  Gm_smallRNAprecursor_2416

SEQ ID NO: 9584 - DNA, 1114 bp, Glycine max
  Gm_smallRNAprecursor_2417
ggactttaatggctacaggacaggtagtattgtccagcattaattacacattaattacaaacagacggttttgtgaccgaaattaaatttaatctaaacagataccaaaacaatcatcttcgttttggtaaaagggatcttcttcgtcttcttcagcagaacttgtttcttccttctttgaggatgaagcttcttcttcctgttgtaacacttgtagaacttccttcagatttttagctaagacctcctttgatgtcgatcctgctaaaaatgctgccagatgagacttttggttcaagaacacagaagtctctggatcagctgctttgaggaattctggatgggattggaaccatagttttacttgttctggatccgctttggatgagtcaaattgtgtccaccattttacaaatgcgtgtctttgtagtgatggatattggtttgtcttttcagtcttgctgtaacgatattgccatgagaatatccatgacagtgcaaagcttgaaaagtatttaagatctgctggaattcgtgattcctgcgaattgtattgtttcttaaattgggaaaatccttgttggaccatttctgggaatatctctgggattggtccaaagaagtcccaccattgcaaaaaccaattgggaaaattgaaaattgtgttggtcttgaaatatatcagccatgagtgtttgaagcgggtattttggtgccaaaacaccttagtccaagcatcaacgtaatcccaataggtataacctaccggatcaaatggaactgaaaatctctttcctttgttcaagtccgaaccaaagtgtcttggttgaagaacttttagtatttggatggttgagtgggtgtttaaggtttggtcttttggatctttgaaatgtttgatagatactgagtttgaatctaccaaaatcaattcataaaaagttcttgtcttcaggatggtggttggtttgtagtgaaatcctggtgggaaagccttggctgtcgccttgaagggatttttgtcccaaaattcaggttccatctgcaaaacagttaacaatttatttttataaatataattgttagtttgtttggtaggtggtgtttgagcttt

SEQ ID NO: 9585 - DNA, 1146 bp, Glycine max
  Gm_smallRNAprecursor_2418
tacaggacaggtagtattgtccagcattaattacacattaattacaaacagacggttttgtgaccgaaattaaatttaatctaaacagataccaaaacaatcatcttcgttttggtaaaagggatcttcttcgtcttcttcagcagaacttgtttcttccttctttgaggatgaagcttcttcttcctgttgtaacacttgtagaacttccttcagatttttagctaagacctcctttgatgtcgatcctgctaaaaatgctgccagatgagacttttggttcaagaacacagaagtctctggatcagctgctttgaggaattctggatgggattggaaccatagttttacttgttctggatccgctttggatgagtcaaattgtgtccaccattttacaaatgcgtgtctttgtagtgatggatattggtttgtcttttcagtcttgctgtaacgatattgccatgagaatatccatgacagtgcaaagcttgaaaagtatttaagatctgctggaattcgtgattcctgcgaattgtattgtttcttaaattgggaaaatccttgttggaccatttctgggaatatctctgggattggtccaaagaagtcccaccattgcaaaaaccaattgggaaaattgaaaattgtgttggtcttgaaatatatcagccatgagtgtttgaagcgggtattttggtgccaaaacaccttagtccaagcatcaacgtaatcccaataggtataacctaccggatcaaatggaactgaaaatctctttcctttgttcaagtccgaaccaaagtgtcttggttgaagaacttttagtatttggatggttgagtgggtgtttaaggtttggtcttttggatctttgaaatgtttgatagatactgagtttgaatctaccaaaatcaattcataaaaagttcttgtcttcaggatggtggttggtttgtagtgaaatcctggtgggaaagccttggctgtcgccttgaagggatttttgtcccaaaattcaggttccatctgcaaaacagttaacaatttatttttataaatataattgttagtttgtttggtaggtggtgtttgagctttggctaaaggtagttttcctttagtattggtggctgttttggtcat

SEQ ID NO: 9586 - DNA, 1146 bp, Glycine max; identical to SEQ ID NO: 9585
  Gm_smallRNAprecursor_2419

SEQ ID NO: 9587 - DNA, 1147 bp, Glycine max
  Gm_smallRNAprecursor_2420
tacaggacaggtagtattgtccagcattaattacacattaattacaaacagacggttttgtgaccgaaattaaatttaatctaaacagataccaaaacaatcatcttcgttttggtaaaagggatcttcttcgtcttcttcagcagaacttgtttcttccttctttgaggatgaagcttcttcttcctgttgtaacacttgtagaacttccttcagatttttagctaagacctcctttgatgtcgatcctgctaaaaatgctgccagatgagacttttggttcaagaacacagaagtctctggatcagctgctttgaggaattctggatgggattggaaccatagttttacttgttctggatccgctttggatgagtcaaattgtgtccaccattttacaaatgcgtgtctttgtagtgatggatattggtttgtcttttcagtcttgctgtaacgatattgccatgagaatatccatgacagtgcaaagcttgaaaagtatttaagatctgctggaattcgtgattcctgcgaattgtattgtttcttaaattgggaaaatccttgttggaccatttctgggaatatctctgggattggtccaaagaagtcccaccattgcaaaaaccaattgggaaaattgaaaattgtgttggtcttgaaatatatcagccatgagtgtttgaagcgggtattttggtgccaaaacaccttagtccaagcatcaacgtaatcccaataggtataacctaccggatcaaatggaactgaaaatctctttcctttgttcaagtccgaaccaaagtgtcttggttgaagaacttttagtatttggatggttgagtgggtgtttaaggtttggtcttttggatctttgaaatgtttgatagatactgagtttgaatctaccaaaatcaattcataaaaagttcttgtcttcaggatggtggttggtttgtagtgaaatcctggtgggaaagccttggctgtcgccttgaagggatttttgtcccaaaattcaggttccatctgcaaaacagttaacaatttatttttataaatataattgttagtttgtttggtaggtggtgtttgagctttggctaaaggtagttttcctttagtattggtggctgttttggtcatt

SEQ ID NO: 9588 - DNA, 1147 bp, Glycine max; identical to SEQ ID NO: 9587
  Gm_smallRNAprecursor_2421

SEQ ID NO: 9589 - DNA, 1247 bp, Glycine max
  Gm_smallRNAprecursor_2422
tacaggacaggtagtattgtccagcattaattacacattaattacaaacagacggttttgtgaccgaaattaaatttaatctaaacagataccaaaacaatcatcttcgttttggtaaaagggatcttcttcgtcttcttcagcagaacttgtttcttccttctttgaggatgaagcttcttcttcctgttgtaacacttgtagaacttccttcagatttttagctaagacctcctttgatgtcgatcctgctaaaaatgctgccagatgagacttttggttcaagaacacagaagtctctggatcagctgctttgaggaattctggatgggattggaaccatagttttacttgttctggatccgctttggatgagtcaaattgtgtccaccattttacaaatgcgtgtctttgtagtgatggatattggtttgtcttttcagtcttgctgtaacgatattgccatgagaatatccatgacagtgcaaagcttgaaaagtatttaagatctgctggaattcgtgattcctgcgaattgtattgtttcttaaattgggaaaatccttgttggaccatttctgggaatatctctgggattggtccaaagaagtcccaccattgcaaaaaccaattgggaaaattgaaaattgtgttggtcttgaaatatatcagccatgagtgtttgaagcgggtattttggtgccaaaacaccttagtccaagcatcaacgtaatcccaataggtataacctaccggatcaaatggaactgaaaatctctttcctttgttcaagtccgaaccaaagtgtcttggttgaagaacttttagtatttggatggttgagtgggtgtttaaggtttggtcttttggatctttgaaatgtttgatagatactgagtttgaatctaccaaaatcaattcataaaaagttcttgtcttcaggatggtggttggtttgtagtgaaatcctggtgggaaagccttggctgtcgccttgaagggatttttgtcccaaaattcaggttccatctgcaaaacagttaacaatttatttttataaatataattgttagtttgtttggtaggtggtgtttgagctttggctaaaggtagttttcctttagtattggtggctgttttggtcattgacgcattttggatcattgtttgtaaatttgattcagattcatcatcagattctgaggcaatgtctgcccaagattttttgattatttttggaaatttgg

SEQ ID NO: 9590 - DNA, 1247 bp, Glycine max; identical to SEQ ID NO: 9589
  Gm_smallRNAprecursor_2423

SEQ ID NO: 9591 - DNA, 1124 bp, Glycine max
  Gm_smallRNAprecursor_2424
ccttcagatttttagctaagacctcctttgatgtcgatcctgctaaaaatgctgccagatgagacttttggttcaagaacacagaagtctctggatcagctgctttgaggaattctggatgggattggaaccatagttttacttgttctggatccgctttggatgagtcaaattgtgtccaccattttacaaatgcgtgtctttgtagtgatggatattggtttgtcttttcagtcttgctgtaacgatattgccatgagaatatccatgacagtgcaaagcttgaaaagtatttaagatctgctggaattcgtgattcctgcgaattgtattgtttcttaaattgggaaaatccttgttggaccatttctgggaatatctctgggattggtccaaagaagtcccaccattgcaaaaaccaattgggaaaattgaaaattgtgttggtcttgaaatatatcagccatgagtgtttgaagcgggtattttggtgccaaaacaccttagtccaagcatcaacgtaatcccaataggtataacctaccggatcaaatggaactgaaaatctctttcctttgttcaagtccgaaccaaagtgtcttggttgaagaacttttagtatttggatggttgagtgggtgtttaaggtttggtcttttggatctttgaaatgtttgatagatactgagtttgaatctaccaaaatcaattcataaaaagttcttgtcttcaggatggtggttggtttgtagtgaaatcctggtgggaaagccttggctgtcgccttgaagggatttttgtcccaaaattcaggttccatctgcaaaacagttaacaatttatttttataaatataattgttagtttgtttggtaggtggtgtttgagctttggctaaaggtagttttcctttagtattggtggctgttttggtcattgacgcattttggatcattgtttgtaaatttgattcagattcatcatcagattctgaggcaatgtctgcccaagattttttgattatttttggaaatttggtcagacccatgtcttgaagggcctgaagggtttcaattggccatgcatagtcggccgatgtttgtttggcggttgccggtttggga

SEQ ID NO: 9592 - DNA, 1130 bp, Glycine max
  Gm_smallRNAprecursor_2425
ccttcagatttttagctaagacctcctttgatgtcgatcctgctaaaaatgctgccagatgagacttttggttcaagaacacagaagtctctggatcagctgctttgaggaattctggatgggattggaaccatagttttacttgttctggatccgctttggatgagtcaaattgtgtccaccattttacaaatgcgtgtctttgtagtgatggatattggtttgtcttttcagtcttgctgtaacgatattgccatgagaatatccatgacagtgcaaagcttgaaaagtatttaagatctgctggaattcgtgattcctgcgaattgtattgtttcttaaattgggaaaatccttgttggaccatttctgggaatatctctgggattggtccaaagaagtcccaccattgcaaaaaccaattgggaaaattgaaaattgtgttggtcttgaaatatatcagccatgagtgtttgaagcgggtattttggtgccaaaacaccttagtccaagcatcaacgtaatcccaataggtataacctaccggatcaaatggaactgaaaatctctttcctttgttcaagtccgaaccaaagtgtcttggttgaagaacttttagtatttggatggttgagtgggtgtttaaggtttggtcttttggatctttgaaatgtttgatagatactgagtttgaatctaccaaaatcaattcataaaaagttcttgtcttcaggatggtggttggtttgtagtgaaatcctggtgggaaagccttggctgtcgccttgaagggatttttgtcccaaaattcaggttccatctgcaaaacagttaacaatttatttttataaatataattgttagtttgtttggtaggtggtgtttgagctttggctaaaggtagttttcctttagtattggtggctgttttggtcattgacgcattttggatcattgtttgtaaatttgattcagattcatcatcagattctgaggcaatgtctgcccaagattttttgattatttttggaaatttggtcagacccatgtcttgaagggcctgaagggtttcaattggccatgcatagtcggccgatgtttgtttggcggttgccggtttgggagattcc

SEQ ID NO: 9593 - DNA, 1087 bp, Glycine max
  Gm_smallRNAprecursor_2426
tcctgctaaaaatgctgccagatgagacttttggttcaagaacacagaagtctctggatcagctgctttgaggaattctggatgggattggaaccatagttttacttgttctggatccgctttggatgagtcaaattgtgtccaccattttacaaatgcgtgtctttgtagtgatggatattggtttgtcttttcagtcttgctgtaacgatattgccatgagaatatccatgacagtgcaaagcttgaaaagtatttaagatctgctggaattcgtgattcctgcgaattgtattgtttcttaaattgggaaaatccttgttggaccatttctgggaatatctctgggattggtccaaagaagtcccaccattgcaaaaaccaattgggaaaattgaaaattgtgttggtcttgaaatatatcagccatgagtgtttgaagcgggtattttggtgccaaaacaccttagtccaagcatcaacgtaatcccaataggtataacctaccggatcaaatggaactgaaaatctctttcctttgttcaagtccgaaccaaagtgtcttggttgaagaacttttagtatttggatggttgagtgggtgtttaaggtttggtcttttggatctttgaaatgtttgatagatactgagtttgaatctaccaaaatcaattcataaaaagttcttgtcttcaggatggtggttggtttgtagtgaaatcctggtgggaaagccttggctgtcgccttgaagggatttttgtcccaaaattcaggttccatctgcaaaacagttaacaatttatttttataaatataattgttagtttgtttggtaggtggtgtttgagctttggctaaaggtagttttcctttagtattggtggctgttttggtcattgacgcattttggatcattgtttgtaaatttgattcagattcatcatcagattctgaggcaatgtctgcccaagattttttgattatttttggaaatttggtcagacccatgtcttgaagggcctgaagggtttcaattggccatgcatagtcggccgatgtttgtttggcggttgccggtttggga

SEQ ID NO: 9594 - DNA, 1174 bp, Glycine max
  Gm_smallRNAprecursor_2427
cgggtattttggtgccaaaacaccttagtccaagcatcaacgtaatcccaataggtataacctaccggatcaaatggaactgaaaatctctttcctttgttcaagtccgaaccaaagtgtcttggttgaagaacttttagtatttggatggttgagtgggtgtttaaggtttggtcttttggatctttgaaatgtttgatagatactgagtttgaatctaccaaaatcaattcataaaaagttcttgtcttcaggatggtggttggtttgtagtgaaatcctggtgggaaagccttggctgtcgccttgaagggatttttgtcccaaaattcaggttccatctgcaaaacagttaacaatttatttttataaatataattgttagtttgtttggtaggtggtgtttgagctttggctaaaggtagttttcctttagtattggtggctgttttggtcattgacgcattttggatcattgtttgtaaatttgattcagattcatcatcagattctgaggcaatgtctgcccaagattttttgattatttttggaaatttggtcagacccatgtcttgaagggcctgaagggtttcaattggccatgcatagtcggccgatgtttgtttggcggttgccggtttgggagattcctgagtggatggctcaggtttgattgaggcaatctgggttgatgacccttctaaattggttttctgggtagatgacccagcctgggttggtgacccagaagaggtagatgatttcttgatggttggctctggaagagccagcctggctcctttgcctgtactccttcctccccgtagggagattcccgatgccttaggaggcattaccacttttctgtaagaattcacgggtaaggtagtcaggtagtgaatttgaggtgcccttgatgtattctatgtcaaaatcaaagacaattaaaattgcttgccatcgtgcaaaaatttgttttgaggcaaggtttttaacatctttttgtaaaatatctttggctgatttacaatcaaccctgattaaaaatttttggtttaataaatccgattgaaatttggaaatgcacaaaacaattgctaaaacctcttttttaacagttgaatattttaattgtgcaggattccaatgttttgatgtatatgcaatgacatga

SEQ ID NO: 9595 - DNA, 1173 bp, Glycine max
  Gm_smallRNAprecursor_2428
gggtattttggtgccaaaacaccttagtccaagcatcaacgtaatcccaataggtataacctaccggatcaaatggaactgaaaatctctttcctttgttcaagtccgaaccaaagtgtcttggttgaagaacttttagtatttggatggttgagtgggtgtttaaggtttggtcttttggatctttgaaatgtttgatagatactgagtttgaatctaccaaaatcaattcataaaaagttcttgtcttcaggatggtggttggtttgtagtgaaatcctggtgggaaagccttggctgtcgccttgaagggatttttgtcccaaaattcaggttccatctgcaaaacagttaacaatttatttttataaatataattgttagtttgtttggtaggtggtgtttgagctttggctaaaggtagttttcctttagtattggtggctgttttggtcattgacgcattttggatcattgtttgtaaatttgattcagattcatcatcagattctgaggcaatgtctgcccaagattttttgattatttttggaaatttggtcagacccatgtcttgaagggcctgaagggtttcaattggccatgcatagtcggccgatgtttgtttggcggttgccggtttgggagattcctgagtggatggctcaggtttgattgaggcaatctgggttgatgacccttctaaattggttttctgggtagatgacccagcctgggttggtgacccagaagaggtagatgatttcttgatggttggctctggaagagccagcctggctcctttgcctgtactccttcctccccgtagggagattcccgatgccttaggaggcattaccacttttctgtaagaattcacgggtaaggtagtcaggtagtgaatttgaggtgcccttgatgtattctatgtcaaaatcaaagacaattaaaattgcttgccatcgtgcaaaaatttgttttgaggcaaggtttttaacatctttttgtaaaatatctttggctgatttacaatcaaccctgattaaaaatttttggtttaataaatccgattgaaatttggaaatgcacaaaacaattgctaaaacctcttttttaacagttgaatattttaattgtgcaggattccaatgttttgatgtatatgcaatgacatga

SEQ ID NO: 9596 - DNA, 1176 bp, Glycine max
  Gm_smallRNAprecursor_2429
gggtattttggtgccaaaacaccttagtccaagcatcaacgtaatcccaataggtataacctaccggatcaaatggaactgaaaatctctttcctttgttcaagtccgaaccaaagtgtcttggttgaagaacttttagtatttggatggttgagtgggtgtttaaggtttggtcttttggatctttgaaatgtttgatagatactgagtttgaatctaccaaaatcaattcataaaaagttcttgtcttcaggatggtggttggtttgtagtgaaatcctggtgggaaagccttggctgtcgccttgaagggatttttgtcccaaaattcaggttccatctgcaaaacagttaacaatttatttttataaatataattgttagtttgtttggtaggtggtgtttgagctttggctaaaggtagttttcctttagtattggtggctgttttggtcattgacgcattttggatcattgtttgtaaatttgattcagattcatcatcagattctgaggcaatgtctgcccaagattttttgattatttttggaaatttggtcagacccatgtcttgaagggcctgaagggtttcaattggccatgcatagtcggccgatgtttgtttggcggttgccggtttgggagattcctgagtggatggctcaggtttgattgaggcaatctgggttgatgacccttctaaattggttttctgggtagatgacccagcctgggttggtgacccagaagaggtagatgatttcttgatggttggctctggaagagccagcctggctcctttgcctgtactccttcctccccgtagggagattcccgatgccttaggaggcattaccacttttctgtaagaattcacgggtaaggtagtcaggtagtgaatttgaggtgcccttgatgtattctatgtcaaaatcaaagacaattaaaattgcttgccatcgtgcaaaaatttgttttgaggcaaggtttttaacatctttttgtaaaatatctttggctgatttacaatcaaccctgattaaaaatttttggtttaataaatccgattgaaatttggaaatgcacaaaacaattgctaaaacctcttttttaacagttgaatattttaattgtgcaggattccaatgttttgatgtatatgcaatgacatgatct

SEQ ID NO: 9597 - DNA, 1129 bp, Glycine max
  Gm_smallRNAprecursor_2430
ctgcaaaacagttaacaatttatttttataaatataattgttagtttgtttggtaggtggtgtttgagctttggctaaaggtagttttcctttagtattggtggctgttttggtcattgacgcattttggatcattgtttgtaaatttgattcagattcatcatcagattctgaggcaatgtctgcccaagattttttgattatttttggaaatttggtcagacccatgtcttgaagggcctgaagggtttcaattggccatgcatagtcggccgatgtttgtttggcggttgccggtttgggagattcctgagtggatggctcaggtttgattgaggcaatctgggttgatgacccttctaaattggttttctgggtagatgacccagcctgggttggtgacccagaagaggtagatgatttcttgatggttggctctggaagagccagcctggctcctttgcctgtactccttcctccccgtagggagattcccgatgccttaggaggcattaccacttttctgtaagaattcacgggtaaggtagtcaggtagtgaatttgaggtgcccttgatgtattctatgtcaaaatcaaagacaattaaaattgcttgccatcgtgcaaaaatttgttttgaggcaaggtttttaacatctttttgtaaaatatctttggctgatttacaatcaaccctgattaaaaatttttggtttaataaatccgattgaaatttggaaatgcacaaaacaattgctaaaacctcttttttaacagttgaatattttaattgtgcaggattccaatgttttgatgtatatgcaatgacatgatcttggccatggactctttgtttgaggatgccaccataacctatgtctgaagcatcagtttcgacaattttaaatgcctgtggaataggaagatacagacatttaatggattggactttgactttgatttctttaaccgtttgtgtatggaggtcagaccaaggaggcggatttttcttcagcctatcatgtaatggcttgacaatattatttaaataggggacaaattctcctacgtaatttagacaacctagaaatctttgtaactgggttttgtctaagatttggttggggaa

SEQ ID NO: 9598 - DNA, 1115 bp, Glycine max
  Gm_smallRNAprecursor_2431
acaatttatttttataaatataattgttagtttgtttggtaggtggtgtttgagctttggctaaaggtagttttcctttagtattggtggctgttttggtcattgacgcattttggatcattgtttgtaaatttgattcagattcatcatcagattctgaggcaatgtctgcccaagattttttgattatttttggaaatttggtcagacccatgtcttgaagggcctgaagggtttcaattggccatgcatagtcggccgatgtttgtttggcggttgccggtttgggagattcctgagtggatggctcaggtttgattgaggcaatctgggttgatgacccttctaaattggttttctgggtagatgacccagcctgggttggtgacccagaagaggtagatgatttcttgatggttggctctggaagagccagcctggctcctttgcctgtactccttcctccccgtagggagattcccgatgccttaggaggcattaccacttttctgtaagaattcacgggtaaggtagtcaggtagtgaatttgaggtgcccttgatgtattctatgtcaaaatcaaagacaattaaaattgcttgccatcgtgcaaaaatttgttttgaggcaaggtttttaacatctttttgtaaaatatctttggctgatttacaatcaaccctgattaaaaatttttggtttaataaatccgattgaaatttggaaatgcacaaaacaattgctaaaacctcttttttaacagttgaatattttaattgtgcaggattccaatgttttgatgtatatgcaatgacatgatcttggccatggactctttgtttgaggatgccaccataacctatgtctgaagcatcagtttcgacaattttaaatgcctgtggaataggaagatacagacatttaatggattggactttgactttgatttctttaaccgtttgtgtatggaggtcagaccaaggaggcggatttttcttcagcctatcatgtaatggcttgacaatattatttaaataggggacaaattctcctacgtaatttagacaacctagaaatctttgtaactgggttttgtctaagatttggttggggaa

SEQ ID NO: 9599 - DNA, 1071 bp, Glycine max
  Gm_smallRNAprecursor_2432
taaattggttttctgggtagatgacccagcctgggttggtgacccagaagaggtagatgatttcttgatggttggctctggaagagccagcctggctcctttgcctgtactccttcctccccgtagggagattcccgatgccttaggaggcattaccacttttctgtaagaattcacgggtaaggtagtcaggtagtgaatttgaggtgcccttgatgtattctatgtcaaaatcaaagacaattaaaattgcttgccatcgtgcaaaaatttgttttgaggcaaggtttttaacatctttttgtaaaatatctttggctgatttacaatcaaccctgattaaaaatttttggtttaataaatccgattgaaatttggaaatgcacaaaacaattgctaaaacctcttttttaacagttgaatattttaattgtgcaggattccaatgttttgatgtatatgcaatgacatgatcttggccatggactctttgtttgaggatgccaccataacctatgtctgaagcatcagtttcgacaattttaaatgcctgtggaataggaagatacagacatttaatggattggactttgactttgatttctttaaccgtttgtgtatggaggtcagaccaaggaggcggatttttcttcagcctatcatgtaatggcttgacaatattatttaaataggggacaaattctcctacgtaatttagacaacctagaaatctttgtaactgggttttgtctaagatttggttggggaatttgctagcaaactctattgacctttcgattggaatgattgtaccttgatatatattgtgaccaaggaatcgaattcgagtttggaaaagattgatttttgatttggagactgccaaaccattttgtttgatgatatgtatgaaggtttggagatgtttgaaatgttggtcaatgttttgtgaaaagattaaaacatcatctatgtagacaatgacaaattttgaataaggattaaaaatatcgttcataattttttgaaattctgaaggggcattcttcagtccgaatggcatcacgttcc

SEQ ID NO: 9600 - DNA, 1073 bp, Glycine max
  Gm_smallRNAprecursor_2433
taaattggttttctgggtagatgacccagcctgggttggtgacccagaagaggtagatgatttcttgatggttggctctggaagagccagcctggctcctttgcctgtactccttcctccccgtagggagattcccgatgccttaggaggcattaccacttttctgtaagaattcacgggtaaggtagtcaggtagtgaatttgaggtgcccttgatgtattctatgtcaaaatcaaagacaattaaaattgcttgccatcgtgcaaaaatttgttttgaggcaaggtttttaacatctttttgtaaaatatctttggctgatttacaatcaaccctgattaaaaatttttggtttaataaatccgattgaaatttggaaatgcacaaaacaattgctaaaacctcttttttaacagttgaatattttaattgtgcaggattccaatgttttgatgtatatgcaatgacatgatcttggccatggactctttgtttgaggatgccaccataacctatgtctgaagcatcagtttcgacaattttaaatgcctgtggaataggaagatacagacatttaatggattggactttgactttgatttctttaaccgtttgtgtatggaggtcagaccaaggaggcggatttttcttcagcctatcatgtaatggcttgacaatattatttaaataggggacaaattctcctacgtaatttagacaacctagaaatctttgtaactgggttttgtctaagatttggttggggaatttgctagcaaactctattgacctttcgattggaatgattgtaccttgatatatattgtgaccaaggaatcgaattcgagtttggaaaagattgatttttgatttggagactgccaaaccattttgtttgatgatatgtatgaaggtttggagatgtttgaaatgttggtcaatgttttgtgaaaagattaaaacatcatctatgtagacaatgacaaattttgaataaggattaaaaatatcgttcataattttttgaaattctgaaggggcattcttcagtccgaatggcatcacgttccat

SEQ ID NO: 9601 - DNA, 1178 bp, Glycine max
  Gm_smallRNAprecursor_2434
tggttggctctggaagagccagcctggctcctttgcctgtactccttcctccccgtagggagattcccgatgccttaggaggcattaccacttttctgtaagaattcacgggtaaggtagtcaggtagtgaatttgaggtgcccttgatgtattctatgtcaaaatcaaagacaattaaaattgcttgccatcgtgcaaaaatttgttttgaggcaaggtttttaacatctttttgtaaaatatctttggctgatttacaatcaaccctgattaaaaatttttggtttaataaatccgattgaaatttggaaatgcacaaaacaattgctaaaacctcttttttaacagttgaatattttaattgtgcaggattccaatgttttgatgtatatgcaatgacatgatcttggccatggactctttgtttgaggatgccaccataacctatgtctgaagcatcagtttcgacaattttaaatgcctgtggaataggaagatacagacatttaatggattggactttgactttgatttctttaaccgtttgtgtatggaggtcagaccaaggaggcggatttttcttcagcctatcatgtaatggcttgacaatattatttaaataggggacaaattctcctacgtaatttagacaacctagaaatctttgtaactgggttttgtctaagatttggttggggaatttgctagcaaactctattgacctttcgattggaatgattgtaccttgatatatattgtgaccaaggaatcgaattcgagtttggaaaagattgatttttgatttggagactgccaaaccattttgtttgatgatatgtatgaaggtttggagatgtttgaaatgttggtcaatgttttgtgaaaagattaaaacatcatctatgtagacaatgacaaattttgaataaggattaaaaatatcgttcataattttttgaaattctgaaggggcattcttcagtccgaatggcatcacgttccattcatattgcccgaaaggtacagtaaacgctgttttgtacctatctgattcttggatttggatttgccaaaatccagatttcatatcaaattttgaaaatatctttgcagaatttaatctgttaagcaaatcttttttctttggaataggatatctaatccattgtaatgcttg

SEQ ID NO: 9602 - DNA, 1080 bp, Glycine max
  Gm_smallRNAprecursor_2435
gatgtttgaaatgttggtcaatgttttgtgaaaagattaaaacatcatctatgtagacaatgacaaattttgaataaggattaaaaatatcgttcataattttttgaaattctgaaggggcattcttcagtccgaatggcatcacgttccattcatattgcccgaaaggtacagtaaacgctgttttgtacctatctgattcttggatttggatttgccaaaatccagatttcatatcaaattttgaaaatatctttgcagaatttaatctgttaagcaaatcttttttctttggaataggatatctaatccattgtaatgcttgatttaatggtttgtaatttatgactaagcggggtgttccacgctcaatctcagattgtttgttaacataaaaagccgcacaagaccatgggcttttgcttttccggattaggcctttatcaagcaaatccttgatttccttttgacaatattgaagaagttcttcattcatttggattggtctggcttttgtgggaatttgtttttccctaaagtctttctcataagggagatcgacaatatgtttctttctgtcccaaaatgcatgtggcaattcagaacaaacggtcgattcaatatgatttaataaagattgaattctttcttttacttggggttttcccagttgtatctgaatattattaaaagatacttcttcttttaagaagttaatttaattaatcttattttctataagatttatatttctggaaattggtttagtagaaaaattaaatataatttttcttcctaaataatttgtggttattccttcattagatatttggatgggaaacagggctctaatgaagggcgttcctaagattacttcattcttaaggttttttaccagaagaaaatttgtgttaatcttaagaccttggttttcaattattgcatttgatagcttaaaattaatttttaattttgagccgtttgccgtacttaatttttctgaggttttctcaaagaattttgtaggaattaatccttctaaaatgcagtttgaatcagcccctgtatcaaatagggcaa

SEQ ID NO: 9603 - DNA, 1126 bp, Glycine max
  Gm_smallRNAprecursor_2436
aagatgaacacaaattttcttctggtaaaaaaccttaagaatgaagtaatcttaggaacgcccttcattagagccctgtttcccatccaaatatctaatgaaggaataactacaaattatttaggaagaaaaattatatttaatttttctactaaaccaatttccagaaatataaatcttatagaaaataagattaatcaaattaacttcttaaaagaagaagtatcttttaataatattcagatacaactgggaaaaccccaagtaaaagaaagaattcaatctttattaaatcatattgaatcgaccgtttgttctgaattgccacatgcattttgggacagaaagaaacatattgtcgatctcccttatgagaaagactttagggaaaaacaaattcccacaaaagccagaccaatccaaatgaatgaagaacttcttcaatactgtcaaaaggaaatcaaggatttgcttgataaaggcctaatccagaaaagcaaaagcccatggtcttgtgcggctttttatgttaacaaacaatctgagattgagcgtggaacaccccgcttagtcataaattacaaaccattaaatcaagcattacaatggattaaatatcctattccaaacaaaaaagatttgcttaacagattaaattctgcaaagatattttcaaaatttgatatgaaatctggattttggcaaatccaaatccaagaatcagataggtacaaaacagcgtttactgtacctttcgggcaatatgaatggaacgtgatgccattcggactgaagaatgccccttcagaatttcaaaaaattatgaacgatatttttaatccctattcaaaatttgtcattgtctacatagatgatgttttaatcttttcccaaaacattgaccaacatttcaaacatctccaaaccttcatacatatcatcaaacaaaatggtttggcagtctccaaatcaaaaatcaatcttttccaaacttgaattcgattccttggtcacaatatatatcaaggtacaatcattccaatcgaaaggtcaatagagtttgctagcaaattccccaaccaaatcttagacaaaacccagttacaaagatttctaggttgtctaa

SEQ ID NO: 9604 - DNA, 1063 bp, Glycine max
  Gm_smallRNAprecursor_2437
gtttcccatccaaatatctaatgaaggaataactacaaattatttaggaagaaaaattatatttaatttttctactaaaccaatttccagaaatataaatcttatagaaaataagattaatcaaattaacttcttaaaagaagaagtatcttttaataatattcagatacaactgggaaaaccccaagtaaaagaaagaattcaatctttattaaatcatattgaatcgaccgtttgttctgaattgccacatgcattttgggacagaaagaaacatattgtcgatctcccttatgagaaagactttagggaaaaacaaattcccacaaaagccagaccaatccaaatgaatgaagaacttcttcaatactgtcaaaaggaaatcaaggatttgcttgataaaggcctaatccagaaaagcaaaagcccatggtcttgtgcggctttttatgttaacaaacaatctgagattgagcgtggaacaccccgcttagtcataaattacaaaccattaaatcaagcattacaatggattaaatatcctattccaaacaaaaaagatttgcttaacagattaaattctgcaaagatattttcaaaatttgatatgaaatctggattttggcaaatccaaatccaagaatcagataggtacaaaacagcgtttactgtacctttcgggcaatatgaatggaacgtgatgccattcggactgaagaatgccccttcagaatttcaaaaaattatgaacgatatttttaatccctattcaaaatttgtcattgtctacatagatgatgttttaatcttttcccaaaacattgaccaacatttcaaacatctccaaaccttcatacatatcatcaaacaaaatggtttggcagtctccaaatcaaaaatcaatcttttccaaacttgaattcgattccttggtcacaatatatatcaaggtacaatcattccaatcgaaaggtcaatagagtttgctagcaaattccccaaccaaatcttagacaaaacccagttacaaagatttctaggttgtctaaattacgtaggagaa

SEQ ID NO: 9605 - DNA, 1095 bp, Glycine max
  Gm_smallRNAprecursor_2438
tgaatggaacgtgatgccattcggactgaagaatgccccttcagaatttcaaaaaattatgaacgatatttttaatccctattcaaaatttgtcattgtctacatagatgatgttttaatcttttcccaaaacattgaccaacatttcaaacatctccaaaccttcatacatatcatcaaacaaaatggtttggcagtctccaaatcaaaaatcaatcttttccaaacttgaattcgattccttggtcacaatatatatcaaggtacaatcattccaatcgaaaggtcaatagagtttgctagcaaattccccaaccaaatcttagacaaaacccagttacaaagatttctaggttgtctaaattacgtaggagaatttgtcccctatttaaataatattgtcaagccattacatgataggctgaagaaaaatccgcctccttggtctgacctccatacacaaacggttaaagaaatcaaagtcaaagtccaatccattaaatgtctgtatcttcctattccacaggcatttaaaattgtcgaaactgatgcttcagacataggttatggtggcatcctcaaacaaagagtccatggccaagatcatgtcattgcatatacatcaaaacattggaatcctgcacaattaaaatattcaactgttaaaaaagaggttttagcaattgttttgtgcatttccaaatttcaatcggatttattaaaccaaaaatttttaatcagggttgattgtaaatcagccaaagatattttacaaaaagatgttaaaaaccttgcctcaaaacaaatttttgcacgatggcaagcaattttaagtgtctttgattttgacatagaatacatcaagggcacctcaaattcactacctgactaccttacccgtgaattcttacagaaaagtggtaatgcctcctaaggcatcgggaatctccctacggggaggaaggagtacaggcaaaggagccaggctggctcttccagagccaaccatcaagaaatcatctacctcttctgggtcaccaacccaggctgggtcatctacccagaaaaccaatttagaagggtcatcaacccaga

SEQ ID NO: 9606 - DNA, 1095 bp, Glycine max; identical to SEQ ID NO: 9605
  Gm_smallRNAprecursor_2439

SEQ ID NO: 9607 - DNA, 1095 bp, Glycine max; identical to SEQ ID NO: 9605
  Gm_smallRNAprecursor_2440

SEQ ID NO: 9608 - DNA, 1095 bp, Glycine max; identical to SEQ ID NO: 9605
  Gm_smallRNAprecursor_2441

SEQ ID NO: 9609 - DNA, 1035 bp, Glycine max
  Gm_smallRNAprecursor_2442
attgtctacatagatgatgttttaatcttttcccaaaacattgaccaacatttcaaacatctccaaaccttcatacatatcatcaaacaaaatggtttggcagtctccaaatcaaaaatcaatcttttccaaacttgaattcgattccttggtcacaatatatatcaaggtacaatcattccaatcgaaaggtcaatagagtttgctagcaaattccccaaccaaatcttagacaaaacccagttacaaagatttctaggttgtctaaattacgtaggagaatttgtcccctatttaaataatattgtcaagccattacatgataggctgaagaaaaatccgcctccttggtctgacctccatacacaaacggttaaagaaatcaaagtcaaagtccaatccattaaatgtctgtatcttcctattccacaggcatttaaaattgtcgaaactgatgcttcagacataggttatggtggcatcctcaaacaaagagtccatggccaagatcatgtcattgcatatacatcaaaacattggaatcctgcacaattaaaatattcaactgttaaaaaagaggttttagcaattgttttgtgcatttccaaatttcaatcggatttattaaaccaaaaatttttaatcagggttgattgtaaatcagccaaagatattttacaaaaagatgttaaaaaccttgcctcaaaacaaatttttgcacgatggcaagcaattttaagtgtctttgattttgacatagaatacatcaagggcacctcaaattcactacctgactaccttacccgtgaattcttacagaaaagtggtaatgcctcctaaggcatcgggaatctccctacggggaggaaggagtacaggcaaaggagccaggctggctcttccagagccaaccatcaagaaatcatctacctcttctgggtcaccaacccaggctgggtcatctacccagaaaaccaatttagaagggtcatcaacccagattgcctcaatcaaacctgagccatccactcagga

SEQ ID NO: 9610 - DNA, 1035 bp, Glycine max; identical to SEQ ID NO: 9609
  Gm_smallRNAprecursor_2443

SEQ ID NO: 9611 - DNA, 1113 bp, Glycine max
  Gm_smallRNAprecursor_2444
attgtctacatagatgatgttttaatcttttcccaaaacattgaccaacatttcaaacatctccaaaccttcatacatatcatcaaacaaaatggtttggcagtctccaaatcaaaaatcaatcttttccaaacttgaattcgattccttggtcacaatatatatcaaggtacaatcattccaatcgaaaggtcaatagagtttgctagcaaattccccaaccaaatcttagacaaaacccagttacaaagatttctaggttgtctaaattacgtaggagaatttgtcccctatttaaataatattgtcaagccattacatgataggctgaagaaaaatccgcctccttggtctgacctccatacacaaacggttaaagaaatcaaagtcaaagtccaatccattaaatgtctgtatcttcctattccacaggcatttaaaattgtcgaaactgatgcttcagacataggttatggtggcatcctcaaacaaagagtccatggccaagatcatgtcattgcatatacatcaaaacattggaatcctgcacaattaaaatattcaactgttaaaaaagaggttttagcaattgttttgtgcatttccaaatttcaatcggatttattaaaccaaaaatttttaatcagggttgattgtaaatcagccaaagatattttacaaaaagatgttaaaaaccttgcctcaaaacaaatttttgcacgatggcaagcaattttaagtgtctttgattttgacatagaatacatcaagggcacctcaaattcactacctgactaccttacccgtgaattcttacagaaaagtggtaatgcctcctaaggcatcgggaatctccctacggggaggaaggagtacaggcaaaggagccaggctggctcttccagagccaaccatcaagaaatcatctacctcttctgggtcaccaacccaggctgggtcatctacccagaaaaccaatttagaagggtcatcaacccagattgcctcaatcaaacctgagccatccactcaggaatctcccaaaccggcaaccgccaaacaaacatcggctgactatgcatggccaattgaaacccttcaggcccttcaaga

SEQ ID NO: 9612 - DNA, 1113 bp, Glycine max; identical to SEQ ID NO: 9611
  Gm_smallRNAprecursor_2445

SEQ ID NO: 9613 - DNA, 1114 bp, Glycine max
  Gm_smallRNAprecursor_2446
attgtctacatagatgatgttttaatcttttcccaaaacattgaccaacatttcaaacatctccaaaccttcatacatatcatcaaacaaaatggtttggcagtctccaaatcaaaaatcaatcttttccaaacttgaattcgattccttggtcacaatatatatcaaggtacaatcattccaatcgaaaggtcaatagagtttgctagcaaattccccaaccaaatcttagacaaaacccagttacaaagatttctaggttgtctaaattacgtaggagaatttgtcccctatttaaataatattgtcaagccattacatgataggctgaagaaaaatccgcctccttggtctgacctccatacacaaacggttaaagaaatcaaagtcaaagtccaatccattaaatgtctgtatcttcctattccacaggcatttaaaattgtcgaaactgatgcttcagacataggttatggtggcatcctcaaacaaagagtccatggccaagatcatgtcattgcatatacatcaaaacattggaatcctgcacaattaaaatattcaactgttaaaaaagaggttttagcaattgttttgtgcatttccaaatttcaatcggatttattaaaccaaaaatttttaatcagggttgattgtaaatcagccaaagatattttacaaaaagatgttaaaaaccttgcctcaaaacaaatttttgcacgatggcaagcaattttaagtgtctttgattttgacatagaatacatcaagggcacctcaaattcactacctgactaccttacccgtgaattcttacagaaaagtggtaatgcctcctaaggcatcgggaatctccctacggggaggaaggagtacaggcaaaggagccaggctggctcttccagagccaaccatcaagaaatcatctacctcttctgggtcaccaacccaggctgggtcatctacccagaaaaccaatttagaagggtcatcaacccagattgcctcaatcaaacctgagccatccactcaggaatctcccaaaccggcaaccgccaaacaaacatcggctgactatgcatggccaattgaaacccttcaggcccttcaagac

SEQ ID NO: 9614 - DNA, 1114 bp, Glycine max; identical to SEQ ID NO: 9613
  Gm_smallRNAprecursor_2447

SEQ ID NO: 9615 - DNA, 1141 bp, Glycine max
  Gm_smallRNAprecursor_2448
aaaccttcatacatatcatcaaacaaaatggtttggcagtctccaaatcaaaaatcaatcttttccaaacttgaattcgattccttggtcacaatatatatcaaggtacaatcattccaatcgaaaggtcaatagagtttgctagcaaattccccaaccaaatcttagacaaaacccagttacaaagatttctaggttgtctaaattacgtaggagaatttgtcccctatttaaataatattgtcaagccattacatgataggctgaagaaaaatccgcctccttggtctgacctccatacacaaacggttaaagaaatcaaagtcaaagtccaatccattaaatgtctgtatcttcctattccacaggcatttaaaattgtcgaaactgatgcttcagacataggttatggtggcatcctcaaacaaagagtccatggccaagatcatgtcattgcatatacatcaaaacattggaatcctgcacaattaaaatattcaactgttaaaaaagaggttttagcaattgttttgtgcatttccaaatttcaatcggatttattaaaccaaaaatttttaatcagggttgattgtaaatcagccaaagatattttacaaaaagatgttaaaaaccttgcctcaaaacaaatttttgcacgatggcaagcaattttaagtgtctttgattttgacatagaatacatcaagggcacctcaaattcactacctgactaccttacccgtgaattcttacagaaaagtggtaatgcctcctaaggcatcgggaatctccctacggggaggaaggagtacaggcaaaggagccaggctggctcttccagagccaaccatcaagaaatcatctacctcttctgggtcaccaacccaggctgggtcatctacccagaaaaccaatttagaagggtcatcaacccagattgcctcaatcaaacctgagccatccactcaggaatctcccaaaccggcaaccgccaaacaaacatcggctgactatgcatggccaattgaaacccttcaggcccttcaagacatgggtctgaccaaatttccaaaaataatcaaaaaatcttgggcagacattgcctcagaatctgatgatgaatctgaatcaaatttacaaa

SEQ ID NO: 9616 - DNA, 1091 bp, Glycine max
  Gm_smallRNAprecursor_2449
agcaattttaagtgtctttgattttgacatagaatacatcaagggcacctcaaattcactacctgactaccttacccgtgaattcttacagaaaagtggtaatgcctcctaaggcatcgggaatctccctacggggaggaaggagtacaggcaaaggagccaggctggctcttccagagccaaccatcaagaaatcatctacctcttctgggtcaccaacccaggctgggtcatctacccagaaaaccaatttagaagggtcatcaacccagattgcctcaatcaaacctgagccatccactcaggaatctcccaaaccggcaaccgccaaacaaacatcggctgactatgcatggccaattgaaacccttcaggcccttcaagacatgggtctgaccaaatttccaaaaataatcaaaaaatcttgggcagacattgcctcagaatctgatgatgaatctgaatcaaatttacaaactgatccaaaatgcgtcaatgaccaaaacagccaccaatactaaaggaaaactacctttagccaaagctcaaacaccacctaccaaacaaactaacaattatatttataaaaataaattgttaactgttttgcagatggaacctgaattttgggacaaaaatcccttcaaggcgacggccaaggctttcccaccaggatttcactacaaaccaaccaccatcctgaagacaagaactttttatgaattgattttggtagattcaaactcagtatctatcaaacatttcaaagatccaaaagaccaaaccttaaacacccactcaaccatccaaatactaaaagttcttcaaccaagacactttggttcggacttgaacaaaggaaagagattttcagttccatttgatccggtaggttatacctattgggattacgttgatgcttggactaaggtgttttggcaccaaaatacccgcttcaagcattcatggctgatatatttcaagaccaaaacaatttacaattttcccaattggtttttgcaatggtgggacttctttggaccaatcccagagatattcccagaaacggtccaacaaggattttcccaatt

SEQ ID NO: 9617 - DNA, 1192 bp, Glycine max
  Gm_smallRNAprecursor_2450
gaaaagtggtaatgcctcctaaggcatcgggaatctccctacggggaggaaggagtacaggcaaaggagccaggctggctcttccagagccaaccatcaagaaatcatctacctcttctgggtcaccaacccaggctgggtcatctacccagaaaaccaatttagaagggtcatcaacccagattgcctcaatcaaacctgagccatccactcaggaatctcccaaaccggcaaccgccaaacaaacatcggctgactatgcatggccaattgaaacccttcaggcccttcaagacatgggtctgaccaaatttccaaaaataatcaaaaaatcttgggcagacattgcctcagaatctgatgatgaatctgaatcaaatttacaaactgatccaaaatgcgtcaatgaccaaaacagccaccaatactaaaggaaaactacctttagccaaagctcaaacaccacctaccaaacaaactaacaattatatttataaaaataaattgttaactgttttgcagatggaacctgaattttgggacaaaaatcccttcaaggcgacggccaaggctttcccaccaggatttcactacaaaccaaccaccatcctgaagacaagaactttttatgaattgattttggtagattcaaactcagtatctatcaaacatttcaaagatccaaaagaccaaaccttaaacacccactcaaccatccaaatactaaaagttcttcaaccaagacactttggttcggacttgaacaaaggaaagagattttcagttccatttgatccggtaggttatacctattgggattacgttgatgcttggactaaggtgttttggcaccaaaatacccgcttcaagcattcatggctgatatatttcaagaccaaaacaatttacaattttcccaattggtttttgcaatggtgggacttctttggaccaatcccagagatattcccagaaacggtccaacaaggattttcccaatttaagaaacaatacaattcgcaggaatcacgaattccagcagatcttaaatacttttcaagctttgcactgtcatggatattctcatggcaatatcgttacagcaagactgaaaagacaaaccaatatccatcactacaaagacacgcatttgtaaaatggtggacacaatttgactcatccaaagcggatc

SEQ ID NO: 9618 - DNA, 1099 bp, Glycine max
  Gm_smallRNAprecursor_2451
tggtaatgcctcctaaggcatcgggaatctccctacggggaggaaggagtacaggcaaaggagccaggctggctcttccagagccaaccatcaagaaatcatctacctcttctgggtcaccaacccaggctgggtcatctacccagaaaaccaatttagaagggtcatcaacccagattgcctcaatcaaacctgagccatccactcaggaatctcccaaaccggcaaccgccaaacaaacatcggctgactatgcatggccaattgaaacccttcaggcccttcaagacatgggtctgaccaaatttccaaaaataatcaaaaaatcttgggcagacattgcctcagaatctgatgatgaatctgaatcaaatttacaaactgatccaaaatgcgtcaatgaccaaaacagccaccaatactaaaggaaaactacctttagccaaagctcaaacaccacctaccaaacaaactaacaattatatttataaaaataaattgttaactgttttgcagatggaacctgaattttgggacaaaaatcccttcaaggcgacggccaaggctttcccaccaggatttcactacaaaccaaccaccatcctgaagacaagaactttttatgaattgattttggtagattcaaactcagtatctatcaaacatttcaaagatccaaaagaccaaaccttaaacacccactcaaccatccaaatactaaaagttcttcaaccaagacactttggttcggacttgaacaaaggaaagagattttcagttccatttgatccggtaggttatacctattgggattacgttgatgcttggactaaggtgttttggcaccaaaatacccgcttcaagcattcatggctgatatatttcaagaccaaaacaatttacaattttcccaattggtttttgcaatggtgggacttctttggaccaatcccagagatattcccagaaacggtccaacaaggattttcccaatttaagaaacaatacaattcgcaggaatcacgaattccagcagatcttaaatacttttcaagctttgcactgtcatggatattctcatggcaatatcgttacagca

SEQ ID NO: 9619 - DNA, 1158 bp, Glycine max
  Gm_smallRNAprecursor_2452
tcctaaggcatcgggaatctccctacggggaggaaggagtacaggcaaaggagccaggctggctcttccagagccaaccatcaagaaatcatctacctcttctgggtcaccaacccaggctgggtcatctacccagaaaaccaatttagaagggtcatcaacccagattgcctcaatcaaacctgagccatccactcaggaatctcccaaaccggcaaccgccaaacaaacatcggctgactatgcatggccaattgaaacccttcaggcccttcaagacatgggtctgaccaaatttccaaaaataatcaaaaaatcttgggcagacattgcctcagaatctgatgatgaatctgaatcaaatttacaaactgatccaaaatgcgtcaatgaccaaaacagccaccaatactaaaggaaaactacctttagccaaagctcaaacaccacctaccaaacaaactaacaattatatttataaaaataaattgttaactgttttgcagatggaacctgaattttgggacaaaaatcccttcaaggcgacggccaaggctttcccaccaggatttcactacaaaccaaccaccatcctgaagacaagaactttttatgaattgattttggtagattcaaactcagtatctatcaaacatttcaaagatccaaaagaccaaaccttaaacacccactcaaccatccaaatactaaaagttcttcaaccaagacactttggttcggacttgaacaaaggaaagagattttcagttccatttgatccggtaggttatacctattgggattacgttgatgcttggactaaggtgttttggcaccaaaatacccgcttcaagcattcatggctgatatatttcaagaccaaaacaatttacaattttcccaattggtttttgcaatggtgggacttctttggaccaatcccagagatattcccagaaacggtccaacaaggattttcccaatttaagaaacaatacaattcgcaggaatcacgaattccagcagatcttaaatacttttcaagctttgcactgtcatggatattctcatggcaatatcgttacagcaagactgaaaagacaaaccaatatccatcactacaaagacacgcatttgtaaaatggtggacacaatttg

SEQ ID NO: 9620 - DNA, 1167 bp, Glycine max
  Gm_smallRNAprecursor_2453
tcctaaggcatcgggaatctccctacggggaggaaggagtacaggcaaaggagccaggctggctcttccagagccaaccatcaagaaatcatctacctcttctgggtcaccaacccaggctgggtcatctacccagaaaaccaatttagaagggtcatcaacccagattgcctcaatcaaacctgagccatccactcaggaatctcccaaaccggcaaccgccaaacaaacatcggctgactatgcatggccaattgaaacccttcaggcccttcaagacatgggtctgaccaaatttccaaaaataatcaaaaaatcttgggcagacattgcctcagaatctgatgatgaatctgaatcaaatttacaaactgatccaaaatgcgtcaatgaccaaaacagccaccaatactaaaggaaaactacctttagccaaagctcaaacaccacctaccaaacaaactaacaattatatttataaaaataaattgttaactgttttgcagatggaacctgaattttgggacaaaaatcccttcaaggcgacggccaaggctttcccaccaggatttcactacaaaccaaccaccatcctgaagacaagaactttttatgaattgattttggtagattcaaactcagtatctatcaaacatttcaaagatccaaaagaccaaaccttaaacacccactcaaccatccaaatactaaaagttcttcaaccaagacactttggttcggacttgaacaaaggaaagagattttcagttccatttgatccggtaggttatacctattgggattacgttgatgcttggactaaggtgttttggcaccaaaatacccgcttcaagcattcatggctgatatatttcaagaccaaaacaatttacaattttcccaattggtttttgcaatggtgggacttctttggaccaatcccagagatattcccagaaacggtccaacaaggattttcccaatttaagaaacaatacaattcgcaggaatcacgaattccagcagatcttaaatacttttcaagctttgcactgtcatggatattctcatggcaatatcgttacagcaagactgaaaagacaaaccaatatccatcactacaaagacacgcatttgtaaaatggtggacacaatttgactcatcca

SEQ ID NO: 9621 - DNA, 1208 bp, Glycine max
  Gm_smallRNAprecursor_2454
tcctaaggcatcgggaatctccctacggggaggaaggagtacaggcaaaggagccaggctggctcttccagagccaaccatcaagaaatcatctacctcttctgggtcaccaacccaggctgggtcatctacccagaaaaccaatttagaagggtcatcaacccagattgcctcaatcaaacctgagccatccactcaggaatctcccaaaccggcaaccgccaaacaaacatcggctgactatgcatggccaattgaaacccttcaggcccttcaagacatgggtctgaccaaatttccaaaaataatcaaaaaatcttgggcagacattgcctcagaatctgatgatgaatctgaatcaaatttacaaactgatccaaaatgcgtcaatgaccaaaacagccaccaatactaaaggaaaactacctttagccaaagctcaaacaccacctaccaaacaaactaacaattatatttataaaaataaattgttaactgttttgcagatggaacctgaattttgggacaaaaatcccttcaaggcgacggccaaggctttcccaccaggatttcactacaaaccaaccaccatcctgaagacaagaactttttatgaattgattttggtagattcaaactcagtatctatcaaacatttcaaagatccaaaagaccaaaccttaaacacccactcaaccatccaaatactaaaagttcttcaaccaagacactttggttcggacttgaacaaaggaaagagattttcagttccatttgatccggtaggttatacctattgggattacgttgatgcttggactaaggtgttttggcaccaaaatacccgcttcaagcattcatggctgatatatttcaagaccaaaacaatttacaattttcccaattggtttttgcaatggtgggacttctttggaccaatcccagagatattcccagaaacggtccaacaaggattttcccaatttaagaaacaatacaattcgcaggaatcacgaattccagcagatcttaaatacttttcaagctttgcactgtcatggatattctcatggcaatatcgttacagcaagactgaaaagacaaaccaatatccatcactacaaagacacgcatttgtaaaatggtggacacaatttgactcatccaaagcggatccagaacaagtaaaactatggttccaatcccat

SEQ ID NO: 9622 - DNA, 1208 bp, Glycine max; identical to SEQ ID NO: 9621
  Gm_smallRNAprecursor_2455

SEQ ID NO: 9623 - DNA, 1211 bp, Glycine max
  Gm_smallRNAprecursor_2456
tcctaaggcatcgggaatctccctacggggaggaaggagtacaggcaaaggagccaggctggctcttccagagccaaccatcaagaaatcatctacctcttctgggtcaccaacccaggctgggtcatctacccagaaaaccaatttagaagggtcatcaacccagattgcctcaatcaaacctgagccatccactcaggaatctcccaaaccggcaaccgccaaacaaacatcggctgactatgcatggccaattgaaacccttcaggcccttcaagacatgggtctgaccaaatttccaaaaataatcaaaaaatcttgggcagacattgcctcagaatctgatgatgaatctgaatcaaatttacaaactgatccaaaatgcgtcaatgaccaaaacagccaccaatactaaaggaaaactacctttagccaaagctcaaacaccacctaccaaacaaactaacaattatatttataaaaataaattgttaactgttttgcagatggaacctgaattttgggacaaaaatcccttcaaggcgacggccaaggctttcccaccaggatttcactacaaaccaaccaccatcctgaagacaagaactttttatgaattgattttggtagattcaaactcagtatctatcaaacatttcaaagatccaaaagaccaaaccttaaacacccactcaaccatccaaatactaaaagttcttcaaccaagacactttggttcggacttgaacaaaggaaagagattttcagttccatttgatccggtaggttatacctattgggattacgttgatgcttggactaaggtgttttggcaccaaaatacccgcttcaagcattcatggctgatatatttcaagaccaaaacaatttacaattttcccaattggtttttgcaatggtgggacttctttggaccaatcccagagatattcccagaaacggtccaacaaggattttcccaatttaagaaacaatacaattcgcaggaatcacgaattccagcagatcttaaatacttttcaagctttgcactgtcatggatattctcatggcaatatcgttacagcaagactgaaaagacaaaccaatatccatcactacaaagacacgcatttgtaaaatggtggacacaatttgactcatccaaagcggatccagaacaagtaaaactatggttccaatcccatcca

SEQ ID NO: 9624 - DNA, 1098 bp, Glycine max
  Gm_smallRNAprecursor_2457
cgggaatctccctacggggaggaaggagtacaggcaaaggagccaggctggctcttccagagccaaccatcaagaaatcatctacctcttctgggtcaccaacccaggctgggtcatctacccagaaaaccaatttagaagggtcatcaacccagattgcctcaatcaaacctgagccatccactcaggaatctcccaaaccggcaaccgccaaacaaacatcggctgactatgcatggccaattgaaacccttcaggcccttcaagacatgggtctgaccaaatttccaaaaataatcaaaaaatcttgggcagacattgcctcagaatctgatgatgaatctgaatcaaatttacaaactgatccaaaatgcgtcaatgaccaaaacagccaccaatactaaaggaaaactacctttagccaaagctcaaacaccacctaccaaacaaactaacaattatatttataaaaataaattgttaactgttttgcagatggaacctgaattttgggacaaaaatcccttcaaggcgacggccaaggctttcccaccaggatttcactacaaaccaaccaccatcctgaagacaagaactttttatgaattgattttggtagattcaaactcagtatctatcaaacatttcaaagatccaaaagaccaaaccttaaacacccactcaaccatccaaatactaaaagttcttcaaccaagacactttggttcggacttgaacaaaggaaagagattttcagttccatttgatccggtaggttatacctattgggattacgttgatgcttggactaaggtgttttggcaccaaaatacccgcttcaagcattcatggctgatatatttcaagaccaaaacaatttacaattttcccaattggtttttgcaatggtgggacttctttggaccaatcccagagatattcccagaaacggtccaacaaggattttcccaatttaagaaacaatacaattcgcaggaatcacgaattccagcagatcttaaatacttttcaagctttgcactgtcatggatattctcatggcaatatcgttacagcaagactgaaaagacaaaccaa

SEQ ID NO: 9625 - DNA, 1190 bp, Glycine max
  Gm_smallRNAprecursor_2458
gtacaggcaaaggagccaggctggctcttccagagccaaccatcaagaaatcatctacctcttctgggtcaccaacccaggctgggtcatctacccagaaaaccaatttagaagggtcatcaacccagattgcctcaatcaaacctgagccatccactcaggaatctcccaaaccggcaaccgccaaacaaacatcggctgactatgcatggccaattgaaacccttcaggcccttcaagacatgggtctgaccaaatttccaaaaataatcaaaaaatcttgggcagacattgcctcagaatctgatgatgaatctgaatcaaatttacaaactgatccaaaatgcgtcaatgaccaaaacagccaccaatactaaaggaaaactacctttagccaaagctcaaacaccacctaccaaacaaactaacaattatatttataaaaataaattgttaactgttttgcagatggaacctgaattttgggacaaaaatcccttcaaggcgacggccaaggctttcccaccaggatttcactacaaaccaaccaccatcctgaagacaagaactttttatgaattgattttggtagattcaaactcagtatctatcaaacatttcaaagatccaaaagaccaaaccttaaacacccactcaaccatccaaatactaaaagttcttcaaccaagacactttggttcggacttgaacaaaggaaagagattttcagttccatttgatccggtaggttatacctattgggattacgttgatgcttggactaaggtgttttggcaccaaaatacccgcttcaagcattcatggctgatatatttcaagaccaaaacaatttacaattttcccaattggtttttgcaatggtgggacttctttggaccaatcccagagatattcccagaaacggtccaacaaggattttcccaatttaagaaacaatacaattcgcaggaatcacgaattccagcagatcttaaatacttttcaagctttgcactgtcatggatattctcatggcaatatcgttacagcaagactgaaaagacaaaccaatatccatcactacaaagacacgcatttgtaaaatggtggacacaatttgactcatccaaagcggatccagaacaagtaaaactatggttccaatcccatccagaattcctcaaaacagc

SEQ ID NO: 9626 - DNA, 1148 bp, Glycine max
  Gm_smallRNAprecursor_2459
attgcctcaatcaaacctgagccatccactcaggaatctcccaaaccggcaaccgccaaacaaacatcggctgactatgcatggccaattgaaacccttcaggcccttcaagacatgggtctgaccaaatttccaaaaataatcaaaaaatcttgggcagacattgcctcagaatctgatgatgaatctgaatcaaatttacaaactgatccaaaatgcgtcaatgaccaaaacagccaccaatactaaaggaaaactacctttagccaaagctcaaacaccacctaccaaacaaactaacaattatatttataaaaataaattgttaactgttttgcagatggaacctgaattttgggacaaaaatcccttcaaggcgacggccaaggctttcccaccaggatttcactacaaaccaaccaccatcctgaagacaagaactttttatgaattgattttggtagattcaaactcagtatctatcaaacatttcaaagatccaaaagaccaaaccttaaacacccactcaaccatccaaatactaaaagttcttcaaccaagacactttggttcggacttgaacaaaggaaagagattttcagttccatttgatccggtaggttatacctattgggattacgttgatgcttggactaaggtgttttggcaccaaaatacccgcttcaagcattcatggctgatatatttcaagaccaaaacaatttacaattttcccaattggtttttgcaatggtgggacttctttggaccaatcccagagatattcccagaaacggtccaacaaggattttcccaatttaagaaacaatacaattcgcaggaatcacgaattccagcagatcttaaatacttttcaagctttgcactgtcatggatattctcatggcaatatcgttacagcaagactgaaaagacaaaccaatatccatcactacaaagacacgcatttgtaaaatggtggacacaatttgactcatccaaagcggatccagaacaagtaaaactatggttccaatcccatccagaattcctcaaaacagctgatccagagacttctgtgtttttgaaccaaaagtctcatctggcagcatttttagcaggatcgacatcaaaggaggtcttagcta

SEQ ID NO: 9627 - DNA, 1149 bp, Glycine max
  Gm_smallRNAprecursor_2460
attgcctcaatcaaacctgagccatccactcaggaatctcccaaaccggcaaccgccaaacaaacatcggctgactatgcatggccaattgaaacccttcaggcccttcaagacatgggtctgaccaaatttccaaaaataatcaaaaaatcttgggcagacattgcctcagaatctgatgatgaatctgaatcaaatttacaaactgatccaaaatgcgtcaatgaccaaaacagccaccaatactaaaggaaaactacctttagccaaagctcaaacaccacctaccaaacaaactaacaattatatttataaaaataaattgttaactgttttgcagatggaacctgaattttgggacaaaaatcccttcaaggcgacggccaaggctttcccaccaggatttcactacaaaccaaccaccatcctgaagacaagaactttttatgaattgattttggtagattcaaactcagtatctatcaaacatttcaaagatccaaaagaccaaaccttaaacacccactcaaccatccaaatactaaaagttcttcaaccaagacactttggttcggacttgaacaaaggaaagagattttcagttccatttgatccggtaggttatacctattgggattacgttgatgcttggactaaggtgttttggcaccaaaatacccgcttcaagcattcatggctgatatatttcaagaccaaaacaatttacaattttcccaattggtttttgcaatggtgggacttctttggaccaatcccagagatattcccagaaacggtccaacaaggattttcccaatttaagaaacaatacaattcgcaggaatcacgaattccagcagatcttaaatacttttcaagctttgcactgtcatggatattctcatggcaatatcgttacagcaagactgaaaagacaaaccaatatccatcactacaaagacacgcatttgtaaaatggtggacacaatttgactcatccaaagcggatccagaacaagtaaaactatggttccaatcccatccagaattcctcaaaacagctgatccagagacttctgtgtttttgaaccaaaagtctcatctggcagcatttttagcaggatcgacatcaaaggaggtcttagctaa

SEQ ID NO: 9628 - DNA, 1249 bp, Glycine max
  Gm_smallRNAprecursor_2461
attgcctcaatcaaacctgagccatccactcaggaatctcccaaaccggcaaccgccaaacaaacatcggctgactatgcatggccaattgaaacccttcaggcccttcaagacatgggtctgaccaaatttccaaaaataatcaaaaaatcttgggcagacattgcctcagaatctgatgatgaatctgaatcaaatttacaaactgatccaaaatgcgtcaatgaccaaaacagccaccaatactaaaggaaaactacctttagccaaagctcaaacaccacctaccaaacaaactaacaattatatttataaaaataaattgttaactgttttgcagatggaacctgaattttgggacaaaaatcccttcaaggcgacggccaaggctttcccaccaggatttcactacaaaccaaccaccatcctgaagacaagaactttttatgaattgattttggtagattcaaactcagtatctatcaaacatttcaaagatccaaaagaccaaaccttaaacacccactcaaccatccaaatactaaaagttcttcaaccaagacactttggttcggacttgaacaaaggaaagagattttcagttccatttgatccggtaggttatacctattgggattacgttgatgcttggactaaggtgttttggcaccaaaatacccgcttcaagcattcatggctgatatatttcaagaccaaaacaatttacaattttcccaattggtttttgcaatggtgggacttctttggaccaatcccagagatattcccagaaacggtccaacaaggattttcccaatttaagaaacaatacaattcgcaggaatcacgaattccagcagatcttaaatacttttcaagctttgcactgtcatggatattctcatggcaatatcgttacagcaagactgaaaagacaaaccaatatccatcactacaaagacacgcatttgtaaaatggtggacacaatttgactcatccaaagcggatccagaacaagtaaaactatggttccaatcccatccagaattcctcaaaacagctgatccagagacttctgtgtttttgaaccaaaagtctcatctggcagcatttttagcaggatcgacatcaaaggaggtcttagctaaaaatctgaaggaagttctacaaatgttacaacaggaagaagaagcttcatcctcaaagaaggaagaaacaagttctgctgaagacgaagaagatcccttt

SEQ ID NO: 9629 - DNA, 1134 bp, Glycine max
  Gm_smallRNAprecursor_2462
atcaaacctgagccatccactcaggaatctcccaaaccggcaaccgccaaacaaacatcggctgactatgcatggccaattgaaacccttcaggcccttcaagacatgggtctgaccaaatttccaaaaataatcaaaaaatcttgggcagacattgcctcagaatctgatgatgaatctgaatcaaatttacaaactgatccaaaatgcgtcaatgaccaaaacagccaccaatactaaaggaaaactacctttagccaaagctcaaacaccacctaccaaacaaactaacaattatatttataaaaataaattgttaactgttttgcagatggaacctgaattttgggacaaaaatcccttcaaggcgacggccaaggctttcccaccaggatttcactacaaaccaaccaccatcctgaagacaagaactttttatgaattgattttggtagattcaaactcagtatctatcaaacatttcaaagatccaaaagaccaaaccttaaacacccactcaaccatccaaatactaaaagttcttcaaccaagacactttggttcggacttgaacaaaggaaagagattttcagttccatttgatccggtaggttatacctattgggattacgttgatgcttggactaaggtgttttggcaccaaaatacccgcttcaagcattcatggctgatatatttcaagaccaaaacaatttacaattttcccaattggtttttgcaatggtgggacttctttggaccaatcccagagatattcccagaaacggtccaacaaggattttcccaatttaagaaacaatacaattcgcaggaatcacgaattccagcagatcttaaatacttttcaagctttgcactgtcatggatattctcatggcaatatcgttacagcaagactgaaaagacaaaccaatatccatcactacaaagacacgcatttgtaaaatggtggacacaatttgactcatccaaagcggatccagaacaagtaaaactatggttccaatcccatccagaattcctcaaaacagctgatccagagacttctgtgtttttgaaccaaaagtctcatctggcagcatttttagcaggatcgacatcaaaggaggtctt

SEQ ID NO: 9630 - DNA, 1087 bp, Glycine max
  Gm_smallRNAprecursor_2463
tgagccatccactcaggaatctcccaaaccggcaaccgccaaacaaacatcggctgactatgcatggccaattgaaacccttcaggcccttcaagacatgggtctgaccaaatttccaaaaataatcaaaaaatcttgggcagacattgcctcagaatctgatgatgaatctgaatcaaatttacaaactgatccaaaatgcgtcaatgaccaaaacagccaccaatactaaaggaaaactacctttagccaaagctcaaacaccacctaccaaacaaactaacaattatatttataaaaataaattgttaactgttttgcagatggaacctgaattttgggacaaaaatcccttcaaggcgacggccaaggctttcccaccaggatttcactacaaaccaaccaccatcctgaagacaagaactttttatgaattgattttggtagattcaaactcagtatctatcaaacatttcaaagatccaaaagaccaaaccttaaacacccactcaaccatccaaatactaaaagttcttcaaccaagacactttggttcggacttgaacaaaggaaagagattttcagttccatttgatccggtaggttatacctattgggattacgttgatgcttggactaaggtgttttggcaccaaaatacccgcttcaagcattcatggctgatatatttcaagaccaaaacaatttacaattttcccaattggtttttgcaatggtgggacttctttggaccaatcccagagatattcccagaaacggtccaacaaggattttcccaatttaagaaacaatacaattcgcaggaatcacgaattccagcagatcttaaatacttttcaagctttgcactgtcatggatattctcatggcaatatcgttacagcaagactgaaaagacaaaccaatatccatcactacaaagacacgcatttgtaaaatggtggacacaatttgactcatccaaagcggatccagaacaagtaaaactatggttccaatcccatccagaattcctcaaaacagctgatccagagacttctgtgtttttgaaccaaaagtctcatct

SEQ ID NO: 9631 - DNA, 1090 bp, Glycine max
  Gm_smallRNAprecursor_2464
tgagccatccactcaggaatctcccaaaccggcaaccgccaaacaaacatcggctgactatgcatggccaattgaaacccttcaggcccttcaagacatgggtctgaccaaatttccaaaaataatcaaaaaatcttgggcagacattgcctcagaatctgatgatgaatctgaatcaaatttacaaactgatccaaaatgcgtcaatgaccaaaacagccaccaatactaaaggaaaactacctttagccaaagctcaaacaccacctaccaaacaaactaacaattatatttataaaaataaattgttaactgttttgcagatggaacctgaattttgggacaaaaatcccttcaaggcgacggccaaggctttcccaccaggatttcactacaaaccaaccaccatcctgaagacaagaactttttatgaattgattttggtagattcaaactcagtatctatcaaacatttcaaagatccaaaagaccaaaccttaaacacccactcaaccatccaaatactaaaagttcttcaaccaagacactttggttcggacttgaacaaaggaaagagattttcagttccatttgatccggtaggttatacctattgggattacgttgatgcttggactaaggtgttttggcaccaaaatacccgcttcaagcattcatggctgatatatttcaagaccaaaacaatttacaattttcccaattggtttttgcaatggtgggacttctttggaccaatcccagagatattcccagaaacggtccaacaaggattttcccaatttaagaaacaatacaattcgcaggaatcacgaattccagcagatcttaaatacttttcaagctttgcactgtcatggatattctcatggcaatatcgttacagcaagactgaaaagacaaaccaatatccatcactacaaagacacgcatttgtaaaatggtggacacaatttgactcatccaaagcggatccagaacaagtaaaactatggttccaatcccatccagaattcctcaaaacagctgatccagagacttctgtgtttttgaaccaaaagtctcatctggc
